United States Patent Application Publication US 2006/0134663 A1 - sequence listing, part 35

SEQ ID NO: 60125 - DNA, 2006 bp, Homo Sapiens
ggatccattcaacctgcagaggataaaatgcagatagaggaaggtggtctctgagttggaagagaagacactgaggcctctaggtgcaggttttaaggaaaggcggtatattaatatttcatgccatgccacacaaagggtctgctgacccgggtggattgaagtcttgtgactgcctggtaggctctactacctatctcataaacagaaggtgctaaacagaggcacagaacctggctgaattgttgctaccagctaaaatgggttctagactgcggagaccacatctgcccggcgagcacagagccttgtcccttgccactccgccgcccatccacacctgctgccagctcaccatggatgatgatactgtcgccctcgtcatcgacaatggctctggcatgtgcagggctgcttcgcaggcgacagtgctctccaagccgtcttcctctccatcatggggcaccccaagcaccaaggtgtgatggtgggcatgggtcagaaggactcctacgtgggcgacaagggcccagagcaagagaggcattctgaccctgaagtaccgcatcgagcatggcatcgtcaccaactgggaggatatggaggagatttggctccacaccttctacagtgagctgcatgtggctcctgaggagcaccccctgctgctgactgaggcctctctgaaccccaaggccaaccacgagaaggtaaaccagatcatgtttgagaccttcaacaccccagccatgtatgtggccatccaggccttgctgtccctgtagcctctggccataccactggcatcgtgatggactctggtgatgggttcacccacactgtgcccatctacgggggggtatgccctcccccacaccatcctgcatctggacctggctggcccagacctgactgaccacctcatgaagatcctcaccgagcgcggctacagcttcaccaccacggccaagcgggaaatcgtgcatgacatcgaggagaacctgtgctatgttgccctcgactttgagcaggagatggccatggtggcctccaaccccctactggagaagagctaggagctgccaggtggccaagtcatctgcaatgagcagttccgctgccctgaggcactctttcagccttccttcctaggcatggaatcctgtggcatccatgaaactaccttcaactccatcatgaagtgtgacatggacatctgcaaagaccggtacgtcaacagagtgctgtctggcggcaccaccgtgtaccatggcatcgccgacaggatgcaggagatcaccggcttggctccaagcacgatgaagatcaagatcattgctccttctgagcgcaaatactccatgtggattggcagctccatcctggcctcgctgtccacctcccagcagatatggatcagcaagcaggagtatgacgagtccagcccctccatcgtccaccacaaatgcttctaggcggactgttacttagcagaaaacaagatgagattggcatggcatggctttatttgcttttttgttttttgtggttttttttttggcttgactcaggatttaaaaactggaacggtgaaggtgacagcagttggttggagcaagcatcccccgaagttctacaatgtggccgagactttgattgtacattgttcttttttttttaatagtcattccaaatattgtgagatgcattgttacaggaagtcccttggcctcctaaaagccaccccgcttctctttaaggagaatggcccagtcccctcccgagtctacacaggaggtgatagcattgcttcatgtaaattatgtaatgcaaaacttttttaattttcgccttaatactttttaattttgcttcattttgaatgatcagccttcgtggtgccccttttttgtcccccaacttgagagtgtatgaaggcttttggtctccctaggagtgggtagaggcagccagggtttacctgtacactgacttgagaccagctg

SEQ ID NO: 60126 - DNA, 405 bp, Homo Sapiens
atggcccaggtgcagctgcagtctagagaggtgcagttgctggagtctggcccaggactggtcaagccttcggagaccctgtccctcacctgcactgtctctggtttctccatcagtagttactactggagctggatccggcagcccgccggtaagggactggagtggattgggcgtatctataccagtgggagcaccaactacaacctctccctccagagtcgagtcaccatgtcagtagacacgtccaagaaccagttctccctgaagctgagctctatgaccgccgtggacacggccgtatattactgtgcgagagggccggagtggttactcggtatggacgtctggggccaagggaccagggtcaccgtctcctcagcctccaccaagggcccataggtc

SEQ ID NO: 60127 - DNA, 430 bp, Homo Sapiens
gtttagatggggtttcactgtgttagccaagatgatcttgatctcctgaccttgtgatccgcctgcctcagcctcccaaactgctaggattataggtgtgagccactgcgcccggcccatttacttttttatgtaagaaagttgatattcagacctatcctatctcagagagaacttaaacagctaacagataaatgttaattctgtaatatcctactaaaggaggactttcctatctttagaataatgccatacatgcatttgtctcaggtacagaagtttaatgcaagaaaaaaaatgttcatacctacagtaagttttgcaaattcatttggaaaattcttctctaaccattgtctacatttagcaacatcaggcatatattcacagtactaggagaaaaaaaaagaactgagtcacaacaaaacat

SEQ ID NO: 60128 - DNA, 322 bp, Homo Sapiens
actcagccaccctcagcgtctgggaccccagggcagagggtcaccatctcttgttctggaagcagctccaacatcggggaagaaattactgtaaactggtaccagcagcttccaggaacagcccccaaactcctcatctatagtaataatcagcggccctcaggggtccctgaccgattctctggctccaagtctggcacctcagcctccctggccatcactgggctccagtctgaggatgaggctgattattactggcagtcctatgacaggagtctgagtggtgtggtattcggcggagggaccaagctgaccgtcctag

SEQ ID NO: 60129 - DNA, 742 bp, Homo Sapiens
tagctgcvatgccaccacccctggctaacttttttgtatttttgtagagatgggatggtgtttcaccatattggccagggtggtctcaaactcctaacctcaagtgatccactcccctcagcctcccaaagtgctaggrttacaggcgtgagcgaccatgcccagcctgagtgcctgtatttaatgtacacgatctcatttagtcttaaaaaaacccctgtaaggtaatcatcgacaaccacattttacacaaggaagagattttgagaaactcgatagcatgtctcaagtcagacacttagcagcaaggcagagtccatttcattttatgggactagtctgcttcccagaataatcatcaaatgcaaaggaatttaattatctgcttaaaaaaacaagcccccattattaccacagttcacgtctgaccaattccaagatgttcttcccaaacttgatatgaacacattgacgcaattactggcgaaattgagcaagagtatgtagtagccagggctctgtgggaaagtgacagaaaactcctattggcaggatgtcatcctgcctgcsagggcccctcacttacaacaattatctaaaacctagcattagaaatgagaaaccacctgtgtggtaaccctggaagcaacctgtggttgccttgggcctgtgggcctgtaggttacaggtcaaagagaagtccagactaggctcagccagctgctatgaggaatgcaaactc

SEQ ID NO: 60130 - DNA, 251 bp, Homo Sapiens
ttttttttttttttttttttttttttttttacttgatatgttttatttcttgacttggacagttacatagttgttacaattactcattaacatgttcatttatgtttatgtacctttctatatacagattttaaaataaaagtttttttaatattgaaaacaatccaaatttgatggaagacacaaatctgcagattcataatgaacctaaatccatgataaatctatagctagacatataataaaaactg

SEQ ID NO: 60131 - DNA, 421 bp, Homo Sapiens
  misc_feature (229)..(229): n is a, c, g, or t
  misc_feature (329)..(329): n is a, c, g, or t
  misc_feature (334)..(334): n is a, c, g, or t
  misc_feature (347)..(347): n is a, c, g, or t
  misc_feature (373)..(373): n is a, c, g, or t
  misc_feature (394)..(394): n is a, c, g, or t
  misc_feature (400)..(400): n is a, c, g, or t
ttttctggcacttatttatatttttttttttttttccaagctgtcactgggctcctgacctgcccctgaactccaccctgccaggcagccaacaaacaagctttttttaattgacccaggcaagaaaggggagggattggaggaaaaagctgggataggcaggccctggaaaggtcacctacctgctggctccaggccagtcttgaaagtgccaggggttctggcccantgcagcccacaggcccccagcagcccatgcactccaggctctgaccacaaggccagtctaaagggatgtgtgtgggcaaagtgaaggggcaggggtggancaaancatggatgcatanaacaagaaagaacaaggacactgcantcccattgccctgggagtcanccccancttcatggctcctggggacct

SEQ ID NO: 60132 - DNA, 474 bp, Homo Sapiens
ttttttttttttaccctctcatgcctatgtctgcttttgcttccaaagacccttctgagtaaggactgtcctcagactactggagtcatttagtcacaagcttgcctgaggctcagagctggcaatacctgggagtttatgtcaatcccacagcacccagcaaccttgcctgcaaattatttacccatgattgacaggtgcaggtgtatgaaagtccagctccttgacttgaggggtgcctttgtggtgaattagctttgggaaaagggaatccagaggccaactttgtaaaactccagatagataaatggaaagaaatctttgccttggaagtccagttgagaaagatagtgatttacttcagactgtggaaagagagactaaaatctttactttctcatgggaaagaagcctatggtgaaagagaaacaaagagaatggtgggaaatagggtgggtctactcagtagcttta

SEQ ID NO: 60133 - DNA, 621 bp, Homo Sapiens
tttttctgtatctaatggattatgccgctctggaacattcatgtgatgcttttgttaattgcttatacattttattaagctaatgagcttggtcatagtaacatataaaatcaagaatcgtttaacttttgcaataaaaatcttgatgttgactctgaagtagtaagatgcaacttcaatgtactgggattgaggcagccatagcaatattaccacaggttttccaaaaattaacacaaatattttctattctagatgtgatatctttggcatcactgttcattcttttcctccttgattaaagtgaaacaattacattaaaatagttttatgatttaaaaatcattctttttttaagctattatttttaatgtaggtcagtgtgttatgtaaattgatgtccactacctgaacatgtgatgctttctcttttattccttggtatttcctccatattctctgagggccttcagtcaatttttttaaaggaaataataagttcaaatatgtatctatgacttagggttacaaagaatattttctttgcctccagtatactttgtattaaaaaaattataaaagggcataggttttcattttcaaatatttgaaaaaaaaggc

SEQ ID NO: 60134 - DNA, 1006 bp, Homo Sapiens
  misc_feature (687)..(687): n is a, c, g, or t
  misc_feature (707)..(721): n is a, c, g, or t
  misc_feature (735)..(735): n is a, c, g, or t
  misc_feature (863)..(863): n is a, c, g, or t
agtcaataaaaaaaaaaaaaaaaaaaaaaagaaaaccactgaaattatttccactccaaggtcatgaagatagtctcttagattatattctgaaatccttataaatgtaaatttcatatttaggcctttaattcacctagatttggtttttttgcatatggtgtgaggtaaggattcactttcatttttttctctccatagggttacacacctgtcctatcattgtttgtaatctaactttctgcgcccatctgcaatgccacctctgtcatatgtccacatatgacatatgtaaatctgttgttggattctttcctctgttccattagtctgtctgttcttgtgccaatatcaagctgtcttcattattatcaatcatgtattgagatctgataaagtaagtcttttccaccttatttttcttctttgagagtgtcttgactattctggctctttgtattttcatgtaaggtttttctcccatataagttttaaaatcagcttgtcaattccaacaacaatgatgcacttgatagtttgggaatttattatagctatcaatcagttttgggaaaattgacgtctttacaatattgagttttctgattcatgaacatggtttacctctcttcccatgggggtctcctttaaggtttaccaataggattttatatttggggccattgnggtcttgcttatcttaagtnnnnnnnnnnnnnnnaaatctcttgaccncatgatctgcccgccttgtcctcccaaagtgctgggattacaggcgtgagccaccgcacctggcctgcaatacagtattgttaaccgtcttcaccatgttgtacgttagagctccagaaattatttancatgcataactgaaactttatactctttgaacaccacctccccatttccctctcccggcagccatttgtgcctctcggttctctttattagcttccattttgtgggtcagtttctcttctgccattttactgaagttgtggaa

SEQ ID NO: 60135 - DNA, 227968 bp, Homo Sapiens
gatcctccagcctaagcctgcccaatagctggaactacaggtgtgcgcccccatatccagctcattttaaattttttgcagagatgtggcgtcttgctatgttgcccaggctggtcttgaactcctgggctcaagtgatcctcccgtcttagcctcctgagtagctgagattacaggcgtgaaccactgcgtcctgctgactctgattttacaaccagcccacccctgccacaaacatcccagggaacagggatccctgacttctactccaggtggcctacctggtccagctgcctccccacacccaccaggccctggcccagctcttaccacaagctccagaccagcttggagctgcactttatagccgtagacggtggtaatcacttcctgcaagaagatggagctcctgggcggatccatcttgttgcgtccttccacgaggaggggctccaccccctcaggcagtacgtccacagtcttgatcagaacataggtcatgcggccttgcaagcggtagctgaagccgtcaaatgtgaggtaacgggggtcgccatagactgagcattgttcagactctgccaagaagtcagacagtgagaaggggccgggcgcagtggctcacgcctgtaatcccaggactttgggaggccaaggcgggtggatgacctgaggtcaggagtttgagaccagcctggccaacatggtgaaatcctgtctctactaaaaatacaaaaattagccaggtgtggtggtgcgtgcctgtaatcccagctacttggtaggctgaggcaagagaattgcttgaacccgggaggcagaggttgtagtgagcgccgagatcgcgccactgcactccagcctgggagacagagtaagacaccatctcaaaaaaacaaaagactgagaagggaccctgcccaggtgtgacagtccccagagtccctcccccacggtggcatcccctgtggccaccctcttaggctcaggctccctggatcctttcttttctttttttaattttctttttctttttttgagacagggtcttattctgtcacccagactggagtacaagtggtacgatcatagctcactgcagcctccacctcctggtctcgagtgatcctcctgagtagctgggactttaggtgcgcaccaccacccctagctaatttttttcttttttttttagaaatggccacactacattgcccaggctggtcttgaactcctggcctcaagaaatcctcccaccttggcctcccaaagtccaaagtgctgagattacaggcataagccaccaagcccggtacctagacttttttttttcaatacctactgacattcaattagaggccctttattattatttttatttttttatttttttgagacaagatctcactctgtgtcccaggctggagtgcagtggtacaatcatagctcactgcagcctcaaactcctgagctcaagcaattctcctgcgtcagtctcctgagtagctgggactacaggcacaagccactacacctaactaattttttaaaattttaaaattttttgtagggacagggtcttcctatgttggccaggttggtgttaaattcctgggctgaagtgattcttccacctctgcctcccaagtactgggattacaggcatgaaccaccatgcccagcctccctggatccttgatcttcaattttctctatctcctggcctgattaaaaaccttagagggggcgggcacagtggctcatgcctgtaatcccaacactttaggaggctgaggcaggaggaacacatgagcccatgagttcaagcccatcttgggcaacatagcaagaccccatctctagaaaaaaaatagcaaaattggctgggtgtggtggtccatgcctgtagtcccagctacttgggaggctgagatgtgaggatcacatgattgcaggcatttgaggttgcagctagctatatgatggtgccagtgcactccagcctgggcaacagagcaagaccctatctcaaaaaacaaacaaacaagaaaagaaaaactttggaggatctccttgaccagtcccctctttttgccctgcaggtggagggtcccagaggggatcaggacctggcacatggccacagagttagcaagagctaaactggaggccaggcctcctgatccagtcgcccgccccaacccctgactgtgctggggttcaggctaagccccttcccaccctgcctcttcctccacctccgccctggccacaggtgctcccctctccaacctccccggtcgctccccttactgtctgagacacaattgctgttgctgttgtcggaagtgagctggcagtgggacccagaggggcatcggaagtccccgcactgaatggctcctcccgtgcagacacacttctccgtgcaaccgctggagacccagctcttgcccagctgtagaagttacaggaagagaaagagagtgaggagggggctgggcgcggcggctcacgcctgtaatcccaacactttgggaggccgagacgggtggatcacctgaggtcaggagtttgtgacgagcccagccaacatggtgaaaccctgtctctactaaaaatacaaaaattagccaggtgtggtagcacacacttgtaatcccagctactcaagaggctgaggcaggagaattgcttgaacccaggaggcagaggttgcagtgagccaagatcgcaccactgcattccagcctgggcaacagagcgagactctgtctcaagaaaaaaaaaaaaaagagtgaagaggggagggccagttctccttcctcttgccccagcagcctggcccaccatctaaatggcttaattgatgctggccagaggcagccacagtgtcatttggtcatccaaaagacaactgtgcaggccaagtgtggtggctcacacctgtaatcttagtactttgggaggccaaggcgggcagatcacttgaggtcaggagttcgagaccagcctggccaacatggtgaaacccaatctctactaaaaattcaaaaattagcaggctgtggtggcgcttgcctgtaatcccagctacacaggagactgaggcaggagaatggcttgaacccaggaggcagagattgcagtgcgcagagattatgccactgcactctagcctgctggataatagagggagactccgtctcaaaaaaaaaaaaaaaaaaaaaggcactgtgtttgtgcttggtgacttacatatgttgtgcaggaggtactactgaacccattttacagatgaggaaacggatataacagaggtcatctgactcatcagtggcaccatcaggattcaatcctaggttaggctgaaatgagcccatggtctttccactataccatgccatgtgctgcttgtttggattcctcagatccaaaacccaaaccatgtgccatcagcccagacctggctggagatcaatgtgccactcacaccagccttcacacccccgggccagctgtaagtcatgggtatcccaggctgagagaggcagagaaaaggagaaagcactgccctcaagctgtgttgcctccagtcccatttcccatgcccactcacagggatggagccaccatgggcatccttgcagccacactgacttctggggacacacttgtcttcactcagcacatagccgggctgacaaatgcagccctcagcgcaggcagaggggactttggcgccctcacaccggccatccaggtcccagcaggagggtgagcaggagggaaggcagttggtgtagctgctgtaggcagggcattccagagctgtgggtgaaggagacagtgggtcagtggagagggtcacagggggccaaggtgggcaggggctgtacaaaccaagctatgggtggatgaccaacaaggcttggggagctttttttgttcttttgttattcattcagcaaacatttactgagtatgggttatgtgccaggctttgggggaaagcaaggaaaaagcggctgggcatggtggctcacgcctgtaatcccagcactttgggaggctgaggtgggtggatcacaaggtcaggagatcgagaccatcctggccatcatggtgaaaccccatctctactaaaaatacaacaattagccaagcgtggtggtgggcgcctgtagtcccagctactcaggaggctgaggcaggagaatcacttgaacctgggaggcagaggttgcattgagccaagatcacaccactgcactccagcctgggcaacagagtgagactgtctcaaaaaaaaaaaaaaaaaaggaacaagaatggctctcccaagccagcatgaaggacggtggtcaaacagcaacggcagcaggaccttgatgtgtatgatcagtaggtgtgttgacagcaagagcatacaaggcatgatggaggcacagagcagggaggtattaattctgttgggggagttaaagaaaggcccttaagcaaaaatagtgtgaacaaatggaaatgcataccatgttcatggataagaaggttcagcaacatggtgatgttagttctgcctcagtgaatgtacacatttaatgtgatctcaataaaatatacatatatatatatgtatatatatgtgtatatatatatgtatatatatgtgtatatatatgtgtatatatatatgtatatatatgtgtatatatatgtgtatatatatatgtatatatatacgtatatatatatgtatatatatgtatatatatgtatatatatgtgtgtatatatatgtatatatatgtgtgtgtgtgtatatatatatatatatatatatatatatatatatatattttttttttttttttttttttttttttttttttttttgcgggggacgggcagggatggagtctctctctgacacccaggaatgatcttggctcactgcagcctctgcctccctggttccagagattctcctacttcagcctcccaggtagctgggattacaggcatgtgccaccatgcctggctaatttttgtatttttagtagagatggggtttcaccatgttggccaggctggtctcaaactcctgacctcaggtgatcctcccaccttggcctcccaaagtgctaggattacaggcatgagccaccacacccagccaccaaaagtattttatatatgtgtgtgcttttaataggacaagatgatttcaaagttgagctgaagacataagcaaaccagaaaagccaggaactccctaaaaaaaagagccatcagtagtgaatggccctccataagtcgtttattttgttttattttatttattcatttatttatttttttgagatagagtttcgctctttccgccctggctggagtgcaatggcacaatctcagctcactgcaacctccacctcccaggttcaagcaattctcctttctcagcctcctgagtagctgggattacaggcatatactagcacgcccagctattttttgtatttttagtagagatggggttttgccatgttggccaggctggtctcaaactcctgacctcaggtgatccgcccacctcggcctcccaaagtgctgggattacaggcgtaagccacagcgcccagcccaaagctcattttaaattttcagtgattacgactttgtgttactgctacatgcaaatacagatggaccgacagaacagaggagaaagctcagatatggatccaaatatatctgggaatttagtatatgataaattgtggtatctcagtccctgcgcaaagacagactagtcatttaataatattggaacagctggctagccttctggagaaaaacaaaaacaaagttgattcatacctcattttacacatcaggataaatcttcatgggtcaaaaacttaaatacacacacacacaaaaaaaaaaacccacttaaatataaaaaaatgaaaccataaaagttctagagcaggccggacacggtggctcacgcctgtaaccccagcacttggggaggacgaggcgggcagatcacttgaggccaggagtttgagaccagcctggccaacatggtgaaaccccatctctactaaaaatacaaaaaaattatccaggcatggtggtgggtgcctgtaatcccagctactcggaaggctgaggcaggagaatcgcttgaacccaggaggcagaggttgcagtgatccgggatcgtgccactgcagcctgggccacagagtgagactctgtctcaaacaaacaaaatttctagagcaaagaatcagcaaactcttttgtagcttctgtggggctagcatttatagctattgctcaagatgcagaagacataaaacaagattaatatatttgaccccataaaaatttttgtcctgcatggcaaaaaaaaaaaaagtcaaaagatgaaaacaaaaaggactggaaaactttgtgtaactcagagcactaataaaggtctactttccataacagataaaggacttccatgaaatagttcagtaaagaccaacgactcaatggaaaaatggtgactggataagagcagatagtttacagaaagggaaattcaaagggttcctaagtacatgaaaaaatgtccaatctcactcataataaaaactcaaattaagtcttgttatttttcatgaccaggtgcagtggctcatgcctgtaatcctagcactttgggaggcttgaggcaggtggatcacctgaggtgaggagttcaagaccagcctggccaatatggtgaaaccccgtctctactaaaaatacaaaaattagctgggtgtggtggcacatgccagtaatcccagctactcggaggctgaggcaggagattcactggaacctgggaggcagaggtcacagtgagccgagatcatagactccagcctgagctacaaagtgagactcaaaaaaaaaaaaaaaaaaagtatagcaatgtcaaataaaaactcaggcttatagcttctttcaaaaaaaaaaatcagaggatctggtcacactggacccacagtgatgcccagcagctgtggggcagctgagcagcggcccccttctgcacgggacctgtgtgctgctttcaccctgacccttcagccagctcaggctgctgtgctcatgttgcctccactggccctgagaagctctgcagcaccccctgcacctctgctttgctcctggaacgcgagagtgttttaaagaaaaataaactttcttggccggttgagatgtctcacgtctgtaatcccagcactttgggaggccaaggcaggcagatcacaaggtcaagagatcgagaccaacctggccaacatggtgaaaccctgtctctactaaaaatacaaaaattacctgggtgtggtggtgcgtgcctgcagtcccagctacttgggaggctgaggcaggagaatctcttgaacccagaaggtggaagttgcagtgagccaaggtcacaccactgcactccagcctggtgacagagcgagattctgtctcaaaaaatatatataaaataaaaaaataaataaaataaaccttcttatgaaacactggcaaaaaaataataagacgttgtttttcaattctcagattggcaaaactccaaaagcacagagcatatagttttcttgtcttttgtttttttaatttttttgtagcgatgcgggggtctcattatattgcccaggttggtctcaaactcctggcctcaagcaatcctcccttcttggactcccaaagtgcttggattacgggtgtcagtcactgcacccagccacgaatataaatttgaatttgtttatatatgcataaataagtggtcttgggaaaaatactgagacatgaaccaggcccatggggtgagggtgggagggagacggtacactggtatctttttttgttttttggggagaatttttttttttctgagagtctcactctgtcacccagacttgagtgcagggatgcaatcacagttcactgccgggctcaagtgatcctcccacctcacccccacaagtagctgggaccacaggcatgcaccaccatacccagctagtttggtaattttttgtagagattgggtctcactatgttgcccaggctggtctcgaactcctggtttcaagcaatccacccacctcagcctcccaaattgctgagattataggcatgagccatcacacccaacctactgggtatcttttaatactttaaaagtattttaaattttttaatactttatacgtttttgaatcctgcaaatgtgttacctattaaaaaaaactctattgaattcctgttttaaattgtaaaagtttctggcgttatatagtagtgatggttgcacaactttatcaagatactaaaagacacttttttttttttttgagatggagtgttgctctttttgcccaggctggagtgcaacggcgcgatctcggctcactacaacctccgcctcccaggttcaagcaattctcctgcctcagcctcccgagtagctgggattacaggcatgtgccaccacacccggctaattttgtatttttagtaggatggggtttcaccatgttggccaggctggtctcgaactcctgacctcaggtgatccacccaccttggcctccccaagtgctgggattataggcgtgagccaccacacccagcaaaaaaaattttatataaaaattaaaaaatagtccttgtcaaagaaacaatgagggctgagttagtcaggaacgaacaggaaggagagtgagggagctctcagggaagcagagagggaaagggggtttgggaggggtttggggtgacagcagggcacactcatggcagaagctgctgtttctccagagtgggggcttgagcccctggctctggcaggtggccccgaaggcttgcagagcctggcagagggcctggtagagacctccgaactcacagagggtgtttgcacagtccaccaggaagggcgtgaggtctatgcgggaggcgcactgggcccacacaggagcccggagcgctgcctcgcacttttcccgcgccctgcggaggtcggccgccctgcagtttccactcgggttctcctgctgttccgctggaatctgctgctcatctaccgggagactctgacaactgggaagggaaaagaatcagcctagggacagccgtccccctactatgacacaaaatttttttttctttagggggagtcttgctctgtcgcccaggctggagtgcaatgcaacagtctcagctcactgcaacctctgccttccctcccatgttcaagcgattctcctgtctcactcagccttccgagttgctgagactacaggcacccaccaccacgcccgaccaattttttttttttttttggagacagagtctcactctgtcacccaggctggagtgcagtagtgcaatcttggctcactgagacctccgcctcccgggttcaagcgattctcctgcctcagcctcccgagtagccgggattacagccacccggcaccatgcctagctaatttttggttttggtttatctggagacaaggtcccactgtatcgcccaggctggagttcagtggtgtgatcttggctcactgcaacctctacgtctcaggttaaagcgattctcctgccttagccttctgagtagctgggattacaggcacccgccaccatgaccggctagtttttgtatttttaatagagacgaggtttcaccatgttggcaaggctggtcttgaactcctggcctcaagtgatccacccgcctcggcctcgcgaagtgctgagatatcaggcctgagccaccacgcctggccctatgacaatgatctggtgctcccaaatgacccagagagacctctcagggattccccaccctcctaacccttctggtgttcacagggaagctggtctgagctctggccaatcttccatcggcctcgtcttctctcagatttccttttttgcttcccaatctgtcgcccagtctggagtacagtggtgtgatcaaggctcactgcaacttcaatctcccaggcccaagggatcgtcccacctcagccttgtgagtagctgggactaaccacacctggttatttttctttcttttctttttttttttttttctgtagagatgaggtcttgctatgttgcccaggctggtctcaaactcctaggctcaagcaatcctcccacattggcctcacgaagtgttgggattagaggcgtgagccactgcacccggctgtttttaaactttttaagacagcatcttgctctgtcatccaggctggagtgcagtgatgcaatcatagctcactgtagccttcaaatctcggactcaaccaatcttcctgctgaagcctcccaaatagctgggactataggcatgtgccaccatggctggctaatttttgtttttaatttttttgtaaagatggggtcttgctatgctgcctaggctggtctcaaactcctggcctcaagtgatcctccagtcttggcctcccaaagtgctggaatcacaggcatgagcctctgctcctgctcctcctccaaggtttctaagcgaggaaaggaagctttcacatttcctcaagtgggttctagcagccttgagatggatcaattacacacatcgccccagaatgcccagaagtcatcgccctcaaatcacacacacaaagcaacattctggcctgtaatcccagcactttggggggccgaggcgggaggatcatttgagcccaggagcttgagaccagcctgggcaaacgtggcaagaccctgtctctacaaaaaatttaaaaattgaagaagaaaaaaggaacattctggtcttcctgccccaggtgtgccctacagtctggctccctagctcatgttgctatgaaaagctggaggggtggccaggcacagtggctcatgcctgtaatcctagcactttgggaggctgagtgggtccgatcactgagggagcaggagttgaggccgtgagttgaggtcaggagttcaatgccaccctgaccaacatgatgaaactccgtctctacctaaaatacacaaattagccagacgtggggcgtggtggtgtgcacctgtaatcccagctactcgggaggttgaggcacgagaattgcttgaaccccggaagcagaggttgcagtgagccaagattgcgccactgcactccagcctgggtgacagagcaagactccatctcaaaaagaaaaagaaaaaaagaaaagctagagggtccaggtgcactcgctcatgattacccagcacttcgggaggccaaggcggccacatctcctgaggtcaggagctcgagaccagcctggccaatatggtgaaaccccgtctctgctaaaaactacaaaaagtagccaggcgtggtggcgggtgcctgtaatcccagctacttgggaggctgaggcaggagtatcacttgagcccgggaggcggaggttgcagtgagccgagatcataccactgcactccagcctgggtgacagagcaagattctgtctcagaaaaaaaagaacaaaagaaaggagaggggccgggcgcagtggctcacacctgtaatcccagcattttgggaggccgaggcgggtgtatcacgaggtcaggagatcgaaaccatcctggctaacaaggtgaaaccccgtttttactaaaaaaaaaaaaaattagccggcggcggtggcgggcgcctgtattcccagctacttgggaggctgaggcaggagaatggggtgaacccgggaagcagagtttgcagtgagccgagattgggccaatgcagtccgcagtccggcctgggcgacagagcgaaactccgtttcaaaaaaaaaaaaaaaaaaaaaaaaaaaaaaagaaaggagaggaagaaaagaaagagaaagagagaaaggaagaaaggaaggaaggggaggggaggggaggggagggaagggaagggaaggcagaaagaaagaaagacaaagaaagaaaaagaaagaaaacctagagggtcttaggggaccactaccttgggtcaatgtccttatctttccaactgttcacaaattcactgtcactatttgctaacttttcatcgctgggcatcattagttcgtcctcttcctcatcattgaagttcccacacatgccgcagacctggcgggggagagtggtttttcggtgctggggaagcacgagaacagtttttctcccttccttccttctttccttccctcacgagagcagttttcctccctccctccctcccttccttcaagtttcactcttgtcacccagcctggagtgcagtggcatgatctcagctcacttcactatccgcctcccaggttcaagcaaccctcctgcctcagcctcccgagcagctgggattacaggtgggcaccaccacccccaactaatttttttttttatttttaatagagacggggtttcaccatgttggccaggctggtctcgacctcctgacctcaggtgacccacctgcctcggcctcccagagtgctgagattacaggcatgagccaccatgcccgggcagaatggtttttcctgttttttcctggaaacactcttgtccaccctacacagaaaggcgcactcctccactgccctgctccatcctgaggagtggcctctttgggcaggcacgatgcgaacactgccccccatccctgccggccaccaatctccctggggctgcctccccagcgagaagagccagatgttttcctcacctttccatagtaggttgtggggatttcaatctctaagagatgattcccgtcaaacttgacttgcaccccgatcttgatgttaacaatggtgtagatgctgctggacttgacactgaccccagggatctgggagatggcggggagggtgacctgtttgctgttgatctaaacaggaggacagtgaaggtgagtaggagcagggacaagagtcccctccccagcactccctcccagccccggtcaccacacccagctcactagcacacggtggcccttctgcagggtgacctgggcatcgtacatgtcaatgtagacctcatgaaggcggaaagcctcagttccaccttcctccttctcatgcttggcactgatcttgaacaagggcaaggccatggcggggtggcacactttcaccaggacaagagtgcaggcgtccgggatagaatggttactaccatcaaagctcacgtagtgggactcccctgggagctgacacactcccacacctgggaggacagagagacagctgggctatgacgctcctctggcaggtacagggtccctgggaaactagtcctgggttctccctgccttccagaaaagagtcaagaccccaggtccggctgtgcgcagtggctcatgcctgtaatcccagcactttgggaggccaacgtgggctggtttgataccagcctgaccaacatggtaaaaacccgtctctactaaaaaaaatacaaaaaaattagggtgtggtgacgtgtgcctgtaatctcagctacttggaaggctgaggcaggagaatcgcttgaaccagggagatggaggttgcagtgagccgagattgcaccactgcactccagcccaggcaacagagacactgcatcaaaaacaaacaaacaaacaaacaaacaaccccagggccagggctaggaggcgtggtgaggtttacgggtggaggaggggcatgattctttggaggaaggatttttttttttttatttgagacatggtctctctctgtcacccaggctggaatgcaatggcatatggtcatagctcactgcagcctcaaactcctgggctcaagtggtcctcctacctcagcctccagagtatctgggactacaggcataaagtaccctattcaactaattaaaaaaaattttttttagagacagggtcttgttctgttacccaggctggcatgcagactctaattcctgggctcaagagatcctcctacctcagcctcccaagtagcagggactacaggtgcaatgtctttaattttactttttaactttttagcttttatttttttgtagagatggggtctcactatgttgcccaggctggtcttgaactactagcctcaagtgattctcccacttcagcttcccaaaccactgggattacaggcatgagccaccatgcctggcctccaggaaaagatttatttatttagagacggagttttgtcgcccaggctggagtgcaatggcacgatctctgctcactgcaacctctgcctcctgggttcaagcaattctcctgcctcagcctctcgagtagctgggattataggctaatttttgtatttttagtagagacggggtttagccatgttggtcaggctggtcttgaacttctggtctcaagtgatccgcccgccttggccttccaaagtgctgagattacaagtgtgagccatggcgtctggccccagggaaggatttataatatcccatctaagttggtggccgctacaggagaaggatgggtgagccccaaggttcccttctcagcagttggaggtcatcttacccaccagaagctcttggttgcagcagagttaccagtcaaaacctgaaacccagtgctacaggcagcagggagtctgttggggagttgggagagtgggcctcagggctgtggagtccccccatcaccgtggtcctcctacctgaggcccgacaatggagcagcccatccagggcccagcatatctggttgggtttgcaggtgctctggaagcaggtgatgttgttgtggacggagcaggtgcagagcctggtgcaggtgttctctgtgtaccagcgctccccgacctgtgggccacagggatcagctgagccaacagaaagttggaattgggagatgggccaacgccccagttgaagctgggtgcagcatctgcccttcctcctcgccccccagccttggccagccctgcccctcccaggttctgagccttcctcctgcctctcctgagcttgccctgaccccaaacatgtgggcctggaaagggcggggcccctcctagctggcctctcaccgggtggtaggagcccgctgggtcagtgcagccacactggccaaggggcacgcaggaggttccactcaagatgtggcctttctgacattcacagctctcagcacagggcagtgctttggggcagtccctcgggttgtttatgctgctgcaggtgtctgggcaggggctgctgcaggggctgtagctgctgccaggtgggcacctcatagctaaagaaaatgagagcattaggaagagtggggtggcatgtccagcccccaaaccttggggcatcaaaagctcctagtagtggccaggagcggtagctcgcacatgtgatcccagcactttgggaggccgaggcaggtggatcacctgaggtcaggagttcgagaacaggctggccaacatggtgaaaaaccgactctactaaaaatacaaaaattagccaggcgtggtggcacacgcctgtagtcccagctacttggggtggcacacgcctgtagtcccagctacttgggtggctgagacacgagaatctcttgaacctgagaggcagaggttgcaatgaggcgaggtcagaccactgcactccagcctgggcgacagcgagactctcaaaagcaaaaaaaaaaaaaaacaaacaaaaaaaaacagacataaaatctacaattttaacaatttaatttttcttggagacagtctcgctctgtcgcccaggctggagtgcagtggcatgatcttgggtcactgcaagctccacctcccagattcacgccattctcctgcttcagcctcccgagtagctgggactacaggcgcccaccaccacgcctggctaattttttgtatttttggtagagacggggtttctccgtgttagccaggatggtctcgatctcctgacctcgtgatccacctgcctcggcctcccaaagtgctgggattacaggcatgagccaccgcgcccggcaacaattttttaaatgtacacttcaacagcactaagtacagtcacattgtcgtgctgccattaccaccatctactgccagaactttttgttttgttttgtttttcactcttgttttttgtttcactcttgttgcccaggctggagtgcagtggtgtgatctcggctcactgcaacctctgcctcccaggttcaagcgattctcccacctcagcctcttgagtagctgattacaggtgcttgccaccacacctggccaagttttgtatttttaatagagacggggtttcgccatgttgaccaggctggtctccaactcctgacctcaggtgattcacccatcttggcttgaacacaggaggtagaggttgcagtgagccgagattgcgccactgcactccagcctgggcaacagagtgagactccgtctcaaaaaaaaaaaaaagaatttagaggaagaaagggagggcagaattctggagggtgcctatgggctgtgggaacaggtggccagtcactcacggcagaaggttctgttccgccaggcaggggcctggccagcctgggcacacagggacgcgtaggcctgcagggagcggcacagggctgtggtgtcgcccttggtcccacactgaccatgcacgcaactggcaaagctggactggggaggcaccacctggtgacattgagagaagggtcctgcaggaagagagaaggcacatgagccaggggaggggccgggaaggaacagggccatgtggcttccctggggctgattcgacatccacttcagtcaaaacctggattttcccgccaggcacagtggctcacacctgtaatcccagcactttgggaggccgaggtgggcagatcacttgaggtcaggagtttgagaccagcctgaccatcatggtgaaacccaatctctactaaaaatacaaaaattagcagggcatagtagagggcacctgtagtccaggcaactcgggaggttggggcaggagaatctcttgaacccaggaggcaaaggtggcagtgagctgagattgtgccattgcactccagccgggcaacagatcaagactccgtctcaaaaaaaaaaaacaaaaaaaaaacttcttggattttccagcctgagcaatacagtgaaactgtgtctgtacaaaaattagccggccatggtggtgcacacctgtagtcccagctactcagcaggctgaggcaggaggatgagctatgattgtgccattgcactccaacctgggtaacagagaatataaacaagacaaacaaacaaaacccagatttgtgtggtggctcccgcctataacctcagcactttaggagggcaaagcaggagaatcacttgagcccaggagttcaagaccagcctgggctgcatagcaagacctcatctccagaaaatatttaaaaattaggccaggcatgatggctcatgcctttaataccagcactttgggaggccaaggcaggtggatcatttgaggtcaggagttcaagatcagcctggccaacatggtgaaatgttgtctttactaaagatacaaaaactagccgggtgtggtggcacaggcctgtaatcccagctacttgggaagctgaggtgggaaaatagcttgcgcctgggaggcagaggttgcagtgagctgagatcacaccattgcactccagcctgggcaacagagtgtgaaaaaaaaaattagttgggcatggtggtgcatgcctgtggtcccagctactctgaaggctgaggcgggaggattacttgagcccaggagttcaagcctgcagtgagctgtgatcgtgccattgcattccagcctgggcaacagagtgagaccttgtctctaaaaaacaagaaaaaagaaaaaacggccaggggtggtggcttatgcctgtcatcccaactacttgggaggccaagggggaggatcccttggggtccatagttcgagaacagcctgggctacatagtgagactcccccatctctattaaacttttttttttttttttttttgagacagagtctcactctgtcgcccaggctggagtgcagtggcgaaatctcggctcactgcaacctctgcctcccaggttaaagcgattcttctgcctcagcctcccaagtagctgggactacaggtgcccgtcaccaggcccagctaattttttgtatttttagtagagacggggtttcaccatgctagccaggctggtctcgaactcctgacctcgggatctgccctcctcggcctcccaaagtactgggattacaggcatgagccactgcgcccagcctattaaaacatttttaataggaaaaaaaaaaagaaatcccggatttatctactgcctgagacacaaatacagacccatcagtcataggtcccaagaaggtgactgctggctggccctgtgttcccatttgccttcctcatgcttttccatctgtttctggtcttgttgtttctccctccctgactagactccctccccagcctcctgtccttcagggaggaaaaagggccagcagggacatgtcttaccctgagggtttattaagatcgcacagttcttgttccaggcgtctgccatgctgttctcctggcagctggagggcttgccacccacaaggaaacagctaaatgagagagaatagaaactgagggctacaggttgggtgcagtggctcatgcctataatcccagcactttgggaagccaaggcaggaggatcgcttgagaccagaagttcaagaccagcctgggcaacatagtgagatcctatctctacacaaaatttttaaaaattagccgggcgtggtggcatgtgcctatagtcccagctactcaggaggctgtggtgggaggatggcttgagcccagcagttggaggcttcagtgagctatgattgcaccactgcactccagcctgggcaacagagcaagaccctgtctcaagaaaagaaaagaaaaaaaggaaaggaaaggaaaggaagaaggaagaaaggaaggaagaaagggaagagaaggaaaggaaaggaaagaaaagaaaagaaaaaaaaagacgagaccagacctgagggcctgaggaaccatctcccaaaccgaagcaaaagtggacagggggctgtgtgcagtggctcacacctgtaatcccagcactttgggaggccaaggcaggcagatcacctgaggtcaggagtttgagactagcctggccaacacggagaagcgctgtctcaaataaaaatacaaaaattagccgggcgtggtggcgagtgcctgtaatcccagctacttgggaggctgaggcaggataagcacttgaacctgggaggcggaagttgcagcgagctgagatcgtgccactgcactccagcctgggtgacagagcgtgactctgtctcaaaaacaacaaaacaaaacaaaacaaaaagtggacagggaaagagagagggatacaggagaagaggacaaaacggtgccctcaagtagcaaggcaaggagatgcagcaggaaggaaaaaggctagacctcagggtgaacttcccaagtgggccctccaaagagatcactaagcatgggagaaatcagcaggcgtgggcgtgggaagtcagaacagcttcttaccaactccaatcttggagagtctaaacaggagagattgccagtttcctgccagttgggaggtacagcacagagggagtggggacacacagaggacacttccaagctgccccccgaggcccttcccaggcccagcccctcctgcctggctcccctgacccccagctcacccaggttcagaggattcaggtaacttccaggcggcccccagctgcatggaatcgcctgcaagctttctgtcggggcgcaggttgtcatccaagctgttgttgttgtagttccctagaggagggagtcattaaaacaggcaagaaggggcccccagcaggccaggcccagggccaccatcctcctggcaccctcacttttcattctacatagcaaggttaacccttttctgtctctttttcttcttttttgagatggagtctgcttcttgaccaccgcgctggccccttctgtgtcttatctcgtcttcctaatctaccttcatgcttaatgtcctcaacgaattagtcagttgacaagtacttagaacacctcacagagatgttggggagctgggaccagtcacacgcgtactcattgtcccagctttcccccgcaggtgcccaggaaactcaccacacagcccacagagctggccgccataggaggaggggactgtcaattccaccaagtggctcccgtcgtagcgaacttggagcccaaagttcgtgtagaggaggacgaggttgctgctgagccttatggtcacccggccttgtgcaagccacacaggtagggccacccgatggccattcagctgcagaggcagggaggacgtagaaaggagagtcaggaaagaactcgggataaaggcaaggacgggggctcatgcctgcaaacccagcactttgggaggccgaggcggaggatcgcttgagcccaggatctcgagatcagcctgggcaacatggagaaagcccgtctctacaaaaagtgaaaaaaaaaattagccgtgcaggtggtgcatgcctatagttgcagctacttaggaggccgaggtgggaggatcacttgagcccagggggtcaaggccacaataagctatgatcgcaccactgcactccagcctgggtgatagagcaagaccctgtctcaaaaaaaaaaaaaaaaaaaaaaaaacggcaaaaaactggagcaggagggctgtgctgtgggtatttcacagagggaggagggagtccagagaagagggtctgggtcagctgcaggtgcttcccaggtgctctaaggagccagagaggtgggcatccgggcaaggaggggcacaggagagaagcaagcaggctgggtgttcagggtccaggaggcaggaggaagacacccaccatgaccttacagcctctgagcagtgagatgctgaggtcaaagactgtcacgtggacggctttgatgtaggagacctccaggatccccccgcggttctcgttggtggcgctcacaacaaaatagctgtcttgggacctggaccagcaaggccgggtcaggacataggtgcaggtgcccatgaagtggtgcaaggcgccatcgaaggtcaggtagtgggggtcacccgaggctgtgcaggtggcggcacctgtggagaagaagatggagttcacagtctcactcctccatgccccggaagctttgactcagagctgccatcctggagagcccacattggcatggtccccacggcccacccacagatgtggtgtttccctaggaagtgtggttggcttggcttggagctgcctaagagaaacactgacgtccccaacctcaccctttgggtccctgaaaatgctgcccctgctgcccctcccaggccctggtggagactcagctgtctggggaagctgctttgggcaggacccatcaccttgcctggtgttgcctgggcagcccccagctcaccttccaccctgatggctcaccttgggcatggcagccatagataccatcctgttggccacagaactcctgggccctacacctccagggctggcagcgaattctgttgttgctttcacagacgcacaactctttgcagcctggcttgtaccaccgctcccctacctggggaagacagcagggaaggaagagaaagtgtttttttttgctttgttttgttttttcccagatctgacaccagagctcaccagagctgttcagatcactggcttaatagtggggagacatcctctcttcctgaagctccgagattcgctgcaaaagcttggcatccattcgttttttcagtcactacatcatttctgggtctgttcatcatttcaaccaaaattgatctatccgaggccaggtgtggcggctcacgcctgtgatcccagcactttgggaggccaaggcgggtggatcacttgaggtcaggagtttgagaccagcctggccaacatggagaaaccccatctgtactaaaaatacaaaaattagcctggcgtggtagtgcacgcctgtaatcccagctacttgggaggcttaggcgggagaatcgcttgaacctgggaggcggaggttgcagtgagctgagaccgtgccactgcactccagcccggacaacagatcgagactctgtctcaaaaaaaaaacaaaaaccaaaaacaacaacaaaaaaccaaaaaacaagggccaggcatggtggctcatgcctgtaatcccagcactttgggaggcccaggtgggcagatcacaaggtcaagagatcaagaccatcctggccaacatggtgaaaccgccccctaccccgtctctactaaaaatacaagaattagctgggcatggtggtgcatgcctgtagtcccagctactcgggaggctgaggcaggagaatcacttgaacccaggaggcggaagttgcagtgagccgagatcgtgccactgcactccagcctggcgacagagcaaaactccgtctcaaaaacaaaacaaaacaagaaacgaaaagaaaagaaagagcttgcagggggtgtgagagcagggagcaggccctttctagctgcagggctgagaggtccacgcagccgctcaccttgaagtagctgcctgcagggtggaggcacccacactgggagcgaggtatgcactcgaggccactgaggacgaagcccggattgcattcacaggcctccacgcaccggtctgagcagaacatgccggagaatcctgaatggcaggtgtcagggcatggcttcgcacacagggagtacttgctgttgggcgggcaggccattgctggtggagggagaagcttgggtgagaaggagacgaacaagccacggggctgggtgggaaacaggaaggacacgttcggaagggccccagctccaggcttctggccaatctcgagaagagagagtgactgtgagaagcttccccaaggagcctggctggctccctggggctgcagggccagcactaaggcgccggccctgagagacttagatagacctatggtgggagcagatggacccaccactggcagcgctgctgtgtagacatgccccaggtgagctgttggcccgcaggggaccggggccacctgtgaggtctgagtcaggggataggcctgccctaaagcagcttccccaaagagctgggccacaccaggagctgggaggcagcctcgttgcctcccctgcctagggcctgtaccgtgtgcctgcgtgtgatgacttgggctgcacagaaacacttttttttttttaaagacagagtttcgctctcactgcccaggctgtagtgcagtggcgcaatctctgcttactgcaacctccacctcccgggttcaagcgattttcctgcctcagcctcccaagtagctgggattacaggcgcccgttgccacacacagctaatttttgtatatttatttatttattatttttattattttttgagatggagtctcattctgtcacccaggctggagtgcagtggtgcaatctcggctcactgcaacctccgcctcccaggttcaagcaattctcctgcctcagcctccaagtagctgggattacaggtacccgttgccacacacagctaatttctgtatttttatttatttatttatttattttattttattttttgagatggagtctcactctgtcgcccaggctggagtgcagtggcgcaatctcggctcactgcaacctctgcctcccgggttcaagcgattctcctgcctcagcctccagtgtagctgggactacaggcatatgccaccatgcctggctaattttggtatgtttagtagagacggggtgttggccaggctggtcccaaactcctgatctcatgatccacctgcctcggactcccaaagtgctgggattataggtgtgagccaccgtgcccggcctctcctctgagtttggcacaactcacggcagaagtggggttccctccagggcttcacagcgtggcctgcgtcctggcaggtggtggtcatggtggacatgtgtgtgcacagcaggtgctgcagcccctggaatccgcacatatcaagcatgcagctgtcgaagaaggaagcggccttcacgtgcagcaggcatgtcctgaggggagtgaccaagtcagggggaatgcagtggaagggggtagagccttggaggagcccaggtgccaagcatcgcccctgtgcgaccctgcctgccctccttcatactcaaatgggccatgagtgtcgaccagccgtccacagaaccctggccccgacatgctgctctgcagagatgaatcacaagacggggaattcaccacctggtacttctgacacctgcaagagacccaccccaaactccctaaagacaaagctcgcttccagctcatccctaacccagcaggcagcaaggctggcaggccgggaccggcaaaccagcctgtcagctgggaaacccctcccagaggatgtttgaccactgagccctggccaggcactgtgggaggccgaggcagggagaattgcttgagcccaggagttccaggccagcctgggtaacacactgagatcccatctctttaaaaataaatatgaaattatttatttcatatttcatatggcgcacgtccatagccccagctactcaggaggctgaggtgagagaatctgttgagcccaggagttggagcctgcagtgagctgtgattgaaccactgcactccagcctgggcgacagagcaaggccctgtctctaaaaacaaacaaacaaacaaacaaaaaagaatattgagcaactgaaagaacaacttgaagtctccagggtagagaggagaaaggggcaatgccagtcattttttaaagggagggcacaggctgggtgtggtggtgatgcctgtaatcccggcattttgcattttgggaggccagggcaggtgaatcacctgaggtcaggagttcgaaaccagcctggccaacatgatgaaaccccgtctctactaaaaatacaaaaatcagacaggtgtggtggcatgtgcctataatctcattgggattgaggcgtgagaatcacttgagcccaggaggcagaggtttcagtgagctgagattgcacaactacactctagcctgggtgacacagcaagactccatctcaaaaaaaaaaaaaaaaaccgttggggagggccagcagcctggtcaaccccccatctggtgagaaccccatgtctaccaaaaaattttgttaaagttagctgggcatggtgtagtccaagctacttgggaggcagagaagggaggattgcttgagctcaggagtttgaggctgcagtaagccacgatcgtgccattgcactccagcttggaagacagagggagatcccatctcaaaaaaaaaaaaagggcgggtggagggctggacgtggtggtgtggtggctcacacctgtaatcccagaactttgagaggccaaggcaggtggatcacttgaggccaggagtttgagaccagcctggccagcatggtgaaaccccatctctacaaaaatactaaaattagctgtgtgtggtggcaggtgcctgtaatcccagctactcgggagactgaggcaggataattgcttgagcctgggaggcggaggttgcagtgagctgagatcgcaccactgcactccagcctaagcgacagaaggagactccatctcaaaaaaaaaaaaaaaaaaaaaaaagagagttccaggaaggggacggaaccttcccagggccccggtgggagggctccttgctcactcctggtcctcgtcctggtccgtctgccagctgttccccagctcctccttgtctcctgctgggctgccgtccaacttcaggtggtcattgtcactgttgccgtcatagttcccacacaaaccacagagtttgccagagtatgtgctaggggaacaggagaggagctggcgttaatggagagaagcagcctcggtcctcgaggggcagtggcagagaaggcaaggagctgggatcctaaaacagagggcgtgaggaggatgaagaggtgcggactggacaagaggaccccatggccctcccccaagcctccttcccctctgttcattgtccagccacagcaaaccccttgctggccctaaaacactcccactttatttatttatttatttatttatttatttatttatttatcctttttttcagatggagtctctctccgtcacctaggctagagggcagtggcgcaacctcggctcactgcaacctccaacctcccgggttctagagattctcctgcctcagccttccgagtagctgggattacaggcacacaccaccacgcccagctaatttttttgtatttttagtagagatggggtttcaccatgttggccaggctggtctcaaactcctaatctgcctgccttggcctcccagagtgctgggattacaggtgtcagccaccgtgcctggccaaattatttatttatttttttatttattttagagatagggtcaccctctgtggctcaggctggagcacagtggtgcaatctcggctcactgcagcctccaactcctgggttcaagcgattctcccacctcagcctcctgagtagctgagactacaggcaagtaccaccacgagaagctaatttttttttaagagacaggatctcactatgttgtccaggctggtctggaactcctggcctcaagtgatcctcttgcttcggcctcccagcatgctgagattataggtgcagccactacgcctggctaatatttaaatttttttgtggagatatggtctcactatgttgcccaggctggtctggaattctggccccaagggattctcccgtctcagcctcccaaagttcagggctacagggcgggaaccctgcacctggcctctataaagtatttttataaaagtctttctttcgccggggcacagtggctcccctgtaattccaagactttgggaggcgaggcaggaggatcgcctgaagtcaggagttcgagacaagcgtgggcaacatgatgaaatcccatctctagtaaaaacaaaaattagctgggcatggtggtgtgcgcctgtaatcccagatacttgggaggctgaggcagaagaattgctgaacctgggaggcagaggttgcagtgagccgagatagcaccactgcactccagcctagggaacagagcgagagatcctgtctcaaaaaaaagaagaagaagaatcttgctttcccttgttttgtccatctggggagccactcttccttcgagaatgggaccaggtgactgcccttcagaaagcctccagaactcactagtgctccttctagcacattcccaaagcatgtacatccatcctgctatctatcacatgccccgaaaccattttctcctgtctcctggtccaaagggatccctgccacttaagcagggtgcttcccatccgtgaatgcataaaggatcaagtagtggtgccagggatggaaggggagtgggcagggtgggcagcaggaagaagaggcagcaggaagaggcagcaggaagaagtggcagctgcctggctgggacactgccttacctggacacagtaacatacagctgctggtcaccatcccatctcacccgcaaaccgaactccgtctgcagctccacaaaccgcccgcttgcacccaggaagacgcctttagagggtatggctgggagagtaacttgctgacccccaacctggaaggcagggcagaggcaagagacagacagagctgggggtcaaggaggaccccagcagactttcatttccatagctgggaggcaggacaccatccacagcggcctaacaatctcatccaccaggagtggactggagcttcctcaccactgttttgtttttgtttttgtttttaggagacagtgtcttactatgttgcctaggctggagtgcaatggtgcaatcacagctcactgcagcctcgacctcccaggctccagcaatcctcccacctcagcctctggagtagaggggacaacaggcaagtgccaccacaccaggctaattttttctattttttaagagacagggtcttgctatcttgcccaggctggcttcaaactcctggcctcaagcaatcctcccactttagcctcccaaggagctgggattgcaggtcactgtcttgttgaaccccatccgtggaaaggttcagggattggaagggttggccaggacacacagtcagaccctgcaaggatggtgggggtggaatggggctcaccagagtgcgtctgcccttaagcagggtgacggtgctctcgggcagggtcacgtagactttgctcaggcaggacacgccttcctgtccctgctcctcattcttggctgtcaccctgaagaatgggtctgggtagggagaggaatgaagagagcccagtggctcatttctgaacatctgccgcgagcagtgccctgagcctggcgccgcagggagagatgagcgccaccgagacaccagccccaaagtccagtaggggaggccggatccacacaggagcagaccacgactgcctcttccagaagagcctgcagccgcagcgtgtctgtctccactcagtggctggaacatcctccagggcgtctgtgctccctaaccactaccactgccttctttgcttttttgtttttaacttcatttatgtgtgtatttatttatttttcgagacaagatctcactttgctacccaggctggagtgcagtggtgtgatcatagctcactgcagcctccaactcttgggctcaagcgatcctcctgcctcatcctcccgactagctgggactataggtgtgtcccaccatacccagctgattttttaatttttttttttttctgagacagagttttgctcttgctgcttaggctagagtgcaggagtgcagtggctcgatcttggctcactgcaacctccgcctcccaggttcaagcaattctcctgcctcagcctcccaagtagctgggattacaggtgcctgccaccaagcctggctaattttttatatttttagtagagacggggtttcaccatgttgaccaggctggtctcaaactcctgacctcaggtgaaccccccacctcggcttcccaaagtgttggggttacaggcgtgagccactgagcccggcctgatttttaattttttttttcatggagatgagagtcctgctgtgttgcctaggctggtctcaatctcctggattcaagtgatcctcctgcctcagcctcccaaagtgctgaggttaccagtgtgagtcactgtgcctggccttcaaccctcaccttacagaagaacttgctcctatcttgcctcttcccccatctgtgccctgccccttcctgccacccaccatgccccatgcctagcagcgctgcccacagaccctccccccaggccgcagtggcatctccagggcctacctgttgagttgccacagggctgggccaagatgtaagtgcacttgcccatgaagccaaagtgcctcccgtcaaaggtgacataatgagggtctccgtagaccaagcaggtggcagtgcctgctgggagggggaaggagaacaggcgaagctgcttctgtggctcctccaggctggaccgcacatgctggcccacccgctgcccggtggcaggcccccaatcctgtgctcaagcgagggattgggatcctggcgtcacgtctactccaactggctggcaggcagggacagcatggggaggggctctcaccgtaggggtggcatccatactggccattcttaagctggcacacggtgtgtgtcccacactgagagatttggcactcgacccgactgccgggccagcagcggcaatgttctgtgcagttgggggtgaaccactttgccccaggctgggagaaagggatgtgaggtcacacagtcatatagctcctagagtacttctccctttgcctttctttttcatttatttatttatttatttatttatttatttatttatttatttgtgatggagtcttgctttgttgcccaagctggagtgcagtggcgcaatcatggctcactgcagccttgaccccctgggctcaaaccatcctcctgcctcaacctcccaagtatttgggactacaggcacatgccaccatgcccgaattttttttttttttttttttaacgttttggagagatggagtcttgctgtgttgcctaggctggtgttgaattcctgagctcaagtgaccctcctgccttggcctcccaaaatgctggtattacaggcgtgagccactgcacccagccttatgtctgtctgtttttttgtttttttttttttttttgagacggagtctcactctgtcacccaggctggagtgaagtggcgtgatcttggctcactgcaacctccgccttcagcgttcaagcgattctcctgcctcagcctccagagtagctgggattacaggcacccgccacgacgcccggctaatttttgtatttttagtagagacttggtttctccatgttggccaggctggtctcgaactcctgacctcaggtgatccgcccgccttggcctcccaaagtgctaggattacaggcatgagccactgcacccagccaatatctgtctttacccaacatcttagccctcccatgagtgctctcattcagtaaatacttgctgaatgaaggagtaaaccaagaccccatgtgtctctctgaatctgagggcattatgagggcaaggaccacagcctattcgtggcgaccccagtgccagcagagtagaaagtactaagtaggctgggtgtggtggttcaccactgtaatcccagcactttgggaggctgaggtgggaggatgggttgagcccaggagttcatagaccagcctgggcaacagagccagaccccatctctaccaaaaaaaaaaccccaaaaaacaaaccaaaaaaacacacctttgaagaaagtactaaataaacatttgttgaatgcataaatgaatctattagaagtgaatacagccaggcgcggtggctcacgcctgtaatcccaacactttggaaggctgaggcgggcggatcgcctgaggtcgggagttcaagaccagccttactaacatgaagaaaccccatctctaccaaaaatacaaaattagctgggcgtggtggcgcatgcccgtaatcccaggtactccggagtctgaggcaggagaatcgcttgaacctgggaagcggaggttgcagtgagcggagatggcaccattgcactccagcgtgggcaacaagagcgaaactctgtctcaaaaacaaacagacaaacaaacacggctagaatggtttttgcatcaatagagaactgtgagtgaatagtttgtcaaaaaaaaaaaaacaaaagtgaatacatgcctcctagggcagagggaagagcttcttggtgccaatggttgtgacagatctttctgcccaggctgtggctgaagctaatctcagcagcaactcagagagacccaggagactggttaaaggaggcaggggaaagaaataatagtcccaaaagggacaagcagaagctctgatgtcaatgggaagaacacctgcagctgggaagaggctctgcacattaatgaatagcttaatgcacttttctttttttttttttgagacagggtgtcactctgtcgcccaggctggagtgcagtggcacaatcatagctcactgcagcgtcagactcctgggctcaaccaatccctccacttcggcctgctaaagtgttgggattacagctgtgagtcaccacgctgggccctttaatgcacttttaattaataggttgcatatatttatcataaattgctaatgataataattaacacttattaagtaattgtatgtgttaggacttaatttcatctttacaataatcttatatgaggtagaaaatcttactgtgtacactttataaatatggataaaagatttaaagacgtaaagaatatatggtgaaaccctatctctactaaaaatacaaaaattagccagggtggtggcgtgagcctgttatcccagctacttgcggggctgaggcagagaattgcttgaacccgggaggtggaggttgtagtgagctaagatcgtgccactgcactccagcctgggtgacagagctagactctgcctcaaaaaaaataaaataaaataaaaaaagaaatgtgcccagccagacacggtgacttatgcctataatcccagcactttgggaggctgaggcaggaggattgcttgaactcaggatttcaagaccagcctgggcaacgtggtgaaaccctgtctctaccaaaaatacaaaaattagctgggcatggtggcatgtgcctgcagtcccagctacttgggaggctgaggtgggaggatcactggagcccgggaagtggaggctgcagtgagccactatgatgccactactctccagcctgagcgacaaagcgagaccctgtctcaaaaaaaaagaaaagattgaatgaataacttcgccatcctgtgaccattgcttctgagctgaccccttgggactatccggtgatccctgttgccttcacatggggagcagatggagctggaacccaggtgttctgccatcaatctccctcatgggaccccagcatcccggggggcttacctcatagtagtcgttgttgtagcagcaattgcaggaagaggcctggatgcagtggttgtcactaaacaaaaagccagggttgcagacacagccctcccgacagaggggcccacagctaggcctggggctcttgcacgaagcaggacaagcacaggattcgtagcgggcatttggagggcagcgctctaaggggaaaacagcctctgtcatgctttcattccatggctttctcagggagtctccctgtctctcctctacccccaaactcaagttcttctctaggaaacaggaccatattatttagccataaaaaggcctgaaggctgggtgcggtggctcacacctataatcccagcactttgggaggctgaggcaggaggactgtttgaggccaagagtttgagaccaggctgtgcaacgtagtgagaccccatccctacaaaacaaatttaaaaataaaacaattttaggctaggcacggtggctcacgcctgtaatcccagcactttggtaaaccgaggcggacagatcacttgaggccaggagttcaagaacagcctggctaacagggcgaaaccctagagccgggcacagtggctcacccctgtaatcccaagactttgggaggccgaggctgaggcgtaattacaggattacacccctgtaatcccaagactttgggaggtcaagaccatcctggccaacatggtgaaaccccgtttctactaaaaatacaaaaattagccagtcgtggtggtgcaggcctgtggccccagctactcaggaggctgaggcaggatagttgcttgagccccagaggcagaggttgcagtgagccgagatcacacctctgcactccagcctgggtgacagagcgagaccctgtctcaaaaatataaaaaataagaaatactccatttatttatttatttatttttatttttaattttttgagacggagtctcactttatcacccaggctggagtgcggtggcatgatctcggctcactgcaagctctgcctcccgggttcacgccattctcctgcctcagcctccggagtagctgggactacaggcacccaccaccacgctcagctaatttttttgtattttcagtagagacggggtttcactgtgttagccaggatggtctcgatctcctgaccttgtgatctgcccgcctcagcctcccaaagtgttgggattacaggcgtgagccaccgtgcctggccagaaatactttttttaaaggaatgaagtcctgatgcatgctacagtatggatggcccggaaaacattacactcagtgaaagaagccaaacacaaaggctcacatgttgcatgattccatttgtatgaactgtccagaactggcaaatccatggatataggaaagaaatgtgtggttgccaggggctgggggaaggcggagtggggagtggctgctaataggtataggatttctttttggagtgatgaaagtgtttggattagaaagtgatgatggttgcacaaccttaggaatatactaaaacccacagaattgcttttgctttttttttttttttttttttttaggacgatgtcttgctctgttgcccaagctgaagtgcagtgacacaatcatggctcactacagcctcagcctcctaggctcaagtgatcctcccacctcagcctcccgagtagctgggactacaggcgtgcgccaccacacccagctaatttttttttttttttaattttaaagtggagacagggtctcactatgttgcctaggctggtctcaaactcctgagctcaagcaaccctctcgccttggccccccaaagtgctgggattacaggtttgagctaccgtgcccggcctagaattgtacactttaaaagggtgaattttatgaaatatggattatatctcaataacaaacaacgagaaggaagcctcgtggttcagtcctgacacccccacccactccagccctgccatccctctcgctctgggcagtcctccccatttcctctgaagtcgccatggactacttcagctctcctctgagagtactagaagcatctagaagcaactagaaggcttctaccagaagcatccctttccctgactgtctcctagtcattgtctctgactttcagccttggcccacgctccatccacctcatacctgtactggatctggaggttgtggtagtgcccagaatcacactggtcataggggtacttggagcatgtggagacatcaccaaggctgccagcccagtggctgtggggctgggatggggtggcctcagggctgtgagcttctctgtgggaatggtgggtttttctgtggggatggtgggtttttccgtggggatggtaagtttttccgtggggatggtgggtttttccgtggagatggtgggtttttctgtggggatggtgagtttttctggggagatggtgggtttttctgtggggatggtgagtttttctgtggagatggtagtctcttcagtggggatggtgggtttttccgtggggatggtgggtttttccgtggagatggtgggtttttctggggagatggtgggtttttctgtggggatggtgagtttttctgtggagatggtagtctcttcaatggggatggtgggtttttccgtggggatggtgagtttttccgtggggatggtgagtttttctggggagatggtgggtttttctgtggggatggtgggtttttctgtggagatggtgggtttttccatggggatggtgagtttttctgtagagatggtagtctcttcaacagaggtggtggtttcttcagtggggagagtgggtttttccatggggatgctgggtttttctgtggagatggtggtctcctcagtgggggtggtgggctcttctgtggagatggtgggtttttctgtggggatggtgggtttttccgtggggatggtgagtttttccgtggggatggtgagtttttctggggagatggtgggtttttctgtggggatggtgggtttttctgtggagatggtgggtttttctgtggggatggtgggtttttctgtgggggtggtgggtttttctggggagatggtggatttttctgtggggatggtgggtttttctgtggggatggtgggtttttctgggcagatggtgggtttttctgtggagatgatagtctcttccatggagatggtgggtttttccgtggggatgctgggtttttctgtagggatgctgggtttttctgtagggatgacaggctcttccatgtaggtggtggtctcctcagtgggggtggtgggctcttctgtggggacggtgggtttttctgtggaaatggtgggtttttctgagggaatggtgggtttttctgagggaatggtgggtttttctgtgaggatggtgggtttttctgagggaatggtgggtttttctgagggcatgttgggtttttctgaaggaatggtgggtttttctgtggagatggtgggtttttctgtgggaatggtgggcttttctttggggactgtgggcttttctgtggtgacactgggtttttctatggaaactgtaggtttcttggtggagattgtagggttttctgtgaggccagtggtttcagaagggccagtggaagaaactggagatacgggaggaagctctggtagcacttttactgcaaagaaaaataagaatccctggagtttagtcaaaaccataccaccaccctctttactgccatctaactggagtgggctcccatgggtggcttattcacacctctctttctactcccaaaccccaaccttcatccactcaacgaacactaatatatgtcagatattatgccagaaatgaataggatatgggtccagccttcaagactgcagaggaaggagttctggatccagcccccaaaatccatggtatcgaagccacattcacccaggcaaacatcttgaagtgcaggggaaggagaggtgtgttgaagatggaaaaccaagccagctgggtgagaattcgggctccagggaggactcacattttaagcagttcatagagagaactccagggaactcagggcaccgcccccttcctggagcctgggctttggtcttacctggacaagtcccaggattgatcaagatgaaacccatagcaaccacagaggccgtgttgcttccctggatgcccttgaaaataagctaaaggcgacaagggagagagacggagagagaaacaaaaatgaatctccagcaactctgtgattccactgggcatagaatctgttctctgccaaaatgtcgccttgttccagcctcaacagtccagccccatcccggcccctttctcactttctgtaacacgaagttccccttttctcggctctctttccagctttccacctcttcagcactggtggcgcccccagatcccaggcattggccctctcacctcacacagacaggacccccgcctccgtctctcacctgcatgggctgttggtgtcctgaggggacggtgacggaggtgttctgccagtaagggcgctgagaccccacgcgtttccagagaggaatcgggggactccccgcaggacttcccaggaggagttcgagcatagtaccctccccaaggccatacatgtggtatgcgaactccacgcagatgtcacctggggcgcagaagggccggctcaccagtctgactgactggcctgcgtgggagaactcgtcagcctcaaggtagatatagtgaccccctaggcaaaggaagggaacaggcaaggtaagaagcctgcacaggacatgccaactgctgctttagcaaagctttgctttctgaacgggaatctgagcaaacactcaaatttcccaggtcgtagcattattttttctgctcattttagacatctaactaaagaaggtgggatcacaaagaaagggaaaagcggccaggcacggtggctcatgcctgtaatcccagcactttgggaggccgaggctggcggatcacgaggtcaagagatcaaggccatcctggccaacatggtgaaaccccgtctccactaaaaatacaaaaattagctgggcgtggtggcccgtgcctggagtcccagctactcgggagtctgaggcaggagaattgcttgaactccggaggtggaggttgcagtgagccaagatcacgtcactgcactccagcctggcaacagagcaagactccatctcaaaaaagaaaaaaagggaataacaaaccagcaacctagattacattcattaatgtcgtgtgtgtgtgtgtgtgtgtgtgtgtgtgtgtgtgtgtgtgttgtttttttgatcggctcactgcaacctccctgcctgattctcctgcctcagcctgccgagtgcctgcgattgcaggcacgcgccgccacgcctgactggttttggtggagacggggtttcgctgtgttggccgggcgggtctccagcccctaaccgcgagtgatccgccaacctcggcctcccgaggtgccgggattgcagacggagtctcgttcactcagtgctcaatggtgcccaggctggagtgcagtggcgtgatctcggctcactacaacctccacctcccagccgcctgccttggcctcccaaagtgccgagattgcagcctctgcccggccgccaccccgtctgggaagtgaggagtgtctctgcctggccgcccatcgtctgggatgtgaggagcccctctgcccggccgcccagtctgggaagtgaggagcgtctccgcccggccgccatcccatctaggaagtgaggagcgcctcttcccagccgccatcacatctaggaagtgaggagcgtctctgcccggccgcccatcgtctgagatgtggggagcacctctgccccaccgccccatctgggatgtgaggagcgcttctgcccggccgagaccccgtctgggaggtgaggagcgtctctgcccggccgccccgtctgagaagtgaggagaccctctgcctggcaaccaccccgtctgagaagtgaggagcccctccgcccggcagctgccccgtctgagaagtgaggagcctctccgcccagcagccaccccatctgggaagtgaggagcatctccgcccggcagccaccccgtccgggagggaggtgagggggggtcagccccccgcccggccagccgcccggtccgggaggtgaggggcgctctgcccggccgcccctactgggaagtgaggagcccttctgcccggccaccaccccgtctgggaggtgtgcccaacagctcattgagaacgggccaggatgacaatggcggctttgtggaatagaaaggcgggaaaggtggggaaaagattgagaaatcggatggttgccgtgtctgtgtagaaagaagtagacatgggagacttttcattttgttctgcactaagaaaaattcctctgccttgggatcctgttgatctgtgaccttacccccaaccctgtgctctctgaaacatgtgctgtgtccactcagggttaaatggattaagggcggtgcaagatgtgctttgttaaacagatgcttgaaggcagcatgctcgttaagagtcatcaccaatccctaatctcaagtaatcagggacacaaacactgcggaaggccgcagggtcctctgcctaggaaaaccagagacctttgttcacttgtttatctgctgaccttccctccactattgtcccatgaccctgccaaatccccctctgtgagaaacacccaagaattatcaataaaaaaataaattaaaaaaaaaaaaataaataagtcagatcaagtcactgctcaaaatcctgcaaaggctccccattcacacagaataggaaagccacagtcctgacaatggccttcaaggctctatgtgatctgccgctcctgtggatctcaggtcaccctcttcatgctggccacatggctctttgctgtgccttgatcccctccttccccgacagccccactgctacctcaggacctttgcacagctggcccctcagcctggaatgtcctctgctactacctcacctttttcaagttcgtgctcaaatgtgtcctgaatgtgacctactctgaccagcctatttaaaatcggtaactcgcccaggcacagtggctcaacgcctataatcccagcactttgggaggccgaggtggccggatcacctgaggtcagcagttcaagaccagcctggccaacgtggtgaaaccccgtctctactaaaaacacaaaaattagctgggcgtggtggtgtacacctgtagtcccagttacttaggaggctgaggtaggagaatcaattgaacctgggcagcggagcttgcagtgagccgagatagagccactgcactccagcctgggagacagggcgagactctgtctccaaaataaataaataaataaataaataaattcttttgtagagatgggggtctccttatgttgcccaggctgatctcaaactcctggcctcacaccatcctcccaccttggcctcccaaggtgctgggattacaggcctgagccactgtgctgggccgagacctctctttaggcacggctgcttccagagtcaaagccctaatagctctacctggcagacccaatacagccagctcctcatctcctttctcattcttctttttttttttttgagacggagtctcactccatcgccaaggctggagtgcagtggcacgatctcggctcactgcaagctccacctcccaggttcatgccattctcctgcctcagcctcccaagtagctgggactacaggcgcccgccaccgcgcccggctaattttttgtatttttagtagagacggggcttcaccgtgttaaccagaaaggtctctatctcttgacctcgtgatccgcccgcctcggcctcccaaagtgctgggattacaggcatgagccaccgcgcccgccctggatcctcttcttgttgtgcaaggacggagagaaaagggtccgagggcaggcgggaggagggacagggactcaccgcgattacaggagccccggcggatagagagggcatccagggcgatgtccaggtaggcagtgctaccccgtgttccctcaaacatcagctgcaagaggataaggggaccccaaccccatgagcccctcagccaggcctcctggctcctagttttcttcctgaattcagatggcttggcccccacaatccctttttgccacacccccaccctcaggctctccaacacccagactcccccccgaggtcccacaatttgtccccggccttacccgggtgggcagggtgaaccctgcgggcacagtgacggtggtgagcatccaggagggtctctgggtgttccagtgtttccagagcacatcggggcggcggccctcttcacccgagagcagcagcagcctgagctgggcgccccaagacagcccgaacatgtggtgggcaaagtgcacacagagggggccttgctcccataggtcggggctgagcaggcgggccactcccccacggtggaagctgttcgattccatatgcagatagctgccctctgggggaggcagagcccaagacactgaggcccagccacctctgagggctgcccccacccatccccttctcagagcccaggcatccaggtctggctgcctcccttctctctccatctagccactcccgcctcccagccacctccctgctcatggtcccctggaaaccatagcccctcacctccgttagggtaccccccgggggccccggtggagccggtgggagagggcccactggctcgaacccagtcttcatcgtctgcggacacttgggaccagtcacagaggggtttggcgtcatcctcaaaatcacactgggtgaggacatctaggaagaatgggtcacagtgaggtttcagagagggcaggggcagggcccagagccacacagggagagggaagtagcaagattgctacacttagagaaagctgccatgaaatcagccgggtgtggtggcgcacacctgtagtcccagctactggggaggctgaggcaagagaatcgcttgaacccaggaggcggactttgcagtgagccaagatcgcgccactgcactccagcctgagggacagagggagactccgtctcaaagaaaagaaaaagaaagctgttgcaaagccttggggtccagagcagaaattgctcgtctgttttttgtggagatggagtcttactatgttgcccaggctgctctcaaactcctggcctcaagccatcctcccaccttggcctccctaagtgttgggatgacaggtgtgagccacagcacccggcccagagcagagatttgaaagagagaatcttttaggagaaattcggggctgggagagtggacagaatgacaaggtccggggtcatgaactgaggttggagggctggacttggcctggcaggacacattttgtagtcctggctgatgcccggaggggactggaggtggctgctcctgctaggaactcaggaactggcattctggtggcagaatgtgggttcggaggagggaggagaaatcttagcactcctggtttccaactcacagttgtccctagagctgcgaacaaccagcttctggtccggaggcttctctttccttgggggtcgtttgaagaaagcaaaaatgcaactcgtgtcattatcaagaattataagattcagtgactgtgagctttctgagtggtcacgtaaggatgatcagtgtttatgcagtgaatgtgtctgacttgactttttttctttttttcttttctttttttttttttccggcacccaggctagagtgcagtgatacaatcacagctcactgcagcctcaaacctctgggctccagcaatcctcccacctcaacctccccagtagctgggactacaggagcatgccaccacgcccagctaatttatttttattttttatagagatggggtctttctatgttgcacaggctggtcatgacctcctggccttatgcaatcctcccactttggcctcccaaagtgctgggattaccggtgggagccactgtgctcagccctctgttttttgttgttgttgaagttctacttgttcaaattctcccaaacacactgcaggacaccaagacatccatcatttctttttttttttcttttgagatggagttttgctcttgttgcccaggctggagtgcaatggtgcaatttccgctcactgcagtctccgcctcccgggttcaagtgactctcctgcctcagcctcccaagtagctgggattacaggcatgcaccaccatgcctggctaattttatatttttagtagagacagggtttcaccatgttggtcaggctggtctcaacacctgacctcaggtgatccgcccgcctcggcctcccaaagtgctgggattacaggggtgagccgccgcgcttggcctgtcatccgtcatttctttgctgcctcgtacttaagtctctctcatcagctgggtccaccctgggtcttgtccgtttcctgagggcctgacccctcaatccttctctcctaggcttagatctgtcttccagctctgcacctcctccgtcccttctcacattgtagccctgtcccgctcccagaacccgccccttaattcctgttcagcagtcaaggtcaacccatttccatcccaccgggtttcccccttcctctcaaggtctttttttttgtttttttttttttgagacggagtctcgctctgtcatccaggctggagtgcaatggcatgatctcagctcactgcaaactccgcctcccaggttcaagcgattctcctgcctcagcctcctgggtagctgggactacaggtgcacaccaccacgcctggctaattttttgtatttttagtagagacgaggtttcaccatgttggccaggatggtctcgatctcctgacctcgtgatctgcccacctcagcctcccaaagtgctgggattacaggcgtgagccaccgtgcctggcctctctccagatcttttgtagttagcctgctcgccccctccagctctgtccttccatattccttacagccaccctcagctgaccctggtttatcattaccccctgggcccagcttacctgaaaagggcagcccccaccagaagcagcagagtccagactggaggaaccatgaggaccctaagtggttgctcccaggggagaggggaagggcacagttgggagcctggactccttttattcccccctggcctccttagcttggcatccttccaaggatgccatgaagaatgaacagagaaacacagaaaagctctgggaaattaaaattatgagagttgaaagttaccatccagtagaagcatcgtagattgaaatcgagggaaataaactagagagaagagaaaaaaaaagagaaagaaacaaaaaggaaacaggtttggaggatcaatccaggaagtctaacctcaaacgaaaggagttcaaaaagagagaacaaaggaaaagaaattattattttaaaaagaaaaacgcacaagaaaatatccagaactgaaatatacaagtctctagattaaaaaggtgtccagggtgatgaaagcatagagacccatggaagcactggacttcagactatcaggggtgaagagaagatctgaaacactttcagatagaaaataacaagtcatataccaaggatcagaaatcaacatggcatccagcttttcaatagcaaccatggagtctaagagccagtggaacattgtctgcagaattccaacagaaaaccatttcaaacctaaaattctataactggcaacagtggcaactggagagttaggtgaaggaaggactgcaaacggctggacgtggtggctcacacctgtaatcccagcatttgggaagccaaggcgggtggatcacttgaggtcaggagttcaagactagcctaactaacatggtgaaactccatctctactaaatacgccacttcacttaagggttgtgcaggcgagtctcatacttgcgtcctcaagtgatccacccgtctcagcctcccaaagcatttttttttacaggtgtgagccactgcaccccaccctcattattgtctttttaaaaaattatttctttatatatatatatgtgtgtgtgtgtatatatatatgtgtgtatatatatgtgtgtgtgtgtatatatatatatatatatatttttttttttttttttgagacggagtctcactctgtcacccaggctggagtacaatggcgtgatctcggctcactgcaagctctgcctcccgggctcacgccattctcctgcctcagcctcccgagtagctgggactacaggcgcccaccaccatgcctggctaattttttgtgtttttagtagggacggggtttcaccgtgttagccaggatggtctcgatctcctgaccttgtgatccgccctccttggcctcccaaagtgctgggattacaggtgtgagccactgcgcccagcctctttttatatatttttaagacagaatcttactctgttgccccggatggagtgcagtggtgcgatctcagctcactgcagtctccacctcctggggtcaggcagttctcctgcctcagcctcctgagtagctgggactacaggtgcacgccaccactcccggctaatttttacattttttttagtggagtcagggtttcactatgttgcccagctggtctcgaactcctgacctcaagtgatccacctgcctcggcctcccaaagtgctggaattaaaggcgtgagccaccatgcctggcctatttttttatttttaatttttagagacaaggtcttgctctgttgcccaggctggagtgcactggttcaatcatagctcactgcagccttgacttctgagctgaagcgatcctcccacatcagcctcgcaagtaggtgggaccacaagcacacaccaccacatctagctaattaaaaaaaaatttttttttctagagatggggttctcactatgttgcccaggctgagctcagactcctgggctcaagcaatcttcccgtctcggcctctcaaagtgctggaattgcaggcatgagccactcataaacgtctagactgaaaatgaggtggtgggttttgaagctttgggctccatgaagtgagatgcctgggttttctcaggatttcagtgaccccccagccctgagaatctttaagttactctgctatctccacaattccagtaccatggaaaacttccgaaaaaaacacctgtggactgatcttcccactgcctgaaacaacgtctcccatcagtcacagcagccagcctgctacctgggagcagactgagtgatttcttggcgtgagcgctcctcaatctcctcacctgcattagggaaacctcccgcagggcccatgccatggacgggtccatttttatgtccgagggcccagtgtccaccatccccggaagtctggacccagtcacagaagggatgggcgttgtcttcaaagtcacactgaggaaaaccctctgggggatcaaaataggatatttgagcaagttgagtgacgctctccagccctcccccagcccaccccggattctgagagatccgggcctctcagggcctgctctcacccccacaaggagcaatgctggttgcatcaactgccacagctggctctggggtctttccaaaaacgcctaccacggcaaactggagagaaagggagatggagcaggagtgagcacacagcccacacccccaagcccctgatctaactcgactccattccaggacccagaatccctactccctgtgcccagaccctcaattcagttctttctttctttttttttttttttcagagtcttgctctattgcccaggctggagtacagtggtgtgatcatagctcactgcagccttgacctccagggctcaagtgatcctcccacctcaggctccctagtagctgggactacaggcacacatcactgtgcccgcctaatttttgtatttttttgtagagatggggtctttctatgttgcccaggctggtcttgaactcctgtcctgaagcgatcctccctcctcagcctcccaaagtattgggaatacaggcatgagccacagcaccaggcccctcaatttatttcaacattgggtgtgcctaccatgtgcaaggacctgaccccttgcttctctgtacctgtatccgtcccacggctgtgtaattgacagaaacagcctgccagttgggcccaggttgtcctgagaagagagtgtgtttccggatactccctgcagtgaaaggaattggaaggagaagtgagcttaaggggactgggaaacgactttgaactatacctaggaggatgaggagcagagggcatagctggggacgattaccaccaaatgaaagcacaatcttcttttttattttatttattcattatttttttttgagatggagtattgctctgttgcccaggctggagtgcagtggcactatcttggctcactgcaacttctgtctcccaggttcaagcgattctcctgcctcagcctcttgagtagctgagattacaggcgtgtgccaccacacctggctaatttttgtatttttagtagagacaaggtttctctatgttggccaggctggtctcgaactcctgacctcaggtgatccaccagcctcaccctcccaacgtgctaggattacaagcataagccactgtgccaggccagcacaactttcttttttatttgagagggagtcttgctctgtcaccaggccggagtgcagtggcgcgatctcggctcactgcaacctccgcctcccgggttcaagcgattctcctgcctcagcctcccgtgtagctgggactacaggcagctaatttttgtatttttagtatggacggggtttcaccatgttagccaggatggtctcgatctcctgacctcgtgatccgcctgcctcggcctcccaaagtgccctcccagccatgatttccacttcatggaatagtctcgcacatattccagacctccctagaccctgagggatgccccatgtttccccatcaagccaaccctgggagatgcgcccagatcagtgtaaatcccattaattctccgctctaacccaagactgaagcataaatgtggagggctgcaccaggagactggccccggaggatgtagtggaaggaaaagctcagacagccagaggacaggctcacggggctcaggaggacagctttctgcccaggtcttgcattcttggggtccaggagcatgtagcagccacctgtgaagcaaaaggccagggaactggggtggatggaattgagggaagatggcagcagagatagggccctgaggaggctgtggacttgtctctggggatccccaacagcagcctagaatcaggcagcactgaggtggtcctatcccaactgactgaggtcttcaacttttcctagaaatgcttgggctgggtaaggacccggcgctgccatgggaagcggcggacaccttctccaaagcagcaactagaactttgacctttgggtgctaactctttgttgttgttgttttgtttttgtttttgagacagtctcactctgtcgcccagtctggagtgcagtggcgcaatcatggctctcatggttcactgcagactcaacctccccgggctcaggtgatcctcccgcctcagcctccttaagtagctgggactacaggtgtgcgccaccacgccctgctaatttttgcatttttttttgaaaagatagggtttcaccacattgcccaggctggtcttgaactcctaggttcaaatgatccacgcaccttggcttcccaaagtgctgggattacagacatgagccatcacatctggcctgggtgctaactcttaaggtccactagagtcatagcctgttccttttcttttttcctttttcttttttgagacaaggtatggttctgttgcccaggctaaagtgcagtggcacaggtctcaaactcctaggctcaagcaatccttttgccacagcctcctgagtagctgggactccaggtgcggacctggagtccgcccagctaatttttttttttttaagagatgggcggtctcacgatgttgcccaggctggtcttgaactcctggcctcaagcaatcctcccgccttggcctcccaaagtgctgggattacaggcttgagccactacacccgattgcctcttccttttctttacccgctggacataacctattcacgcaaactggccagagatacagcggctctgacacagaggagcaagaggcaaaccccctctcacccaacaccacctcggcccccagctcagacagccaatcagcgtggacctcgctaggtgacgcaactggtagcgaaaaagaaaatgtaagcggctgccactcgtggggagcgcgctcgcgtgcgtgctcacgcccgagtccaagggagtcttgcctggcgcgcgctcactcctgcggaaggtgggatcctgagcggcggcgaagaggctggaatggcgggaatgggcgggaggaaggagaagaaaggaaacaaccgggaaggaagagggaagggaaaggaaaggaagtgggaaaatgatgaaagagaaatcaaggacacgggctggcgcggtggctcacgcctgtactcccagcactttgggagaccgaggcgggcggatcacctgaggtcaggggttctagaccagcttggccaacatggcgaaatcccgtctctactaaaagtacaaaaattagccgggcgtggtggcgggcatctgtaatcccagctactcgggaggctgaggcaggagaatagcttaaacccgggaggcggaggttgcagtgagctgagatcgcgtcaccgcactccagcctgggcgacagagcgagactgtctcaaaaaacaaacaaacaacaacaacaaaaaaaaaaccaaggagacctatgagaaacagaagaggagaaatgggagaaaaagaagtgaaaggtgaagaaaataaagacacagaatctgggcctcacattagtcttctaaatcactgggggcttcacttcccggctcttggcattgcacagattagactcagtcccataccaaaatgcacgtctgaattaatctgcgtcaaggccaggtgcagaggctcatgcatgtaatcccagcattttgggagactgatgagtggatcacctgagatcaggagttcgagaccagggtgccaaacatggagaaaccccatctctaccaaaaaacaaaacaaaaacaaacaaacaaaaaaacacaaacacacacacacaaactagccgggtgtggtggcatgtgcctgtaatcccagctactcgggaggctgaggcacaagaattgcttgaacccaggaggtggaggttgcagtgagctgagattgtgccactgccctccagcctgggtgacacaacaagaccctgtctcaaaaaataaataaataaaataaaatgaattaatgtgtgcctttttttgcccccaggaggctgcccactggccactgggctatgagtgtcatttcatgtctcctagcacttagtgcaaaggcttggttcacagtagccattctataaacttggaataaatgttttaaatgtttctaacgtacttgcctctcacatccatcccaggagtggtcagacagttcaggtttgataactactctttttgcgggggaggggatgggatctggttttgtcacccaggctagaatgcagtgatgtgatcacagctcactgcagcatctacctcccaggcttgagtgattctcccacctctgcctcctgagtagctggcactacagctgcatgccaccacatccagctaatgtttaaatttttttgtagagatgggggtctcactatgttgcccagggtggtctcaaactcctgagctcaagggatcctcccacctcagcctcccaaagtgctgggattacaggcgtgagccacaacatctggttgaaaattactatttttttattatattttagaaactgaaagcagtgagaagtctgaagacagttgtggaataagatcagtgaccctgaatcctgcagacggagaggagggaggcaaaagcgggttgctcattgatgagatgtttgagccttagactacaaatcaggctaagaggtggacagcctttgggattaggagtcctaaatcctgtgctcaggttctagctcagtctcttattagccagattccttcggcttaagaacaagcctcttagctccgatgtcagcagcctaagagggagatttctcctttactgactcacagcattcctggtgcaagaatcaaatgccatctgtggaaaccaccaatataaatgtgtattgaaatgtaccaaggctacagccagcctgattgctcacgcctgtaaacccaacactttgggagccgaggtgggcggatcctctgagctcaggagtttgagaccagcctggtcgacctggtgaaactccatctctactaaaaatacaaaaaattagccaggtgtgttagcaggcgtctgtagtcccagctactcgggaggctgaggcaggagaatcgcttgaacccgggaggcggaggttgcagtgagccgagatcgcgccactgcactccagcctgagtgacagagtgagactccattgaaaaaaaagaaaagaaaagaaaagaaaagaaatgtacaaggtcagagccctaaggatctatcgcttgtaggtttctctagcagttcctagtaagacctgaagagggcactgtagcccacgagccggttagaacagagggaaaattctcttgggtcctcccctttggcgactcctcgcatcccagctccacacctaccgccccgctccctacacacctgtcaagtaccctccaacctccaaaaccttcccgtaatttttcctgctgcggattgcaaaacattctctcccgtttgcatatgtgcaggggaacacaggctgaattctctacagttgatgatacaagcagaaagaccggccctcacatatgggataacaaccaggatcggggtcccatacagttgtttttgtttgtttgtttttgttttgtttttgagacagagtttcgctcttgtcgcccaggctggagtccagtggcacgacctcggctcactgcaacctccgcctcccaggttcagtgattctcctgcctcagcctccagaatagctgggattacaggagcccaccaccacacccggctaattttttgtatttttagtagacatggggtttcaccacgttggccaggctggtctcaaacacctgacctcagatgatccacccacctcagcctcccaaagtgctgggattacaggcatgagccaccgtgcctggcctcccatacagttttatgacagcttttgctgtctgcacaggtccctcctcagtggtcctttcccgctgaagcattatttttgagaaggaatctgaagttgtggtcagagtaaaggggaaaatgagaagtagaaatcaagagtggaagtagagttcatttgttccatgtcccccaccccaggggagtaaaggagcaggtagggattaggtagaaggaataaaccaggcgcaatggctcacacctataatcccagcactttgggaggctaaggagggaggatcacttgaacccagagtttgagaccagcctgggcaacatagcaagaccccatctctaaaaaaaataagataaaaataatttaaaaattagcagggcatggcgatgcatgcctttagtcacatctactcatgaggctgggactagaggattgcttgagcccaggagtttgaggctgcagtgacccatgattgcaccactgcactccagcctgggcaacagagcaagacactgtcactaaaaacaaacaaacaaacaaaatcacaaatatataaatggaccacctagagtggcccttgtccccgagcagatgctgtttatagaggtggctccaaccgcacctgtgtgtaccgccccttttgtgaatttcagaggcgagtattcatggtgacagtccccaggtgagtaaaggaggcagctggacttagcgaggatgtgcattgaggcggaaggctgatgctgggagtgtggcatcagccgaagagaccaaagaagaggcagaaattaacaagggccagtgaccagggttggcagctgttaccagcccccaaaactcccaaaaggacccgtcctctggcctccctctccttgatgacaatctcagcgcactgcagccttgccctgggcagggttggcagctgccttactgcggtgaggccttgaatggagacaccttattgaccagcgtaggcagagcttgtggcctcaggcccggtagggtcgagaggtcagacaggctgtgtgagacagcacgtagggcccagccccctccacccctcgtttcccggacctggacctgctgcactgctgccaggagtgggacagagccaggggatttggaggttcccagaaaacagaaaagccaagagtcatattggtggtttcagttcttgtcaatgaggttgaagaatacacaaaacttggaccccatgagagccagaggccagcccccatcctgtcttcatggttcccaccaccccggtgtcaagggggctcttgccaccaagggagtgcccatgcccgtgagacctggagaagtcacagcttgccacctaagttctccaggtcatcctgtccctgatggtaggtgcgaaaacaggtaaatcgcctccaaagcgtgtcctggcatcaaattttgcagggtgccgagtgagctcaggcgtcttcccagcatggctctgtccctgagtttaaagctgctctctgaatgcttcctgctctgggccctcaagttggccctgtgacatccttagatctcagagttgctctctggacagttcctctggcccctgagatgtcattgctggcactggagtgtccatgggacaggctggcgctgagctgagagcccctcgacggggttcaggagtggcgggggagggtgtggcacaagcaatgttggtgagggaggtggtggatatgcccaggtggacacacctggtcatctgtcccctgtcctgcaggcctcccctgtgtacagcttcagctttccccggaggaaattggagtagactcggaagagtttgcggaaagtgtcagcagtgattgttcggagtggagcagctgaggccgcatctggaggggagatggcttccttctgccaaggagaaaacaggaggtcgctgcagtgccacagaaagggaaggaatacggacagttcctgtactccttagcaagacccttctccccttcttacagaaagggcaagcagaagtgtccgctcctactcacctgggctcccagagcccgaagcagagtggtgaggctgcgaaggccactgacggctttatccacatgcagctgcaggggctcccacggctgggaagagttgaccaacagggcctggccccgcaggacagcttccgacagcagggccaggccctgccagacttctacggcctgctgcccgacctacagggagtggactctgggagtcagctgacccatgtcaccctctccctcctgcccctcagcagccccaagcaccaagctgagcaaacagaaggtatgcaataagacttgttgaatgaatgaatgaatgaatgagtgagtgagtgagtgaatgaataatgaatgtattccatacagccctcattatttttcttttttcttttcttttttgagacagggcctcactctgtcactgaggctggagtgcagtggtgtgatcacagctcactgcagcctcaaattcctgggctcaagcgatcctcccgcctcagccttccaaatatctgggactaccaccatgcaccacttcacctgactaatttttttaaatgtttgtagagatgggggatctcactatgctgcctaggttggtctgaaactccagggctcaagcaattctcccatctcggccatctcagcctgggattatagacgtgagcctctgcgcccaggcagcctcatctctgctgctccattttacctttccctcgatcattctccctttcatccaaaatcaggctcgcaaatgagattctccaaaagaaaggaaaaaaaaaaaaaaaggaactcacctccatcctcttccaggcatagaaattaactttggtgtctgggacagtgatattctcattcaagctgcagtgttcagcacagcccgtctgaaatgcacacagcccggggagtcaagggtccctgaaggctctggccctggcccacaggccgtaggatctgctggctttgctccttgcctagtttccaggtatggtttggggccaccagacttattcttatgtaggggggcagtgtctagcttcccaactccaccccaaaccaagtgccaggttcctggatctgggaggagttccctgaagccctgagcgtgagttctgtggaatgtgctggggaaggggtctcaccgtgatattctcggcctccttggcctccaagaggtacctctccaggactcggctgtcacagatgaggcgtggtggggcgcccaggactgggaggcccagagggagcgacagcagggacaggagaagccacagccaggcaggacattctagaacagatagccaggctgagagtcaggcggggagggagaagggtggctgtggaaggacagcttccttcatccccacgtctctgccccagctcgtccttcctgtccccaaccatgcaagcactcaggtgctgcctccctggccttcattcaatcctgctgccgtgtgcacaccccacccccagctaccagcatccacttctccggccaaacttcaatcctggtgtgacagaggcttcccctctggcagataagtggtggctccagcgcccaggttatcagcttatcagcttcctctccactggcacagcagaacccccaaaccttcttcccctcaacccccaaactgtgtccccttcacaggtcaggtttttgccatccccaaggactcccccaagtccccgctggcacgtggaggctgccccacccccctcccccttccggggtccttgacaagtcgccggtccttgaacccagccacctcctggccaatagccggggcgctaaatccccgctcaaacagggacccgggcgggcgggagcgcccagcccgcgagtactcaccgtgcacccccatctccgcgcctggccggggtccctcagcgacctggggcgcgccgggtgaccacaccgggggccctcatcccgggaagctcggcggtgcagggccagccccacgggcctggaggagagggcggctgtccagggggcgcggtgtcggagcagagcgggcgcggtggccccggtccggctccgggaggacagcgcggtgcggcgcagcgcagcgagcggccggggtggcccagggactctgcggctctggccgggggtcggggctgttatctgcatgtgtgcgtgcgcgggtgggggtgggggagaggctgtgtgcgtgaggggtcgccaggggtaggggccacccggggtcagagcaggggcaggacgcctgggttgaggctcgccggggcgtgagcggggctgctgcagacgtgcgtgtgggtcatgggggctgctcccgggccctgggtcgcgggaggggagtgcagccggttgcgcacccttgggactggcggagcgtgctatctgggaaaggctgggctcccggacacctcccctggggggcatcccggtcttgggcggagactcagagatgcctgggttgctgagttccgcaaagtagctgggtctggaagcccagaagctttagggaggggcaaatgagtggtctcccttcccacaatcccaggacatgttctagaaacaatgttgaccatgttgaggaatttgatgggggcaaatagggcaagaaatttggggttcttcctccccacctcactcctcaccgtctagtactctgcaaacccagacacttaactttttttttttttctggagatgtagcctccctatgttgcccaggcagtgcagtggtgccatctcccgttcactacaacctctgcctcctgggttcaagcaattctcctgcttcagcctctggagcagctgggactacaggcacacctttacacccggctatgttttgtatttttagtagagatggggtgttgccatattgcccataccggtcttgaactcctgacctcaggtgatccaccctcctcggcctctcaaagtgctgggattgcaggcgtgagccaccgcacccagcccccaccccagacacttaacttttagtgcacagagcacacagtccattgtgcaggacacacatgcaccttgacatctgtttatttgacctgtggtgtaggttagctaggctgcattgctgagttcttaagaacactgaaatacagctaacaccaagagtgatgggggctgggatttacagctaaggttttatggcttctggaaaccctgagccagatgagtgagattcccagagcaggagaccaagactagctggtctctcacaccttagaaagtggcctcgtccttgagccctcaatgtcctcatctgtcaaatgggtgtggtgaaactaccagcctatcccattcaggtttcataaaagacaggaaaggtccaggcgccgcagctgacacctataatcccagcactttgggagaccaaggcaggaagatcctttgagcccaggagttcgagaccagcccggacaacatggcaagaccttgtctctaaaataaataaataaataaaaaataattagtcaggtgtggtggctcacgcctatagtcccaaatatgcaggaggctaaggcaggaggatcacctgagcccaggagttcgaggccgtagtgagccatgatcgtgccactgcactgcagcctgggcgacagagtgagagcctgtctcaaaaacaaaaaaagactggaatgtgtagatctgagctgtaagagttagccgggagaaatcaagaaagatttgagggaggaggtgacaatgacctcagccttgaaggggggtaggacatcaatgggaagaggtatgaggtgggtgggggattgtcgattcagcaaagtgaatggagagtcaggtgagtattgcgggatctggccagcagcccgcaatgcaacagggctctctctttgttcccaggcggatcagcaggttgagaaataatagacacacacaagatagtgaaagctggtccaggggggtcaccgccttctggtcccgtggtgtcaacaatgcaccagatgtaccatcatttattattaagtttagtgagggcgggggtaggttagtgagggatttagggtcatttgattatgaggtgagatggtcacatggggatgaattaattctttaacataacatttatatgtagaagtacagtacctttgtatgcagaagtacagtatacagagataagaatttacaatatagtgtgtgcatcagtaatttctaacagagccttaaaacagaaacacaatctttccataacctatgattagcaagatactaatcagcagtaacaattgcaacaaaagctggttacagacaatccatggaaacaggacatgaagctagacaaccagttagaccagaaattctcagaagggagtatgccttaaccctaaagaggcctagaagagccatggcaagatgagggcgtttatagccctatcttatccatatggacaggtgcccccccgccatgcgtccgtttataggctctccacaagggtcgcattccattcccagagctatgaacatctgcttttctgggatagaaatcttggtgatgtgaaacctccctgactgcaggtccgttcataggctctccgcaggcggaagcacatcacaggctgttggctcattctggcagtccaacctggcattgtttgtacacaatcctgcatgcaattttgtatttacaataatcaggagcatttcatcttttattccgtagcagtagtttcagggggtctccctacaggtgagcagaagggaagatggagaagagagaggtggaagatgaggccagggtgctgcttagggaggagtcaggctgtctatggccttgaatgcctctctgaagaatttggattttgtttggaaagagtgggaaacattcactcattcattcaaaagatatttatggatttcctacctacccctggccaaggacctggggatagagcagtgaatgatacagccaggaatgcctgccctggtggagctgacgttctagtggggttgccaatgatgaacacaaaaatgggtacaagacagaggattttggctgggtgaggtggctcatgcctgtaatcccagcacttcgggaggccaaggcaagaggatcacttgagcccaggagttggcttgaccagcctgggcaacatggtgaaaccccatctttacaaaaaaatacaaaaattagctgggcatgatggcatgtgcctatagtcccagctacttgggaggctgaggtgggaggatcacttgagcccaggaagttgaggctgcagtgagctgtggttttgctactgcactccaccctgggcaacagaatgagaccctgtctcaaaaaaaaaaaaaaaaagaaagaaaagaaaagaaaagatagaggatttcaaatagccagaactaaggagaaaaggcacaggcagggttatctaaaataaggtagtcagagacactaggctgagaaactgacttgaataaagacctgttgggggtgagggaccatgagggtgtggtgaggtgaagagcttgatgggagggggatttgggccaagtgtagtggctcacacctgtaatcccaacattttgggaggctgaggcaggaggattgcttgaggccaggagtttgagaccagcctgggcaacatagtgagatcccatgtctataatttttatttttgtttagctagctgggcatggtggtgcacatctgtagtcccagctactcaggaggctgaggtcagaggatctcttgagcccgggaggttgaggctgcagtgagctatgatcacgccactgcactctagactgggcaacaaagggagaccctgtctcaaaaaaaaaaaagaaaaaatgagtggtttggcaagatggttgggtgggggtcaggagacagaggctggtatgcttctggctggcctaattccctcagaccctgctcccctgcatcctctgctcaccttgagccttcccaaaactgctgtccaggctcccccagccccactcggctcctggttctgatcccttccagagtcctgggacgtgcaccatcacactcacatccacacatggccgcacgtgcgttctgtcttggctgctccccttccccagcctctgctctcccaggaccctgactcctgcgtcaatgccctgacctaaccatggagagggggccggagacagatgggtggggtggacacagctggaggaggaggagccttttgggctgtgggacctgcccctcccctcacacagcttctcgggggtccctgcatccttgtctgcagttgaagaggagtgagagatgggccaggggcaccagcctctaaatgctgtagcctgctggataggagtagtgactgccttgtcccctggggcttctggagagagagctgtgattgcagcttgggagggaggagaggatcttggtccaccccatacccaatccgaagccatagtaattctctttttgagatggagtctcactctattgcccaggctggagtgcagtggtgccattatctcagctcactgcaacctccacctcccgggttcaagcaattctcctgcctcagcctcccgagtagctggaattacaggcatgtgccaccacgcccggtaatttttgtattttcagtagagatggggtttcgccatgttggccaggctggtctcgaactcccaacctcaagtgatccgcccgcctcggcctcccaaagtgctgggattacaggcgtgagccaccacaaccggcttgaagccatagtaattctgctaagaggggagaggctggtttggagcccagagcctcttggatactgagcaatgcagggtccattcatctgtccttgaggaacaggaagaaaacaagaagctccatggggctccccgaccaatgcccaccatccccctgcccagtgccccccacccccgtcatctgcctgctcttcatcttctagcagatgctgacccacaggcccaggaccactgcagagcatctcctcattgacccctccagttaatccctaaccctgctgctcaattaactttcccactgaacagcctcatttgtgctaattccctgagcaggaacctgccacggcttcctattgcctcagaactgagaccctccaaggtctaccattcacttcatgttccaggctgttctcccgctttgctcactcccactccctccaccacaggagatggtttgtgccttcctgcccttggctcatcctggattaccctcccacaccatctcctcgttttctttaaagcccaaatctgtgcatcgcctcctccatgaagcctttcttgatctcccagcaggaaatcgtctccttccctggcactgccgtcatttatgtacatgtcttaggcatctcactggcaggaccgccatggacagccgtcaaagctgagcactgcccaactcccaggggcatccatagagactctgaagggaatggtaccgtctggagtcacgtagtgcaggtgccctagtcatcgaagagagcgaagggctgcgtatggaagttctgatgcatttttctgtctaccaagcgtccagcatgtcccttttctgtggtaaccacccaagtgtggattgcattatgtggtccctccactacatgctcagagaagaacccaacctagagggggcactgagccatcccccggtcaacccagctccctgggatcctggggcgtgtgaagcttccatgcacttcctgagcaggcagccactgaggcagggtttgaaaagggccagttgtgacaggaggatggcgggcgtggaggcaggctctgctccacggattcctcctggcagtggattcagattggaaatccaagcagaagcaaatttacagccccccgagctgtcccagacccccaggcagcacggagccccagctgcctggagtcggacttgggaaggggggcctcctggcttctctttccctcctcatttccaagcagtggcttctcagctcagctcgagttcagccagaggcccagaagaccttctgtgctgggaggggaggtggctggggaccttgttgggtggcctttggggaactgtgaaggaagcaagaatgctggagggccaggcacggtagctcacgcctggaatcccagcactttaggaggctaaggagggaggatcccttgagcccaggagtttgagaccagtctgggcaacatagggagaccctgtctctacagaaaatttgttaggcatgctggcacatgcctgtagtcccagctactcgggaggctgaggttggaggattgcttgagcccaggagttggaagctgcagttagctatgatcgcaccactgcactccagcctgggcgaaagaacaacaccctttcttaaaaaaaaaaaagacgctgaagaagggattcctgctggagaaccaaaggaaaatcctttgccaaagtcctcaaaggaaaatcctttaccgcacctggcctaccaaagttttatgaagcctattcctgactgatcctttgttctctaagtaaggtgatcaaggagttagttatcaaactgatgaggggccgggtgaggtggctcacacctataatttcagcactttggaaagctaaggtgatcatttgaggccaggagttcaagaccagccggggcaacacagtgagaccctggctctataaaaaataaagaagttattttttatagagttatattttttatataaaaaataaagaagttagccaggcatggcggcacatgcctggtgtcacagctacttgggaggctgaggaaggatgatcatttgaacctaggaggtcgaggttgcagtgagctatgatcatgccactgcactagagcctggggaactgagcaagacccatctctaaataagtaaaaataaaactgatgagatacctcaagaagttattttattgcccgttccactaactaataaatatctgatgaatgaatgggtcagtggatacatggatgatgcagaggagaatggcttgctgtctcctctataacaagcctctgctcccttaagaaaaggcaaccgtcttgtcacttgaagaatgcaaacagagggtggactttcgccttcacaggacctgctagattccttccaactcagtctattagtcttgtttgctattagacaaatatacttccctgaaaagggaaaaattatttgctggttgatgaactaagacacgagcagaagagctcacttaggccgggcacggtggctcacgcctgtaatcccagcactttgggggctgagacgggcggatcacgaggtcaggagttcaagaccagcctggccaatatggtgaaaccccatctctgctaaaaatacaaaaattagctgggcatggtggcgcacacctatagtcccagctactcaggaggctgaggcagaagaatcacttgaactcgagaggcggaggttgcggtgagccaagattgtgccactggactccagcctgggcgacagagccagactctgtctcaaaaaaaaaaaaaaagcaacttttatgatgaacttttgctcattacaaaaacaatacgtgaccaaaattagaaaacagcgctaaactcaaacacataaactgaaaaacacccataatgtcattagggtcttgggaccttaagtggccattttcacaggcttccttctggtaggatgacctttgcctcatcccaaatctctgtgcaattggacatctgtttcctaaggaactacaattgacacgttctcgtccaacctctctagtggtttgagggtttgtgaaacaccatttttccctcaactcctgaccaagcaccagaaactcacctgggacaaagtgctgggcttctctagcaggatcatcagcctgatcaaaccacttaatatttcaaggtcccgtccccttccctgctatgcgagccacaactgagtctggctcagttgttagtttctactaataactcagacttgagaattaaacgcacacaaaattgccttccttcacttctccccattcctattaagaagcctaaaaccatttcttagcaaaatggcttcatactaaacaatactagctcttggccgggcgcagtggctcacgcctgtaatctcagaactttgggaggctgaggcaggcggatcacctgaggtcacgagttcgagaccagcctggcaaacacggagaaaccctgcctctactaaaaatacaaaaagtagccgggcttggtggaacgtgcctgtaatcccagctactcaggaggctgaggcaggagaatcagttgaatccaggaggcggaggttgcagtgagctgagatcacgccattgcattccagcctgggcaacaagagcacaactccgtctcaaaacaaacagataaacaaacaaagaaaacaatagtagctctttttttttttttttgcctgtagtcctaactacctgggaggctgaggcaggattgcttgagcctagaagtttgaggttgcagtgagctatgattgtaccattgcactccagcctaggctacagagtgagaccctgtctctaaaataaataaataaataaataaaatgtaaaaaggagggcagggcattgcatttgcacacaccttctgcctccatctcctcacccctctcccgtttttcaagcttttttctttttgagactgagtctccctctgtcacccaggctggagtgcaatggcacaatcttggtgcactgcaacctccacctcccgggttcaagcagttctcctgcctcagcctcctgagtagctgggattacaggcgcctgccaccacgcccagctaattttgtattttcagtagagacggggtttcaccatgttggccaggctggtcttgaactcctaacctcaggtgatctgcctgcctgggcctcccaaagtgctgggattacaaacagacgtggctcactgtttctggcctcccaagctttgacggaagtcactttggagagccagtagagggaggagaacagaggctggagctagcctccctacggtcgggcctgcaggcagggttccctgccccacctgccctgcatggactctagtagatgcaggagcctggttcacgcccccccacacacaaaagagtgagccccaggccccactcttccttcagtggcaatgtggaggtctgtttctgcagaactgccactgagggaagccccactggcaagcagtgagaaaacatggagtagaaacaacaaacaaataggctgcaggagggaactgccaaaacaaaccagatgggaaaggctgcctgccaccacctctgctgggctcaggcccggagcacatacgtgcagggagacacagctccatccagcttcctgccggctccccgctcggctattggggggctcccgggcaaggaagccttgcagtcaggctgatggaaaggatgtggcctgatagaaatgtccgcagccagccaggtacggtggctcacgcctgttatcccagcactttgggaggccgtagggggcagatcacgaggtcaggagatcgagaccatcctggccaacatggtgaaaccccgtctttactaaaaatacaaaaattagctgggtgtggtggtgcgcacctgtaatcccagctactcagctacttgggaggctgaggcaggagaatcgcttgaaccagggagtcggaggttgcagtgagccaagatcacgccactgcactccagcctggcgatagagactctgtctcaaaaaaaaaaaaaaaaaaaagaaatgtctgcagccttgtctcccagtacctcttgctttctagccacctcgagtccctccagtcccagaacgtagctgcctattcattaatcccctccctgcccactgttttttgagacaggttcttgctgtttcacaagccctcagtcacggcttactgcagcctcaacctcttgggctcaagcaatcctcccacctcagcctcctgagtagctggaccacaggtgcacaccgccaagcccagttaatttttaaatttttgatagagacaaagtcttactctattgcccaggctggtctcaaactcctgagctctagcaattttctctcttcggccttccaaagtgctgggattacaggcgtgagccaccgcgcctggctttttctttttttaagaagctgtgacccacaaatgggtcacaacccgctttgataaacattgctttagttgactttagtttgataaatatgaaaaatcaggtcatcccacaaatatccaaacagaaagtattacctgtgtgcccagtaattatttggagtgaggggttccttcgccactggagcagcccagtgagaagggtctgaaggccgggcgcagtggctcatgcctgtaatcccagcactttgggtggccaaggcaggcagaacgcttcaggtcagaagtttgagaccagcctggctgacatggtgaaaccccttctctactaaaaatacaaaaaattgcagggcatggtgatggatgcctatagtcccggctactcaggaggctgaggcagaagaatcccttgaacccaggaggcagaggttgcagtgagctgagatcgcaccactgcactccagcctggatgacagagtgaagctgtctccaaaaaaaaaaaaaaaaaaaaaaagggtctgaagggctctgcacctgaaagcccgggtatcatctaggtaggccctgcaggtccaggaattaaatgaagccacttgtcagtccctaccatggagcctgacactaagaaggtcctgaagtcttagtttgcttccttttttttttttttttttttttgagatacggtcttgctgtgtcagcaaggctggaggagtgtagtgcggtgatcacagctcactgcagccttgaactcctgggctcaagcgatcctcctgcctcagctaacgaggtagctgggattataggtgcaaaccactacacccatctagttttcaaaaattttttgcatttgggaggccaaggcgggcagatcacttgaggtcaggagttcgagaacagcctggccaacatggtgtttccactaaaaaaatacaaaaataattagctgggcgtggtggcactcacctgtaattccagctactggggaggatgaagcaggagaatcacttgaacccaggagccgaacgttgcagtgagccaagatggcaccactgtactccagcctgggtgacagagcaagacttcatctcagaaaaaaaaaaaaagtggtttttttgcatagactaggtctcagtatgtcatctagattggagtgcaggtggcatgatcataactcactgcaccttcaaactcccaggctcaagcactctttccgcctcagcctccgccagtagctcagactacaggctggagccactgcacccaactagaagacgaaaatctttaaaacaaacattggggctgggcacggtggctcacgcctgtaatcctagcactttgggaggccgagatgggtggatcacaaggtcaggagatcgagaacatccctgctaacacgctgaaaccctgtctctactaaaaatacaaaaaaattagccagggtgtggtggcaggcacctgtagtcccagctactcaggaggctgaggcaggagaatggcgtgaactcaggaggtggagcttgcagtgagccaagattgcaccactgcactccagcctgggtgacagagtgagactctgtctcaaaaaacaaacaaacaaacaaacattgggatgactgggtttctgcactgtactgttttgttacactgctcatagcataatctatgctctctatagaggcaagaaacacttgggttcccctttcacctagatacctgtagcgtttcctaccatccctattcaggcacacacagaatttacacaggaaagaatcagtggcagtgggatggcaggacactagtgcaacaggattttttatttatatggcaatagttacagaccgcatacacacactcaggaaggcccactaactgggcccaccaagagacaattacccccaccctcaatgcagagtcctttgggcttccagggaacaggccttttcttacatggctctggtccgaggtccagtactcagcatgcgaagagccatatcacggaggggataagtggaggagtgtcttttcaattacttgggtgtgaccctgaagactcggatgtggatggctgagttgttgcggatccgagtcagtggctcccgtgtgtcggtctctggctccagctcatcaacaagctccacggtggaggtattggcagccacctgcaaggacccgaagctgcccgcctgcagctgcagcgcgatgttgatggcgcggttgatggccaggcccaagccgtgaatgtagatctcagagcacgcgttctgaccccgggcccctccgtccagcagcttctggcagcgggccagctgggccttaaagtccgtcttcatgttgacataaatgtcattgggtctccggggcaggcggctgggaagccttttcctaagggtgtattccactggatccagttcagcctccacagcaccgcggggctctcggttttctgccatgctgtgtgccctggcgtgggaaagggacgcgatcagagggctcagagggacctcgaagcctttcctaccccttttcctgtacaaagggtgcacctggccgggcagtggctcacgcctgtaacctcagcactttggaaggtcgaggcgggaggatcactggagcccgggtgtttgagatcagcctgggcaacatagcaagaccctgtcttaagaaaaatttttttaattacccgggccgaggggggaggatcgcttgagatcgggagttcgaggctacagtgagccgtgatcgcgcccgccactgcactctagcttgggaaacagagcaagcctctgtctcaaacaaaaacaaaaacaaaaataaagggtgcacccgagaagggacacactcgatgtccctgtttccttccggcccctcgtcctctcccactcacctccagatcccgcgtctccccaccccccgttccgattcattcatcgcgtcgccctcaaactcgcgcccctccgccgcccctcccgtgcttactctcttcgttccacagggccctccaggcgcgcgaggcccgctccccgccaggccactcaagggttcgccggccagcccaagtaaccgcgaccccaggtcccagagaaagaaggatgtgggtgcaagcagccagccagctcgtgggcgccctgcccgcgccggggtcctgaacgggctgcggagtgcgcacgcgcgcccgtaccccgcgagctatgaatcgccttcccggcttccgttcgccccgccccttccctgagcgcaagggcgactgcgcgaggcgtttgagaaacgcgagacttccgggcgtgacgggatctacacgtgtacgcctcgggaactggcgggcggccgagggcgggaaccaggtccgagccggggaggagctagaaagggccgggtcggcgtctctaggcctggcggagttcccggccggcggaggggtagcgtagggaagacacctggaggggaggctgttctaggggcagggttcttccccatgggagcagggaaggggccgagttcaggagaccgcggtcgccaaggggcctgaactccgcgtccgtcgcagctcctctggtcagaagaggcctgggcagggctggcagaactgaccccctagtctaatgtccctgtggcccgaggaccgagggggaactgagggacatagccggtccccacctcgctggaggacagcgtcccgggactcccctgcagttcacgggaagctgtccgcctcctgtctgtgctggggacccacgctgtgagccctaagcccaggcttcacgggtccccaaggaacgctgacccacccacgcccctcaaccatctcccaccagctctgcagcaggcgaccccggatcagggacttgccgccccctggcgggcaaggtggggaggacgcgcgccggattcgtggctctcaggccagtggagtgggggctctgcccagatgggcatagtttctgcagagttcccttctgaaatgagtaggacctgctgcactggggaccttgaactactctgtttgcccagcattcaaatggggatgttcacaacagctccaccatattgcacatgcattttattgaatggctagctgtatagcttctgtctacaaacttgcatgcatttatttttgagacagggtctctgtggcccaggctggactgcagtggtgtgatctcagctcactacaacctctgcctaccgggttcaaacgattcttgtgcctcagcctcttgagtagctggaattacaggcgcacgccaccgcacccggccagtttatttcatttttttgagacagggccttactctgtcacccaggctggagtgcagtggcgttaacacggctcactgcagccctgaactcctgggctcaagcaattctcccgccccagccacctgaacagcttggactacgggcatgcactagcatataaagttgtattttagaagttaatccttggtattgaaattttcgatatgttggccgggcgcggtggctcacgcctgtaatcccagcactttgggaggctgagacgagcggatcacgaggtcaggagatcgagaccatcctggctaacacggtgaaaccccgcctctactaaaaatacaaaaaattagccgggcatggtggcaggcgcctgtagtcccagctactcgggaggctgaggcaggagaatggcgtgaacccacgaggcggagcttgcagagagccaagatcgcgccactgcactccagcctgggggacagagccagactccatctcaaaaaaaaaaaaaaagaaattttcgaaatgttcacataattgttgggagcgattcattcctccacacatgatgtgcctcctctctcccatatcctgttaattgtagcagttgcgggcatttgcgatgacaggatatacggatggtgccacacttgaccttgagtactggaatgctctgaggtcaagcatatgccacagtgcttgagactgtgggcatcacctgtagtgtctttttctccaactcctgtctccttggtcctagggaggtctggctctaattgctagtttccagagattcattcctttttttttttttgagacggagtctcgcttcgttgcccaggctggagtgcagaggcacgatctcagcttaccgcaacctctgcctctgaggttaaagcgattctcctgcctcagcctcctgagtagctgggattacaggtgtgcaccaccacgcccggctaatttttgtattttcagtagagatggggtttcaccatgttggccaggctggtctcaaactcctgatctcaagtgatcctcctaccttggcctcctaaagtgctgggatgacaggcttgagctattgtgcccagcctcatttttaagctttggatcacaggaagaagcaacaagaaactatacccaactcaaaacattttaggagaatcataaaattggtccatttagaaggtagagttgggtccattaagttattgttgcaagaggttgcatattcaatgatcagttatataaaataatgttctcgttagtatgcttttcataatctgttttatcatacatgtaacattcaaactgacaaatacactgacttgggaataaaggatatgaaaacactggtttaaaaaaaatggggatgctaattcctttcttgcagttgagttgtgaaacccaaggtaatgttgtaaactgtaaacctacacaggtgagttggcatatttatgtctcccaggcccttctcagttccctaggatggagtctgaccccatttgatcaaaggttgaagagagttcagattctagagaaatttgctcccagcaccccatttcaatcccatagttctttcctttacttcagattctttcattaaccacaagattgggattgaattggaagatccaacatattatagtaaagataccaattctcttcaaattaatctataggggccaagcatggtggctcacgcctttaatcccagcactttggaggccaaggtgggcagatcacttgaggtcgggatttcaagaccagcctggccaacatggtgaaaccccgtctctgctaaaaatacaaaattagccgggtgtggtggcacgtgcctggtactaatcccagctactcaggagactgaggcaggagaataggtggaacccaggaggcagaggttgcagtgagctaagatcacaccactgcattccagcctaggcaacagagcgaactccgtctcaaacaacaacaacaaaaacccaaattgatctataggcgtaatgcaattcctacaaaaatcccagcagtttttttgtattaaatatagatgtttattctaaactttatatggaaaggcaaaagaagtagaatagttaaaaccactttgaaaaagttgttggaatcacactacctgattttaagacttactatataaataaagttatcaagaaagtatggtttccccagtgggatagacacaaaaatcaataagatggaattgagagctcagaaatagattcacacaagtgcagccaactatctctctttaaaaaataattttttgtttgtttataagacagtgtctcactttgtcacccaggcttggagtgcagtggcacaatcttggctcactgcagcctcaacctcatgggctcaagtcatcttcccgcctcagcctcccaagtagttgggactatcagcacgcgccaccatacccggctaattttgttttattttttgtagagacgaggtcttactacgttgaccaggctgatctcgaactcctagactcaagcaatcctcctgcctcagctccctcaaagtgctgagattacaggcgtgagccactgccaaacaacttgtttttgacaaaggtataaaagcgtttcaatggggaaaggatgatcctttcaagtggtggtgaaacaattggacaaataggcaaagaaatgagcctcagccctatgcaaaaagttaatacaaaatggatagtagatttaggaaaaaacttcatggtgtagggtcaggtgaagagttttgtttttttgtttgtttgtttttttgagatggagtctcactctgtcgcccaagctggagtgcagtggcgcgatctcggctcacttcaacctctgcctcccgggtttaagagattctcctgccttagcctcctgagtagctgggattacaggcacatgccaccatgcccagctaaaggcgaagagttcttagacatgactccaaaagcacaatccataaaagaaaaacaattgggctgggcacggtggcttatgcctgtaatcccagcactttgggaagctgaggtgggtggatcacctgaggttaggagttcaagaccagcctggccaacatggtgaaaccccgtctctactaaaaatacaaaaaattagccgggcgtggtggcatgcgcctgttatcccagctactcaggaggctgaggcaggagaatcacttgaatccgggaggcggaggttgcagtgagctgagattgcgccattgcactccagcttgggcaccaagagtaaaactccgtctcaaaaaaaaaaaatgataaattggacttcatcaaaatgtttaaacatttgctgtgtgaaagatcacattaataagatgaaaagagtagccacagactggaagaaaatatttgcaaatcatatatccaacaaaggacttgtttccagcatatataaagcactctctaagctcgagaggtagaaaccgaacaacccaattagaaaatgggcaaatccagcctgggcaacatggtgagatcctgtctctacaaaaaatttaaaaattagccaggcctggtggtctgtgcctacagtcctagctactcaggaggctggggtaggaggattgcttgagcccaggaggacaacaccgcaatgaactgtgatcataccactgcactccagcctgggcgacaaagtgagggtctgagaaagaaagagagaggaaggaaaggaagaaaaagggaaggaaggaaggaagagaggagagaaagagagaaagaaaaaacagaaaaaaggaaggaaggagggagggaaggaaggaagcaagcaagcaagcaagcggtggctcttgcctgtaatcccagcactttgggaagctgaggtgggtggatcacctgaagttgggagtttgagaccagcctggccaacacggtgaaaccccgtctccactaaaaatacaaaaattagctgggcgtggtggcgggcgcctgttaatcccatctactcgggaagctgagacttgaaaatcgcttaaacttggaaggcaaaggttgcagtgagccaggatcacactattgtactccagcctgggcgacagagcaagactgtctcaaaaaaaaaaaaaaaaaaaaaaaaagaaaatgggcaaatcttaaacggacatttcagtgaaagaaagtataaaaatggtaaataagcacatcataagatgttcaatatcactagccattaaggaaatacacatgaaaaccatgacgagctaccaataacacgtattgaaatggctgaaatacaaaatacgaacaataccaagtgtggatgagaatgcagggaaactggatctctcatacatacactgcttgtggaagtggaaaatcgtacagccatcctagaaaacagtttggcagttccttctaaaattaaacgtacacttaccaaatgacccagcaagaacatttcttggcatttaaaaatctgtacatgaacatccatagcatttttttttttctttttttttttttgagatggagtcttaatctgtcactcaggctggagtgcactggtgcaatctcagctcactgcaactgctgcctcccagatttaagcaattctcctgcctcagcctcccgagtagctgggattacacacgcatgccaccacgctcagctacatttttttgtatttttagtagagacggggtttcactatcttggccaggctggtcttgaacttctgacctcgtgatccacctgcctcagcctcccaaagtgctaggattacaggcgtgagccaccgtgcccagcccgtccatagcatttttatttgtaatagcccaacgggaagcaacccagatggctttcttttcatattaatttattatgtagagatgggggtctccctatgttgcccaggctggtcttgacctcctgtacttaagcaatcctcctgcctcaccctcccaaagcgctgggattgcaggtatgagccaccgacctccggataacttttgatcagtgcatggtaaacaatctatggcacatccatcccatggaatattacacagctataagggatggatcaaggtgacctgttaggctgcgaacataccagttatattacataatactgtgctgaactgctcatattgtagtgtgcaagacaaggtgagcatgatcgcatgacctgtgctgaggggacatgaataggattgggtggatccccaaggagagacagccaatatcatcttgagggatccaaggttttccaagaggaagtaatgattaggcagagacaggaatgtttagcagtaggtcctatatcctgttcccttttttttgagacagggtctggctctgccacccaggctggagtgcagtggcttgatctccacttactgcaacctccgcctccctggcttaagcaatcctcccacctcagcctcctgagtagctgggactacatgtgtgcactgccacgcccggataatttttgtattttttgtagagatggggttttgtcatgttgtgcaggctgctcttgaactcctgggctcaagcgatcctcccgcctcagcctttcccaaagtgctgggattacagatgtgagccactgtgcccgacccatatcctgttccaatagggaggtctgagccctgggaggatggggagaagaggaggaaccagtaaaatctgagaaatagcagctagtgaggtgggaggaaaaccaacagaatatagcatccagaaagccaggtgaagatggtatttctggagggagtgaccgtctatgtcactggctggtaacaggtcatgtaagataatggaccagtagatttcacaatgtggaagtcattggtgacttacaacgcagttacgtttggttgagcaaagaacttagcgcagggccaaaagtaattctgaatgcagtaaattaattttaacgcccattatgtctgataattaacaataagcacagtttatgagctatcactccattactcaggtcatgtgtctttccatggtacctaaaatatgttttgcaaactctgatatccacataaatatcaaggctcgcaatttaggtggatgaagacaagctctgtaataaaccgatttgacaataaactgatctgacaacaagacagtccttatctccttgcatgcatttcttttttttttgagacggggtctcgccctgtctctcaggctggagtgcagtggcccaatctcagctcactgcaacctccacctccaaggttcaagtgattctcctgcctcagcctcccgagtagctgggattacaggcgcctgccaccacgcaggctaatttttgtatttttagtagagacgggggtttcaccatgttggccaggctggtcttgaactcctgagctcatgatccacctgcctcggtctcccaaagtgctgggattacaggcgtgagccaccgcatccagccctctccttacatttcatcaaaggaaaacactgaagaggaatctgccattaaaaaaaaaaaagtgggggcggggcgggcgtggtggctcatgcctgtaattccagcactttaagaggccaaggcaggtggatcacgaggtcaggggatcgagaccatcctggctaacacggtgaaaccccgtctctactagaaatacaaaaaattggccaggcgtggtggtgggtgcctgtagtcccagctactcgggaggctgaggcagaagaatggcatgaacccgggaggcggagcttgcagtgagccaagatcgcgccactgcactacagcctgggcatcagagggagactccgtttcaaagaaaagaaagaaagaaaaagggccaggaacggtggttcacgcctgtaatctcagcactttggaaggctgaggcaggcagatcacctgaggtcaggagtttgagatcagcctgaccaacatggcaaaacccatctctactaaaaatacaagacgcttgaacccggaggagcggaggttgcaccactgcactccagcctgagcaacacaacaagactctgtctcaaaaaaaaaaaaaaaagaaaagaaaaagaaaagaaaggcagaggctggctgtttggtctgcgtgagaccactctttcatctccattaaccttccaaacaaatctctttgtttagttaaaaagtttgcaaatttagaacacagaccaagacattttacagagcagcacctgaacaaacaaaaacacattagctccaaatgatttctttattttgagatggagtttcgctcttgttgcccaggctggagtccaatggcgtgatctctgctcaccgcaacctccgcctcctaggttcaagcgattctcctgcctcagcctccctagtagctgagattacaggtacgtgccaccacgcctggctaattttgtatttttagtagagacggggtttctccatgttggtcaggctggtcttgaactcccaacctcaggtgatccacctgcctcagcctcccaaagtgctgggattacaggtgtgagccaccatgcccggccaattaggtccaagtgatttctttgtaatttttaaattcttcatgggagactcacagttcttttttgttttttattatattttttcacttttctctctttttgagtcaagaactcattttgttgcccaggctggagtacacaaccttgtccttctgggctcaaggaaggacaaggtttattagcagcatgagaactgactaatacaatcacggtggaagaccagaggggtctccctggatctcctggacaccaatgtgtgactttggacaagtaatccccaccaactgtaaagtgtgaacactgatgctgaagtcagcagaaattaaagcctataaactccctctttgagaaaggaagctagctggcagggcacggtggctcacgcctgtaatcccaacactttgggaggccaaggcgggaggatcacttgaggccaggaatttgagaccagcctggccaaaacggtgaaactccatctctaccaaaaatacaaaaattagctgggcatggtggcgcctgtctgtagtctcagctactcaggagactaaggtgggaggatcacttgaacccaggaggtggaggttgcagtgagctgagatcacgccactgtactccagcctgggcgacagagcgaaactccgtctcgaaaaaaattaaaatattaaataaaatataaaaacagacagcaggacaggcacagtggctcatgcctgtaatcccaacactttgggaggccaatatggaaggactgcttgagcccaggagttcgagaacagcccaggcaacatagtgatacttcagtctgtacaaaaatttaaaagtaaaaaataatagctgggccaggcacagtagctcgtgcctgtaatcccagcacttttggaggctgaggcaggtagatcacctgagttcaggagttcgagaccagcctggccaacatggtgaaaccctgtctctactaaaaatacaaaaattagccaggcatggtagcacacacctgtaatcccagctacttgggaggctgaggcacgagaactgcttgaacctggggtcggaggttgcagtgagctgagatcacgccactgcactccagcctgggcaacagggtgagactctttctcaaaaaaaaaataaataataaataatacccgggtatggtggtgtgccactccctgcaatcccagctactcgggaggctgaggagggaggatcacttaagcctaggaggtcgatgctgcagtgagctgattgtgccactgcactccaggctgggcagcagagcaagaccctgtctcttaaataaataaaatagttaaaaaaggaaaacagacaggaaaactccaagtgcagagaagcctagtggtacttggtgggggaaacaaaagttgttccaggtataatagttcctgaagtcaacactctatcatggcaagacaccaggcactcaaattccaagtcatgaacttaccttttccttgttttgaggattacattgtgttgggcgacagctcttttaggcttctgggaagtaaggtatacattctggagtaacttccaaagaaaaaggtgaaagcatacgcggaacttttgagccttgaaaaagttcagcgagtcattcttgaaaagtcctttttttaaacaaagggggtttcagtcacctcacatttgcatagcagtttctctcttgtcaaagcctttcacattcacttattttaattcttacagcactcaaggaagagtgtggagttgggggtcgggggttgggtgcagagcagtgttaacatccttctgtaagagaaacggaggcttttgagaggccaggcgtggcggctcatgcctgtcatcccggcaccttggaaggaggatccatttgggtccaggagttcccggcactttggaaggaggatcatttgggtccaggagttcaagaccagcctgggcaacatgggggaaaccctgtctctacaaaaaaaaaaaaaaaaaaaaaaaagctgggcgtggtggtgtgccctggtagtcctagctactcagggtgcttgaggcaggaggattgcttgagcccaggaggcgcaggatgcagttaaccgtgatcgcgccactgcactccagcctgggcgacagagcaagactctgtcttggaaaacaaacaaacaacaaatacaataaattaaaaaaattagttgggtgtggtggcacacagctgtagtcccagctactcaagaggctgtggcaggaggatcccttgaggccaggagttcaagaccagcctgggcaatgttatgagacacgccacccgcccagtctttacagagaataaaaaagttatctgggcgtgatggtgcacacctatagtcccaacaattcaggaggctgagatgggaggatcgcttgagacacgggagttggaggctgccgtaagccgagatcgggctagtacactgcagctggggcaacagagtgagaccctgcttcaaaaaaataaataaataggggccgggcgcggtggctcacgcctgtaatcccagcactttgggagggcgagacaggcggatcacttgagtggtcaggagttctagaccagcctggccaacaaaaataagccaaacgtggtggtgtgtgcttgtaatctcagctactcgggaggccaaggcatgagaatcacttgaatccgggaggcggaggctgcagtgagccgagatcgcgccactggactgcaacctgggggacagagcaacactctgtctcaataattaaataaataattaaaaaaataaagaggctcctgagagtcaacttatttgcctgagccacttatttcacacatcccaggacgcctgatgaagggttctggattttattgtctcctgtcatccaggcgggcttcctggaggaaaccggaccgccagggaggccgcggcctcggtcccagaggtcgcgcgtcgcggggccgggggaggtgggggagaggaggccgctctggggccgatcccgcccgcagctgggggcccccgtcacgtgaccagccgggcgcccaggtcacgtgtcggggcggggaggggggggctgtcgggggcgacgggcgtccgggcagtggcgcgcgcggcacgcgagcagcgcacgaggagaggtggcgcgggccggagccgcggagggaggcggcggcggcggcggcggcggcggcggcggcggcggtggaaggggcggccccgcggccccgcgtccgcgtcacgtggtgcgaggcgggcagccatcttgctacaaacacaaacacagaggagccggcccgccgccggagccggccgagcttagagaagcgcccggagccaggcgcgcggggccgccagcgaggacctcccccgtctcctccccgaggccgccgcagcccggtgcgtcctcccgctctcccgcccgctccggcccatccccgccgccgggaccctcccccagagccggccagcctcggggaggccccgggagccggcgcccggcttagggggcgaccgctcgcccccctcgcacctggcgcccctccctgaagggcacgccgtcctcccgggccggcgcgctgccttccacccccgcgctcctaacggtcgcccccgggcccctgccaagccctgccctgggccgcctgggggcccccgaccctagcgtcctagggtggccgggccccgcgcttcccggagttctccccagcgcgcctttgggttcccctcggaacgagctgggccttgcggttccccaagtccaagcgttccacgactttggccaacatggaagccttgccctccacccaggcacctcgcctgggtcctcctcacctctgtttcctttcgctccggcgatcttagtgctgggtcattggggtctccttcttcccagttgctcggccgcgggaaataccttccttagcagagactgcttgtcctccccgtcccaggccaggcccttctcagctcatgcccctccgtgcagcagctccctggccacagctctcacactttgccttaaaaaaaaacaaaacaaaaaaatttccgagtaactttttaaaagcccctcgtctctcttctctgttatacagtcattactcgcattcccggtcagactccaggtctgttgcatcctagtgctaggaactaggagatgctacataaagacttgttagctggattggattttttttttccagccacccaagccttacttccctcctgcctctcaaagtgtcgttctggaagatcgtcagctttcccaccctcttgtgcactgcctcttcgagtctatatagaagtttcaatttagaaccccgccaacccctcgcctttggcatggaaacaccatcggtggtaccagtaagggtctctcctttgctgccgacatgggggatttggggttctttctccttcccatctttcctgtgccctttgcagacctaggctagccaccctccaccaggctagccagctccaatctgattttcttagattgtaggtcttggtcccccagcggtctgtcgtgccattgggaaggatttgagggtagacctggccttggtgtccctgccattgcctggggaccaggggccctgagggtcccacgtggtggttagtcaagtggaccatgtgcttaaacttctggactagctttttctgctgttggacacatcagtcttgtgttcgtgatctgatgcgttagccctaacttttacatctgctattggaatttgggaattaaagaaaaatagcccactttagaggagagaagatgagaggaggaggctagatgaaggatgttgaaagtctaacaaatgtaaaatggcttcaaactcacagaataatgcttgcgagtttgggatggttactgctaccgtgcgcacctccagtcttgcatagtgtcaaggatgtcggggcactctgtcggagcagcttcctccttcttttccctggctggagcccaaggctgggcaagtgggcaaaagggatcacaggaggtaaagagtgaaaatcctttgaaaactgttaacttgtagacaattgccaagcggtggtgtgatttgctgggatggctcagagaggagagagctgggataaccgaccagccgcgaagaatgcgggtttgcatctcttttttaagcctcagcgtcctcaccctaccacgcttggagaatctccatcctgagaaagggccaggtcccctccagcaggcctggggctgggcggttgttccagtgttgaggaattggggactgtgcttctgtttaagtggctctgttctgtgccaaggcacagtgctctgtgttggagctaattttaggggtgatggagtgaggagataatgttcttagctgaatgtgcactgggaccgcctgttctctgtcttttctttctctcttgagttctgagccccagagagcaggctccctttcccgcgcgccctggcgcctactggagcacccgggcccagcgtgtcctcgccccttgtctccggcagggggcagtctttcaaaagcattgattcagatgctgggggagtgagggtagacaggcccgagaaagagaaggggtggggaaggggcgaggagccgaagtaggccgaggcttgagggcagggccagggcgggggacaggctggaaggggcctgtgagaaggagaccctgagctgagaaagctcagccgggtaagctgagacgggcaggtggcagtaccccagcccccgccacctcctgctcttaccttcattggacagggatcagatacctggccctgagagcttgcaatagacaaacttaggcagtttttcttaaaaaaaaaaaaaaaaaaatctattcttttctcaaagattttctcctggcaggatttcagatttccctcgtgggacagtgtaattagggaatgatgtccctgctgttcagagaggagaatgacccagcgtgcacacacctgccttcccttgccttccccttggcccagtagacccccaagggctgtgcccatgctcgtggcgcagaggagggtgtctcagcactggcgcacttggtatctggagtcacatagctcttggctgtggggctgccctgtgcaccccctgcccagtggtgacaacccagaatgtctctagacttggccaagagccccctgaggagcagaggtgcccccagtccagaacctgttggagggtgggagccccatggtggcctgcaggtgtgccactagttcctttagtccaaggaaggggccaggcaccatcagcttccggcaccagaccctgctgtgggggtgcctagagagttaacctcactctcctggtttcttcccaagaaggcgggtggcatgggctttttcctgctctgggcctgctctctcccctgtcttggtgtcgctgtcctcagtctgcatgagccattctccctttgtgtgccccttgcagccaagacacagccaggatgggtgacttgagccggaggcacctaggagagctgcccttgctgcgcctggcagggggcagtgtgaggccatcgctttaaattttttttttttttttttttttgagacagagtcttgctctgttgcccaggctggagtgcaggggcgcaatctcagctcactgcaacctccgcctcctgggttcaagcgattctcctgcctcagcctcccgagtagctgggattagaggcacctaccaccaggactggctaatttttgtatttttagtagagacagggttttgccacgttggccaggctggtctcaaactcctgacctcaggtgatctggctgccttggcctcccaaagtgctgggattacaggcatgaaccaccacgcctggccactttttcttttttaaaaaatgtttagaattgtttctgtagagtcgtggtcttgttctgttactcaggctggtctcggactcctctcttcaagcctcccacagtgctgggattataggcataagccattgtgctggccaggtggtcccttttctgttctactctctcccaccctcatgcctccaggatgagcttctggccttctagaaggaatgaactggaggaggcccaaaatggcctctcctgaggctgatttgaaggaatgtggggtgtttttcttggagtggggaaaacttaggtatgcggtggttatctccagataccttttgttccctaaagcttttttaaaaaaatgattattgtggtaaaatatacaacaaaatttggagactttaactgtctctaattgtgccattctgtgttactaagtacactcacattggtgtgcggccatgaccaccagcggccccaggatcccctcctcagttgaggctctggacccttcagcaacagctccctgtcccctcagcccctggtggctgcccttctaccttcctccctcaatgagtgactgctctagagacctcatgaaagagaagtaaggggtagctctccttttttggctggtctgtttctcttagcgtgatgtcctcaaggctcatccagtccccagattgctctaggtggccacctgcagtcagtgacaggctggtggcttttcatgtcatggaacacaccaccactggagcatccagccgaggcagaggaaggagaggtcccaggggaggccagcctggccttgggttgcctctgagcccggtgtttccccctggagtgcctggactctgagcaggcctcggcttgtcatgggctgctggctcagctggggctgatggcctttcctcctcagcaccctggttgaacccgcttcctcttctttcccagactgtggcgtcctggagttgatgggagctgcagcaccaagccgggccagcctccctcccagccagtgacaacaccgcagcacctggaccccgcccacccgcttgagtcctctgcctggggccccagggatgcgcctcctcctgaaagtcccctccatcctcccttagaggaacaggctgccgccgcgcccccatcagcctccattgccctgaccttatttccacctgatggtgccagaggctgcttcccagctggtatcctgagatcctcgttcccttggtggcttggttgtttaagcctccattattgattgggggcggtggtctgggtgtgattcctgtgggggaaaccagcccgaggtgccttggctcaggcttgcctgcctggagtccttgtcgtgtacccgtctgtggccctagagtcacctcctgctccttttcactgggtttctccccagaccaagcccctggatttgagcttctgagcagccaactgatttttttcatgagggaaagaattttgctcctagatttatttctaatccttttctccgtaactgaccttttctctgtaagctatttgtggctctagtgggtttttgtttgcttgcttgtttttgttttatctttgccctgaacgtccatcctggcctcggctgcctccctccccgagttcttcactacacctcctgtctcagcctcccagagagggtggcgagggtgctgatgcccagagacaccatccggcgaatggacctctcctgtcatgcggggcagggcagggctgccggcagagccatgtcctgaaccctccctcctcccccctgctctccttaagggtctttcccagatgtgaaggtccctcccaggctctactgaggtcagaccaattcccagtggcttgggtaccctcgttcactccagcaccagcccctgccctccttcttcccgggccaggctgccaggtgagccccgggccaagggtggttgccctgctgaggccgaaaggactcgagcttcccatctcctcgcctcccccaggtctttcaccgtctggactcatctctgggtaactcatggtgtgagtggccacgtggctggctcaggtgagtccttttagaccccaggtgacccaccagctagtccggggcccattgttgtgcccactaggatgtcccccatggtgtcctccctgcgctttaaaggtctccttcgtgtgctgttcttcatggcccctgttcccccacaggtgtttggacagtgaacgccaggtcccctcctccccacccccggcctctcaaacacgcccagccccacgatggcagcagagacactcaactttgggcctgagtggtgagtcacttgtgcctcggctgccgtggagattcgagaaagcacagtcaggctgccctgacctctgtcttcttctctctgtgttgtgtccaggctcagggccctgtccgggggcggcagcgtggcctccccacccccgtcccctgccatgcccaaatacaagctggctgactaccgttatgggcgagaggaaatgctggctctctacgtcaaggagaacaaggtgggtgcgtgggcgaggggggttggcggtggtggcctctgcctgtggaggggatctggcagcatgtggtgtcttggctgtcccaacccactgccaggtcccggaagagctgcaggacaaggagttcgccgcggtgctgcaggacgagccactgcagcccctggctctggagccgctgactgaggaggaacaggtgggaccgggccaggagctgaggctgcgggagcctgggaggggaggccatgggttgggttaggaggagaggggccagcgctgaggagacaggcggggagggtgctgtggggtgggggtggaggtggttgggtgcctgggtcctcactcccgcccctggctccctcctcagagaaacttctccctgtcagtgaacagcgtggctgtgctgaggctgatggggaaaggggctggccccccccctggctggcacctcccgaggcaggggcagcacgcggagccgaggtagaggggtgatggcgtgtcctggggacgggcagatctgggcccctgacttcgagaacgtgcagcaggtttcattgtgcgtctggcctcttctctaggccgcggccgtggtgacagctgcttttaccaaagaagcatcgaagaaggcgatggggcctttggacgaagcccccgggaaatccagcgcagccagagctgggatgacaggtggggccgggagggggcatggcgcagagccgggcaggccagggaggggaggcctgggccctgtcgctagagggtaacagaggcccaccagataagccctgtccgagatcccggtgctcctgacccctggtttcgtttgtccccttcctccctccactgcctcagggcacagtggacaaggcatggggcggttgcacagggtggcaggggaggctgtactgtttctgacccacacgtttcccctgctgcagaggcgagaggcggtttgagaagtcagcaaggcgggatggaggtacgaggctgctgagggcggcggccggggcggcagggaggaccaagatgggtggcccagtctgggggtgcttatttcggaggtgttgggggcaggagggcctggagctggccccccaacgtttcttgagggtccaggcaccacgctgcctttctaataactgcccctgtcttcccgtctcccagcacgatgtggctttgaggagggaggggctggcccaaggaaggagcacgcccgctcagacagcgagaactggcgctccctacgggaggaacaggaggaggaggaggagggcagctggaggctcggagcagggccccggcgagacggcgaccgctggcgctccgccagccctggtgagattggggcctggtagcattggcgggggcagtggggagcaggaactgtaatgagagggtgggctcctgtagccacggggagggagcagaggctggctggtgtgggagtggccgggacagcagccctggaggtgctccgtgagctgcagcagagggggccgctggcttcgcttgggtacccactcttcttctccctgacttttcctgtgcagatggtggtccccgctctgctggctggcgggaacatggggaacggcggcgcaagtttgaatttgatttgcgaggggatcgaggagggtgtggtgaagaggaggggcggggagggggaggcagctctcacctgcggcggtgccgagcgcctgaaggctttgaggaggacaaggatgggctcccagagtggtgcctggacgatgaggatgaagaaatgggcacctttgatgcctctggggccttcttgcctctcaaggtatctgtgaggaggcgagggtgggaacctgcccttccggggtcctcttcctccccacccaccccagctgttctctgctccccaccccggccccatgcagaagggccccaaggagcccattcctgaggagcaggagctggacttccaagggttggaggaggaggaggaaccttccgaagggctagaggaggaagggcctgaggcaggtgagccgcggggtgcccagcgggcctggggctgggccgggcaggcactggtgttctttgccgggctgggcattggctgcccacctacctgtagaatcaggctacttagatctggaagaagagtgctgagaggtggggaggaaccagggggtagcagagccatgtcttcaaggcagtgtaccagatagaaatcaggcgtaatcaaaatgacctttgaaagtcccttgaagaagctgtagaacctggagtgacgtctgcggtgttgtgtggtgttgtgcgatgttgtgatatgttcctgccgcgtctggcagcgtggaggcgagggtcagggcaccacattccctctgccattagttgagttgacccaagtgaagtggtggactcggcctaagggagtgtgacccgcggttccagccacactcaagggcttgtgctaactcgcgtggcaggcccagcccttggttctgaactctggccatctccctcttctaggtgggaaagagctgaccccactgcctcctcaggaggagaagtccagctccccatccccactgcccaccctgggcccactctgggggacaaacggggatggggacgaaactgcagagaaagagcccccagcggccgaaggtaggaagggaggatggcctacctcccgggtgcgctggggctgtgggagaaagtgctccccactcgtgggggtgggcacacagggcattcacattgaggagccatggcaagagcgtggtgttctggagtgagagtaggcgaaagctatcttgtctcctccccgcccttctttccacctcctatctcatgccttccagatgatattcgggggatccagctgagtcccggggtgggctcctctgctggcccacccggagatctggaggatgatgaaggcttgaagcacctgcagcaggtgtgggggcctgagaaagcgggagggacccttcccacttctgacctgacctgcttggccccagccccggccccagctcaagctccatccccatccccatcctgatgttgctgagattggcagctgagcctttcttctttttctgggcatccaggaggcggagaagctggtggcctccctgcaggacagctccttggaggaggagcagttcacggctgccatgcagacccagggcctgcgccactctgcagccgccactgccctcccgctcagccatggggctgcccggaagtggttctacaaggacccacagggcgagatccaaggtacctgtgtgggatgggagggctgctcaaggccgttctggttcagggtgtctctggcataccctgtgaccccagtggttctcccgctccctcgctccctgtccaggccccttcacgacacaggagatggcagagtggttccaggccggctacttttccatgtcactgctggtgaagcggggctgcgatgagggcttccagccgctgggcgaggtgatcaagatgtggggccgcgtgccctttgccccagggccctcacctcccccactgctggtgagccgcttctcccctgcatggagggacagggtgtgaggggtgccggcaggagtccagcagagtcccctcctccctgctgggggcactggccgagctctcacctgagcagggaaacatggaccaggagcggctgaagaagcaacaggagctggccgcggcggccttgtaccagcagctgcagcaccagcagtttctccagctggtcagcaggtatggggggcctggggtgggctgggagaaggcccggcgctggctctgtggcccaccatctccactgtcccatttgcagccgccagctcccgcagtgcgcgctccgagaaaaggcagctctgggggacctgacaccgccaccaccgccgccgccacagcagcagcagcagcagctcacggcattcctgcagcagctccaggcgctcaaaccccccaggtgcgtggtgcgtgcgagccctcaggatacagggtgggggggggatgggggcagaccagagatggatttggggtcctaagaatccacaatttgctcctcagaggcggggaccagaacctgctcccgacgatgagccggtccttgtcggtgccagattcgggccgcctctgggacgtacatacctcagcctcatcacagtcaggtgtgtggcctgactggtccccacccccaaggcagtctccgggtgaaatggggtctggggtctgctccccacccccacacgcccctagctgccattctggctggggagcccactgctgcggctggactagatcagtgggcccaagtgcccacctgcagccgcctctgcccccctgccccctgcaggtggtgaggccagtctttgggacataccaattaactcttcgactcagggtccaattctagaacaactccagctgcaacataaagtgagtgggcatcctggggctgaggccctgggaatgaagggtggaccgaggcaggccccaggctgtcccctgcagctctcccctctgatgggccactggtctcagttccaggagcgcagagaagtggagctcagggcgaagcgggaggaagaggaacgcaagcgtcgagaggagaagcgccgccagcagcagcaggaggagcagaagcggcggcaggaggaggaagagctgtttcggcgcaagcacgtgggtgctcccaagcctcagctggctggggggacaaccctcgccaggtcccctcaccatgtccccctcttaggtgcggcagcaggagctattgctgaagttgctacagcagcagcaggcggtccctgtgccccccgcacccagctccccgcccccactctgggctggcctggccaagcaggggctgtccatgaagacgctcctggagttgcagctggagggcgagcggcagctgcacaaacagcccccacctcgggagccagctcgggcccaggcccccaaccaccgagtggtgagcaggccgggaacctcccgggctccccctacagtttccagggtggcacagggagggggatactgaacccagacttgtgcagccccagccccagtcccagcctctcctgtgatggcaacagctcttgtggccctcacctcacctgtctccctttgccacctaaacaagcctccccatccgcttttctggggtgcctttgtttgagccactctgatcttctgccatctgtagcagcttgggggcctgggcactgcccccctgaaccagtgggtgtctgaggctgggccactgtggggcgggccagacaagagtgggggcggcagcagcggcctggggctctgggaggacacccccaagagcggcgggagcctggtccgtggcctcggcctgaagaacagccggagcagcccatctctcaggtgggcgtggcacctggaggctccgggatggccctgagggggaaggtggcagacccccccaacccctgccagctgatttccaaccctgactcaccctcccccttcagtgactcatacagccacctatcgggtcggcccattcgcaaaaagacggaggaagaagagaagctgctgaagctgctgcagggcattcccaggccccaggacggcttcacccagtggtgcgagcagatgctgcacacgctgagcgccacgggcagcctggacggtgggcgagcggctcccaggaggtgggcgggacctgggtctccagacccggccagggggccctgacagccttcgctcatcctgcagtgcccatggctgtagcgatcctcaaggaggtggaatccccctatgatgtccacgattatatccgttcctgcctgggggacacgctggaagccaaagaatttgccaaacaattcctggagcggagggccaagcagaaagccagccagcagcggcagcagcagcaggtgaggcagccggcaccagcagctggggtgggcttgcctggtgcctcctgaccttcaccctcctctccgctgccttaggaggcatggctgagcagcgcctcgctgcagacggccttccaggccaaccacagcaccaaactcggccccggggagggcagcaaggccaagaggcgggcactgatgctgcactcagaccccagcatcctgggtgagctgggctggggcaggagcgggacttccttggcacagggcaggaggagcccaggagagagctcagacgcagcttctccccggcttcagggtactccctgcacggatcttctggtgagatcgagagcgtggatgactactgaccagcccggacccccagcccctgggctgtaggccagggcagccacagcggcgtggaccgagggtcccagcctgcaggctccccgcagagagcacaggaagaggcaggggcggggtccccagcacttgttacaaacacacgatgcaccttaactcacccaccacgaggcactttacagactgggggagggggtttttctttttattttttttttaattttaaacgactgaagaaaacattaggagaggcaaaaatattgttaaaaactagactctaaacaccccttcctgctgtgaggatagtgggtgtgacaatggaaggtccacagaggtttttgttttttggtttttttttttttttttaagaaaaaaagatgaaaaatgaaaaaaaaaatggttaggaggctgaaagaaaaaacacactgttattttggggcagtggggacacaggccccgtggacctgtcctgcctggcccccaaggccatacttaccccccagaaggcgggccatggggtaactggaagctgggggccagcagtttgcacaggaggcctgtctgagccccacccgccagacctgttgtgagcagctcctgtcactgaggctggctgaggtgtccggggtggggccaaagtagccccttggcttcgctgctttgggggacagttgcacaaattggacgagcggccccagctctctggctgccatcttgtgctggccgagtagacgggaggggccaagccgtgccaacctctctggctggcagggtggggcagcaggactctggctctggtgaggggcgtctcccactgctgccattttgggggacaccctgggtttgaacctgaaagccccagctctctgccttgccacgtgaatgtattctttgggccacaagcccccgcctcacccctgcctgagctgcctcacccctgtgagcggcgggggtggatgattgctccagaggctgcagagagaaggctgagctgtttctccagtgaagggggcaggaggaggggcctcaaaggcaaggagtgggtggctttgggcttagggttggagtagaggggctgccgcccggggccccaacctgtagccagctcgtaagatgtggaccacccagctctgcacctgacccttccgctgaccaaatgggagaggagcaggtggccttccgggtctgatatgatgcgctttttaccgttgggtaaggttggggtgaagagaagtgtgcggctcctgggtcagaggaggctgccccttctattgctcacccacttcttattcccggtcccctacttgggttcgtctccgcccattttgggttttgtaacagttttgtcttttgggtttctcatccagctcctcccattgacctcattgctcagagtgcagtattagggcaaggcttcgccactgcctccctccatgaatgtatttctccctcctgccctggggacatggggagtggcccgtttctttccccatctagtcccagaaagatggtgtttggttttctgttgttggattttttttttttttttttttttttgcaccaaagtggcaactaggtcagtgttgggggatcaagctggcctcggggtggggggcccccacctgcctctccctggttcccacagtgttagcgtccctgaaaagacaatattctctctaaagcaataaggggtgacgggccggggggagtgtttgctgctgctggcccccagctccccttccctcttgccaggtgtgggggagactcctgttgtgactgaatgtaacccccccacccctgccgcagccaatgcaggggaagggggacactcttcctgtctcttctccccagctaaagagactttggacttagggggcccatgagcctggagaggccttaaccctgtgaggaagtatagggggagccctctcccacccccatccccttctgagagtggtcaatgtttacaagcccctgagcccccctgcccagggactcagaccctgttgctgtccttccccggccccggtcttcctgggccctcgctgctcccctgcccttcctggggttggggtgggtgcaggggtcaccgtgttccctgtctgccttgtacccacagtctccccgccccctctccaccctgtgtgacttccctctcttttacctgctcctgtaaatactcccttctcccaataaaacttggtgtgtgttctcccgttccgcctccactgctcgttatctggggagagccatggggatgagtggctctgcacagagctgggaactaggagctctgagcagtgcccgcctggtcaggctggctctggtcagcagcctgacgggggaaaccatggtgagggctgcttatccgagaacctctggacggaaggctctgggctggggcttcagctttgctctgagggagagtggggaccccacccccagccccagctgcctggcaggccccataccttccccaccatccaccccctcagcagccctcaggcaacaaagtccagaaacaaggagaacacagcaagggcagagaccaggtacagagttggaattggctcctttatggaaaaactgaaaatataataaaaattaaaataaaaccagttttaaaaaagccagcccctggggtttccacctcctgcctccggccctccagaggggtgaggccccaaccccagggcagcagaaggatgagggcctcctgctcctcctcttcccccattccatccccttcttatctccacagtgggggccccgggaggaaccaaacctgggtgggagggcagggacccaaggccccgtggcccggggaagggggctgggattgcgccagccccgcagccctggcctgtagtgtgggcatgggcagggcccctcctggcctgggcccagtgggggtggggccattagttccagatcttgaggaaggagtcccaggagcccgtggccacagccatgccatcgtcggtgaccccgaggcagctcacgcggttgtcgtggccagcgaggactcctgtgaagaagagagaagtcagaacccattgggcctgggctccaggtccctgcccacccagcctgggccccagctgtcacctgcacggtcgcccttcatggcatcccagatgttgcagttgaagtcgtcgtagccagcgagcagcagccgtccgctgcgcgagaaggcaacagaggtgatgccacagatgatgttgtcatgggagtacatgaggagctcctgatcggcccgcaggtcgaagaggcggcacgtggcgtcgtcagagccggtggtgaaggcgtagccgttggggaagaactgcaggacacgggacccagatggggtgagggtgagggtgaggagcagggccgggagcctggtggggagggcctggcctagctcgccccaaaactcacagccactgcattgatgtcggattcatggccgatgaaggtctgtcggcacatggaatcccgcacgtcccacagcttgatagaggcatcacaggcgcctgacacaaacgtgcggccatcgggggccagggacagggacatcacatccccactgtgtccagcaaaacccactgtctgctggcctgtctcaatgtcccacagggcactggagaggtgacaggaagaaagaaaagataagagacagggcgaagaacagagtccctgttctccccgccccaccacgtgagcccaaccctgtggaagggtccagggaggctcttctcagagccttaggtggggaggggacgcatccctccctgacccccttagcgcccaccaggagagggaggctacggtgcatgctgcatgttgagcactgggacggtggcccctgaggcaggaagtgtgggtttgcccagactgcccagccctggcagagcctcaccaggtggtatccccagagctggtgatgatttggttgtcatccaggaagcggcaacacgacaggtaccctggggaaggagctggtcagccaggtctccacacggagggcagtgcaccccccaaccccaaaaagggcccgaactgggccaggcccctcaccagtgtggccaggcagctcccggctgaccctgacgttgccctcgcgggtcttgaggctgtagatggagcagatgttgtccaaccccccacaggccacaaagttccctgagggcgcgtaggcacaggtcattacccaggaggagcgcagcgggatggcgtggacctgcggagcaggggaagcgccggggtcagagccagccagggccctgtggccctgccccaccccgcagcccgcgccaccctaccttgttggtggtgtagctgtcccagatgatgagcttcccatcctgggaggcgctgaccagcagcctggtggggaacggtgtagggagagcagaagggtggcgtgaaaacaagacacacccccttccctttgggtgggagaaggtagggtctctctctgttgtgcaggctggagtgcagtggcaccatcacagctcactgcagcctggaactcctaggctcaagtgatcctcccacctcagcctcccccgcatagctgggactacaaggtgagcaccaccacacccagctcatttttcaatttttagtagagccagggtctcactatgttgcccaggctggtctcaaactcctgagctcaagtgatcctgccctggcctccccacgtgctgggattacaggcgtgagccacctgagagacagtctccagctgcagcccacaagttctcaccagcatggtcctgcctgtccaggtctggcggacatgtctgggagtcaccgtttttccagacgtacgctgggtattttggtggcctgcttactccgccagatctgaggctgctcccacggcctgctagaaagtcggcccacagcgccagcccgcgcacacacacacaccttgagtcggtcccccagtgcatggcatagatctttgccaggtgcccacggagggtcctccgggtcctcatctggattctccccactgggtccagcccagctgtgatctggaggtagagacagaatgcgctcggggaggcccaggcagcaggactgcagagggcagcggcctctgatccttgccccttcaacccctagttacgctctggccaccaagtgccctcacctgggtcagtgttgagtccccacatgcttttcgggcatcctgtaagggatggcagagccagagagacgcgagagaagacaggttggggaggaaagggagagaagagaacagaagacaggagtggacagggtcagattctgagccattaaggggccctccctcccccttcccccaccaacaccctcacccaacccggtccagggcaccgggcggtgtacacatgaatcgcccgccccgcaccaggccctcacccggatctggttccggagctgctcggcctcctgtctcagttgctccagctcactcatggcgccgggcccgtggggcagggttgggggcggctgggggccgcgggacgggggctgggggaggcagctcctggccgctggcccgaggcctgggggatgcagggctgacgtcaggcccgaggccgccggggaagtggggagaaaggcggggttgcagcgcggcccggaaggggtaagcaaggggagggggaaggggcggcgcggccgccgtccccgggcacaaccagggtctccggcaccagagacgtcgccgagtaagagccgacttccccaatcttcctcccgccccccggaaacggagcgggaagtgcaagaggaagcgcaggggaaacccctccctcggacacagcccgggcaggacacccgcggcaggaactggggcggggggggcgggggtgtcccttcgaaaacagacctggcttctgccccagcccgcacaggcaccgccctccaagcacctaattttaaaaggggcggtgcctcttgaaattcaccccacaaggcgcacaccctccacacacacccccagcttcgatggtggcgggtggggggagagaccagaggggaaagctgggctgttcgtggggttgcctaggcaaccgtcacccggaccgagagcacctcattggtgaaatgcccccaccctagccccgttgccaaggcaaccgcatccacggcagagacctgtagggtgggtgaccccacccccggccccatcgcccccgcccgacccagcctcccgccctccccagaaccggcccgggtggctgtttacaggatttgggaaaagccgattgggcgctaataggttctggacggctcaccccggataatccccggtccggctgcgccccattagccgtccgccgcgggtgggggtgacagcggcggggaaggcagccccgagccgctgctccctccagcgcagggaccgcccgccccgccgcgcccgcagaaagcccgtgggagccgctctcgagtaattacggctccgcaacgaggtccccggccccgaggcgcggaggtgctctctcccaggcgcgggcgggcggccccaggcggcctggccgcggcgccctggacacccggggggcccagcccgcaggctcggcgcccgggccccaggggcccggctggctccgctccgggagcctgagtccttccccgcccgcgggacacctgtgcgatccggccgtacacactgcacttggccggcccaggcgtcccccacccagctcccacttcccccaggcgcagggcgttcctcttccccactgacatttcccctccttgtaagttcagctttctacgccagtgccaaggggtgaccctcaaaatcgggggatggggggtgcgggcagaactccttactctacccaacccccaggcccgcacaaagcctcttccacctactagcagcccaggcctggcggcaccgccggaggcccagggcagaaggaagcacggctggaggaagaaactgggggcgggggcgacgttctcagccctcggtccccatcaccccccagggccctcagcagcccccagactctagggatatagcagccggcgctccatagagaaatgagggtgcaaccgcctccgcaggtctggcggggctcaggagagtgacgggagggtccctggatctggcagctggaaggcgcgggctggtgcggcgctgcgaagcgcagtgggcctggccctccagcccctacgacctccattttgcctaaaagaaagctgggcggggggcgggcgcctgggagctgggcttggggtgaggatctgtaaagggaatagggcgccgagggctccagtttcggcgagtggggccagaaaccacgggcagcacccaaatcgtgggtagggtggagacgaaaggaagggtggcgcgcggccttgcctgcttctccccgattttggagttgtgcaaggcgagggccggcaggggtgcgacagtggaggacacgaggggtgctccccgggggcaggcgggagggtggcggtggggaaagggggcggggcggggcctagaggaagcccggaatttagccccccaacttccgagggagcaagaggcagtcggggctgggctggggtctggggtcgggcaaaaacttcgctgatggtgcggggaagcgcacgcacggtggggggcgagggttccccagttccccttccgggtttgggagcgaccgggcaagaggggaagggagcggaggtctggggagttacgtccgctcccaggaggccagccccgggagaccgaaggaagagaggttcccctgggggaaattggggctggggggcgagaggactccttttgccagcgaaggtacctgtggcggtgggactctgcggcgggggtcgctggcggtgcgcgggcggcgctgtcttcctccgcggcggaggcggcggcggcggcggcggcggcggcggcggcgcggatggatttcctcagtggccccagccccgccgccagcgctgcctccccagagcggagggatcccgcccgccagtgacgcggctgccgccgccgcgcccaggacccggctgggcgagaccaactgcctcgcacttgggggaagccaggagacaaaaccccaccgagggagcaaagacgggcccagtcgctcccaaggttctcaccctacgctttgtggacgcaaaccgtactcaaagggtttgcttcacggaaaggagtaagacatcccccctctgggactggaggaggtggtactggcatatgaggagggtgagaccgctcgctggtcacgtgatcagcctcccgccccgcctggaatgggtggctccagactgggaaggggagttcgacgccccagttcccggttgggccacgccccggccctgaggaggccacgcccctcaccagggggcggagctaaagagacctggacggggccggcctcgaggctgctggaagaagaagcgcgattccgagaaagtccccgagccgggagtgggtaggggctgatgcgggcgccccgggaatgccatgagaagggtcgtgtccaggcatttcctcagcctcgcccactgggcctttgtagaccccctttcagggcttgccactgaaataacaactcatttattgagagccacactttttttttttgagacggagtctctctctgtcgcccaggctggagtgctatctcaactcactgcaacctccgccgcccgggtgcaagcgattctcctgcctcagcctcctgagtagctgggactacaggcgtgtgccaccacacccggctaattttttgtatttttagtagagacggggtttcacggtgttagccaggatggtctccatctcctgacctcgtgatctgcctgtctcggcctcccaaagtgctgggattacaggcgtgagccaccgcgcctggcccgacacttattttttaattggagtacagtgacgcgattgtaggtcactgccacctcaatctcctcggctcaagtgatcttcctgcctcagcctccctagtacctgggaccacaggcgtgccccagccaccatgcccagctaatttttaaatttttggtagaggtggggtcttgctatgctgcccaggctgacatatgttaagtctcacaatactgggaaattaagtgctaacattctccccattttcttttcttttcttttttttttttttggagacagggtctcactctgtcgcccaggctgaagtgcagtggcatgatctcggctcactgcaacctccgcctcctgggttcaggcgattctcctgcctcagcctctggagtaggtgggattacaggcgcccgccaccatgcccagctaatttttttttgtatttttagtagagacgaggtttcaccatgtcggccagcctggtctcaaactcctgacctcaggtgatgtgcccgtctcggcctcccaaagtgctgggattacaggcgtgagccaccgcgcccagccttctccccattttctaatagtggaaagagacctgaggctgcagagtttagatatgaacccaggcagccaaaactttactgtacattccagtttatctgtatgagcctctagatgaaccccttcctccagggaccttgcctgtaaagggacaagaacgtaggtctaggcctcagtttccacatctgttaaatggggatgttgacagcatctgccctccaagtcccggattcttactgagaaccccatcgattgtggaaatgctttgggaagttcaaggcaacgaatagccttcactgagtccttgtaatttgaaagtatcaaaacacgcagccataagaaagaacgagatggggctcacgcctgtaatcctagcactgtgagaggccgaggcgggtggatcacttgaggtcaggagtttgagacaagcctggccaatatggtgaaaccccgtctctgctaaaaatacaaacattagctgggcgtggtggcacacacctgtaatcccagctactcaggaggctgaggcaggagaattgcttgaacccgggaggcggaggttgcagtgagccaaaatcacaccactcactgcactccggcctgggcaacagagcaagactttgactcaagaagaagaaagaaagacaaaagaagaaaaagtaaaagaaagaaaaggagggaaggaagggaaggaaagaaaaaaagaaaggaaagagaaaggaagagagaaaaaagaagaaatcatgtcctttgcagcaacatggatgcagaaaagagagagagagagaaagagaaagaaaagagagaaggaaggaagggaaagaaagaaagaagaaacaaaagaaaagaaaagaagaagaaatcgtgtcctttgcagtaacatggatgcagctagaggcttttatcctaagtggataaatttctgcaggaacagaaaaccaaacactgcatgttctcacttataagtaggagctaaacactgggtactcatgaacataaagatgggaacaatagacacgggggattactagaggggggaagggttgaaaaactacctattgggtactgtaccccaggtgacgggatcaattgtaccccaaacttcagcatcacaagatatacccatgtacatgggtacattcatgtgcacatgagtcagaatctaaaaagatgaaattatattttaaaaagtatcaaaacatactcttcatttagtctctgtgaaagacattacaaatcacttttcaaaaacaattgttttttcttttttcttttttttttttttctgaaatggagtcttgctctgtcacccagagctggagtgcaatggcacaatctcggcttactgcaacctctgcctcttgggttcaagcgattctcctgtctcagcctcccgagtagctgggattataggagcatgccaccaggcctggctaatttttgcatttttagcagagatggggtttcatgttggccaggttggtcttgaactcctgacctcgtgatctgcccgcctcggcctcccaaagtgctgggattacagatgtcagccaccgtgcccagcctacaattgttttttccaaatcgaatatgttatgaacatagtagttgtctttgtaatgggtacacacactcacacacacagaatgatctgcctggtggggcagggaattgtaaacatgccaaagggaaaatgaaaaaagaatcctgtaggttttcattattttaggcaattatgtccatatcacttacaaagctattgccaaatctgtctaaggaagcagagtttgaaggtgggccgggggggacatctgggagaaattcgaaaatggcataacagagctctcaatatgagaaacaaaagcccaatatttttttaaagaaaatataaacaatcgtattcgtagttagatgcaaattctatttatgcatacctgccaattcagtgacatataagcaatagataacagatgtcaactacacatgagaatttgggagggacctcagagataattacgttgatttcctcaatctgtagatggccacgatgacttccctaaagtcacttaacaacaagcagcgcaggactacagcacaattttgtcaatctcaagagggcatgtgtgctgctttggtttctgtgctaataagctttcctgttttaactcattccgttgatatttactgaaccggatgatgtatcaggcactgccctaggcaatgaggatgcaaccttgaatgacaggtgcaccctcctcatggagcttgcaatctatagaggaggcagatgggcattgaaatatggattagggtcaggcgtggtggctcacacctgtaatcccagcattttgggaggcagaggtgggcggatcacttgagtccaggagttcaagaccagcctgggcaacatagcaagactacgtcgttaaaaaaaaaagagagagaaagaaagaaatacatggtggcgtgcgcctgtagtcccagctactcggaaggctgaggtgggaagatgacttgaactcctgaggcaaaggttgtggtgagctgaatttctgccaccgcactccagcctgggtgacagagccaggccctgtctcaaaacaaaacaaaacaaaacaaacaaacaaaaatgaaaaaataacagtgcttggcctggaggtattgtttacttcgagcagaacatttgagatggaacatattctgggaggaagatcaagagtttaagattgggaagttttaggtttgaagtgcctatggagaaaattttttttggtgtttttggttttgttttttttgagacagggtctcactctgtcaccaagactggagtgcagtggcgcaatcacagcttgctgcagcctcgacctcctgggctgagatgatcctctcacctcagcctccccagtagatggaactactggtgcacaccaccatgcctggctaattttttgtatttttttttgtagagacagggttttgtcatgttgcccaggctggtctcgaactcctggcctcaagcgatccgccagcctcagcctcccaaagtgctgggattaccggtgtgagccaccgcactcagccggatctcgctctgtcgcccaggctgtagtgcagtggcgcaatctcggcccactgcaacctctgcctcctgggttcaagtgattttcctgcctcagcctcctgagtagctgcgactacagatacgtgccaccaggcccggctaattttttgtatttttagtagagacggggtttcaccgtgttagcaaggatggtctcgatctccttacctcgtgatccacctgcctcagcctcccaaagtgctgggattacaggcgtgagccactgtgcccggcctctttttttgttttttttaacttttattttagattcacggggtacgtgtgcaggtttgttatatgggtaaattgtgtgacactgaggtttggaatacgattgatcccatcacccatgtaatgagcacggtacccaataggtagtttttctttttctttttttctttgagacagggtcttgctctgttgcccaggctggagtgcaatggcacgatctcagctcactgcaacctccgcctcctgggttcaagtggttcgtctgcctcagcctcccaagtagctaggattacaggtgtgcaccaccacacctggctaatttttgtattttaagtagagatggggtttcgccatgatagccaggctggtcttgaactcctggcctcaagtgatctacctgccttggcctcccaaagtgctgggattacaggcgtgagccaccatgcctggccccattaggtattaatagttttcaacccttgccccgtcttcttccttcttccccctagtggtccccagtgtctattgatgccgtctttatgtccatgagtacccaatgtttagctcctgtttacaagtgagaacatatggtatttggttttctgttcctgctctaaattcacttaagagaatggactccagctgcatccatgttgctgcaaaaaacatgtttctttgtttcttcattttgtttctttttatggctgcatagtattccataacatacatgtaccattttctttatccagtccaccattgatgggcacctaagctgagttcatgtctttgctcttgtgaatagtgctgcaaggaacatacgagtgcatatttctttctggtagaaggattttttttcttttgggtaaatacccagtaatgagattgctgggtcaaactgtagttctatttttagttctttgagaaatccaggagaaatgtttaataggtggctgtagacacagtcctggaattcagcagagaaatctgggttggaatagagccccaagagtgagtggcacattctagcagatgacgtcataaagaggtgcagggaaaagacaagatggcctaagaccaagctctgaggaactccgacatttagaggtcaggtggagaacaagttgccaaaggagaagccggcgaactaagaagaaaatcaggaggatgcggacttctggaacccaaaagaaaagagtgttccaaaaaaggaatgggaaactgtgctgaaggctgcagagacatgaagcaagcctgccctgagaagtgtgcagtggattgggtagaagccactgtagctctgcctacggcatttgcaatgggtgagtgagaaatgatgcagtggagaaaaacaacgtggaccagactttgggtatctcagcttggccggggaccatgtacaaagctggtgcagcagtgagaagaggaagtggaatcaagatagtcggggttttttaggccgggcgcggtggctcatgcctgtcatcccaacgtttttgggaggctgaggcaggaggatcgcttgaggtcaggagttcgagaccagcctgggcaacatggtgaaacctcatctctactaaaaatacaaaaaattagccaggcatggtggcgtgtgcctgtaatcccagctactcaggagggaggcgggagaattgctggaactcagattacagggagtcgagattgcaccactgcactccagcctgggcgacaagagcgaaactccatctaaaaaaaaaaaaaaaagatatgtatattttttaggctgggcgtggtggctcgtgcctgtcatcctagcattttgggaggctgaggcaagaggatcgcttgaggccagcttgcacaacacagcaagatctcatctctacaaaaaaaattgtagaaaccctgtctctacagaaaaattacatatatatatatatatattttttttttttttccttttgaaacagagtcttgctctgtcactcaggctggagtgcagtggtgctgcgatctcggttcactgcaactttcacttcccaggttcaagcaattctcctgcctcagcctcccaagtagctgggattacaggcatgtgccaccacgcccaactcattttgatatttttagtagagacagggtttcaccatgttggccaggctggtctcaaactccggacctcaggtgatccagtcgcctcagctccccaaagtgcttggattagaggcatgagccgccgcgcctggccgttatttgagttttgatgagagctactggagctaatttagatggtaatgaggagggcaggaggaaagagagaggaaaaagaagttggccagatgcaaggaaggacagagttgccaggtgatgaccaatgagtagccaacttatctgagcaggcaggaccctcgagagcaagtggcggatgtggctctgatgggtcacagggcctccttcctctacctcttctggcttcttagcatctcctcctcctcagggcactctgcaaacattgtttttcccagaatactgactttggcctcctctgctcactctccatgttattcattggtgacttcatccattactgtctccagcccagatgtctcttccccgtgtgccgacttggtgtacatccaatggctgactgaatatccccacttagatgcccgtggacagtggcatgctggcatccgctcatgccaggtcacgagtgcccattgtacacccagctccttattcagtgaaggcatcttggtagcagaaacttgaagagctgggcgcggtggctcacgcctgtaatcccggcagtttaggaggcccaggtaggtggatcacctgaggtcaacatggtgaaactccgtctctactaaaaaatacaaaaaaattagctgggcgtggtggcgggtgtctgtaatcccagctactcaagaggctaaggcaggagaaccgcttgaccccaagaggtggaggttgcagtaagccgagatagcgccattgcactctagcctgagtgacaagagcgaaactccatctcaaaaaaaataaaataaaataaaataagatagtaggaacttgaactcagccaaggtgtgactgtttacgtcatggacattggcaaatgcttccgatcagggctccccctttttgaagagctggttgttaggaatggtggctcaccaccaggagtttgagactagcctgggcaacacagcgagaccccatcttcaaaaaaaagattaaaaattatccaggtttggtggcatgcctgtagtcccagcaactcaggaggctgaggtgagaggactgcttgagcccagaagttggaggctgcagtaagctatgatcgcaccactgcactccagcctgagtgacagagcaacaccctgtctcaaaacaaacaaacaaaaaaccatttactacacaccactgttcacagacatttcacattcaacatattcaaaactaagttaatcatcttcccctgagcccaaccctgcccaaccttaccccttccctgaatatcctggcccagttgacagcaccagcacccactcagatatttcccatgccttccctccccatatccaaaggatggtcagttagggtataggcgaagcggctataacaaagaattccccaaaattcagtgacttaacctcaaaatagatactccaggactgtggggacatctctgccatcttttttttccttttgttttctttttgtttttgttttttttgagagggagtctcgctctgtcatccaggctggagtgcagtggtgcgatctcacctcactgcaacctccgcctcctgggttcaagtgattctcctgtctcagcccctgagtagctgggattacaggtgtgtgccaccacacccggctaagttttgtatttttagcagagacggcatttcaccatgttggccagactggtctcgaactcctgacctcaagtctgcccacctcgggctcccaaagtgctgggattacaggcatgagccacggcacccagctggtctctgccatcttaaacatgtggcttctatctctctgttccatggggcctaggcagaaatcaccatcatatctgaatgtgggaagggggttaaagcaggaagcacaggtcctttcctgattaaggacaccactaacctgctcagaagttgtccagatgcagctggacacagtggctcatgcctgtaatcccagtactttgggaggccagaagaaggtttgcttgaggtcaggagttcaagaccagcctggttaacatagcaagacccccatctctattatttaaatttctaataaaaaatgaattaaagtccgggcacggtggctcacacctgtaatcccagcactttgggaggccgaggcgggcggatcacgaggtcaggagttcgacaccagcccgaccaacatggtgaaaccctgtctctactaaaaataaaaaaaaaaaattaaccaggtgtggtggcacacacctgtaatcccagctactcaggaggctgaggcaggagaatggtgtgaacccgggaggtggagcttgcagtgagctgagattgcaccactgcactccagcctgggcaacagagtgagactccgtctcaaaattaattaattaattaatcaatcaatcaattaattaattaaaataaaaagttagtcagatgcaaggaaagctgggacatgtagtctctatccatgtacacagctaaaacattattaataaacaaagaaggcaatttaggaggccgaggcagggggattacttgagcccaggggttcgagaccagcctgggcaacgtagtgagaccctgtctctataaaaaataaaaaataataaaataggctgagcatggtgactcacacctgtaatctcagcactttgggggccgaaggagaaagattgcttgagctcaggaattcgaaaccagcctgggcaacatagtgagacttcatgtttgctaaagataaaaataaataaattaattaaccagatgtggtggctcatgcctgtagtcccagcaactcaggaggctgaggtgggagggtcccttgagcccaggggattgaggctgcagtgagctatgatcacacccctgcattccagcctgggtgacagagtgagaccctgtctcaaaaaataaaaataattgatgataacaataataaacaaagaagggcaatgggaaatggtataagagtagcagtctatgcctagtggatccatcatgtcaatgttatcgctctctctttttttttttttttttgacagcctcaacctcctgggctcaagtgatcctcttgcctcagcctcctgagtagctagaactacaagcacgcaccaccacgacaggctaattaaaaaaaaatttttttttctatagagatggggtctcgatatgttgcctagagtggtctccaacactggcctcaagtgatcctcctgcctcagcctcccaaagtgttgggattacaggcatgagccactgtgcccagcccaatgctatctcttgaatactgcttaaatccatcccttctacggtgtgccaattgctattaccttgattcctgcccatttcctggcctctaacttagtccctttctaatcaatctaccaaatggctgccagaggtatctttctaaaatgccaattgggtcaataaccctcctgttcaaaatcttgcagtagttcccaggggtttccaggagaagagtcaacttctttgcatgacacaaaggccaggtcttgtcccctcaactcagaaatgcctttcacccctcctccagctccacttccttgtctgccagaaaaacccaggccatttcctgggacttagtttaaatattgttttaaatgttgtttgtgccccactgcaatgctggctccattcctgttgaagcctttactggactgtgtatttctgggcacttgccatccatcctgggaccggggctccctgtgaagccaaggcacttggtttatctgacagaaggctgggtgaaggctgggtacagtggctcaggcctgtaatcccagcacctttcgaggctgaggcaggtggattgcttgaggtcaggagtttgagaccagcctgggcagcatggcaaaacctcatctctgcaaaaaatacaaaaatcaggccaggcacggtggctcacacctataatcccagcactttgggaggccaaggcaggcggatcacctgaggtcaggagttcgagacccgcctgggcaacatggcaaaaccctgtgtctactaaaaatccaaaaatttgccaggcgtggtggtgcgtgcctgtagtcccagccacttgggagtgagacagaagagtcacgtgaacctgggaggcagtggtggcagtgagccaagatcatgccattgcactccagtctgggcttcagagcaagactctgtctcaagaaaaaaaaaaaaccagttgggtgtagtggtgtgtgcctgtggtcccagctgctcgggagactgaagcaaaaggattgcttgactccgggagactgaggctgcaatgagctgtgatcacgccactgcactccagcctgagtgacagaacgaaatcctgtctcaagaaagaaaacaagggctgggtgtggtggctcacgcctgtaatccaagcactttgggaagccaaggtgggtgaatcacttgaggtcaggagttcaagaccagcctggccaacatggtgaaaccctgtctctactaaaaataaaaaaaaaattagctgggcgtggtggtgcatgcctgtaatcccagctactcaggaggctgaggcaggagaatcgcttgaatccaaaaggcggaggttgcagtaagctgatattgcgccacttcactccagcctgggcgacagagcgagactccttctcaaaggaaaaaaaaaaaaacagccagcttgggaaacatagcaagaccctgtttctaccaaaaacaaaaaaaaggccgggcgcggtggctcacacctgtaatcccagcactttgggaggctgaggcagttggatcatgaggtcatgagttgaagaccagcctggtcaagatggtaaaaccccatctccactaaaaatacaaaaactaaccaggcgtggtggcgggcgcctgtaatcccagctactcgggaggctgaggcagacaattgcttgaacccgggaagtaaaggctgcagtgagccaagatggcgctactgcactccagcctgggtgacagagcaagactccatctcaaaaaaaaaaggaaagaaagaaacaaaaataaacaaataaaaacggttgtaggcatgaacccattggttttatttttattttattttattttattttatttttaagagacagtgtctcactctgtcacccaggctgcaatggtgtgatcatagctcactgcagcctcgacctcatccagctggtcattaattacttcatctcatctcctcctgacactgacctctgtcagcggctcacatccaaccctccttctagactgaactcctatttccacatattccagaagttttcatgtccttagacctctgtccatgctgttctctttgtgggatatctttcccgctttcttcacctatgagcttctattcatccttcacggtttttgtttgtttgtttgtttttgagacgaagtttcactcttgttgcccaggctggaatgcaatggcacaatctcagctcactgcaacctctgcctcccaggttgaagtgattctcctgcctcagcctcccaggtagctgggactacaggcgcccaccaccacgcccagctaactttttgtatttttagtagagatggggtttcgccatattggccaggctggtcccaaacgcctgacctcaggtgatccacccgcctcagcctcccacagtgctgcgattacaggcctgagccactgtgcatgaactcatccttcacagtttagttccaacttcacttctagaagatttcctggattctcagcgacaggtaacccctccctcctccgggcatcttttttttttttttttaattgaggtggagtctcactctgtcacccaggctggagtgcagtggtgcaatctaggcccactgcaacctccgcctcccggttataatctattttcctgcctcagtctcctgagtagctgggataacaggcgcatgccaccacgcccagctaattttttgtatttttaatagagacggggtttcaccatattggtcaggctggccttcaactccttacctcaaatgatccactcgcctcggcctcccaaagtgctgggattacagacgtgagccactgcgcccggccctggcctccttttcacctctcttctgtgcgtatctgagctccccactgcaccaaagctccttgagagcaaggatatcccgtatgtcacccatctcagtatccctcctatgtctagcatggtgcctgccacacagtaggcatcaaagatgtttcttggccaggcacagggctcatgcttgtaatcccagcattttgggaggccaagacaggaggatctcgagcccgggagttcgaggctgcactgatccgtgaccataccactgcgctccagcctgagcaataaagcaagaccctgtctctttattttattttttgagacatggtcttgctctgctgcccaggctggagtgcagtagtatgatcatggctcactacagcctcaacctctcgggctcaagtgatcctctcacttcatcctcccaagtaactgggactacaggatcacaccaccatgcctggctaattttttagaaaactttttgtagagatgggttcttgatatgttgctcaagctggtttctaactccaaggttcaagccatcttcctgccttggtctcccaaagtgctgggtttataggcatgagccaccatgtccagcacttgtctcttaaaaaggaaaaaagggatatttgttgaatcaatgaatggataagtgaaatgtattaattgctttaccctaaccacttccataatacacagaatcttatgtcagatcccatgacaaaagaaaattggtcacagttgactggggttaaatcaagttctgccctgtagttagccaactgtagctttccccccagccatgagaagaaaattcactgcttattaccaaatagactgcaggtttccaacttaatgcataataatattaaggccttaaaacatccacagggacacttactgaatagtcctgtatgcccagctttcagccagacactgactccagaatcagatgggggcctcatcgccagctgtcctgtagatagagacagcacaacttggtgagaaacacagaggtgttaggaaacaaaggcatatctcaactgggtgataagagctgtgggttctaatcctggctctgatcccagcggactgtgtgatccaggacagagctcaggttctagctggaaaaaaaaaaaaaaaacaaaaaacaaaaaaaacctgtagaactcctacaggcacacaccagcatgcctggccagactggacaagtttccttttgtttttttattctttttagatggagtcttgctctgtcacccaggctggagtgcagtggtgtgatcttggctcactggctcactgcaacctccccctcctgggttcaagcgattctcctgcctcagcctcccgagtagctgggactacaggcgtgcaccaccacacccagttaatttttttatttttagtagagacaggatttcacaatgttggccaggctgctcttgaattcctcacctcaagtgttccacctgccttggcctcataaagtgctgggattaaaggtgtgagccaccattcccagccaagactggggaagtttcttttcttcttcatttttttttttttttttttttttggggagatggggtctgtttgttgcccaggctggtctcaaactcctggcctcaagcgatcctcccacctcagcctcccaaaatgccgggattataggcgtgagccaccacatgccctgcctgggcaagtttctaaatctgagatggttggggtggtggggaggaaagaagggatagtaggaattggcaaggtgaacttcagagtaagcgaggcaacatcattaaatgccaacaaaaggagagggataagatgaatataatcactttccaccccaacattcctttcatcctcacctcagcattttaaacgataagaaatgcaagcactcggctgggcatgctggctcacgcctgtaatcctagcactttgggaggcagaggtgggccgttcatttgagatcaggagtttgagaccagcctggccaacatggtgaaaccccgtctctactactactactactactaataataaaactagccaggagtggtggcacacacctataaccccagctacttgggaggctgaggcagaagaattgtttaaacccaggaggcagatgttgcagtgagttgagattgcgccattgcactccagcctgggcaacagagtgagactccagctcaaaaagaaaaaaagaaatgtaagcactttaagagatccactcaattcttccagacctcaatggactgacctagggtcactttggaaaaatctcactctcccagctcctgagtcggccctctcccctacagctcaccactcctgctgaaacctggaccctttcagtcttagaagccaagtctgaacttggaaccaaccctaggcattgaaatgccaccgtcgtcagtaggtaatccatgagccagctaaagccatctgtcctttggccggggaggggtggagtctcttccagggtgggcatgtggtgagcagagaaccttcaggggcacgcggacctcacatagtatccacttcctgtgctatctctggtctcaaagctccctcgcccccaaacaagtagatgggcatagtcaacacacacaagcattcagatgtgcatatgtacacacatgcacccatatgccaacacacatagacacatacatacagacacacacacaccctcacataagagtccctcacctaccccaagttgtcagagctgctcctttgcctttgctaccaaaactgtggtactgggagcccagaagaacctgggatccaagcagtagaaaaccctgttgttagccaggcgctgtggctgacacctgtaatcccagtgactgaggaagccaaagtgggaggatcacttgaggccaggagttcgagaccagactgggcaacatagttttttcttaaaaaaaaaaaaaaaaaaaaaaaagccaggtgtggtggtgtgcacctgtaagtcccagctactcaggaggctgaggcgagaggatcacttgaacccaggagttcaaggttacagtgagctataagtgtgccactgcactccagcctgggtgacggaagaccctaactcaaaaagaaaagaaacaaaaaccctcttgttgataaatgcctcctcaggagaacaggcgctgaagagagacagatggagaaaggaagctaaagccagatgggctgaatgcctgtgtgtgaacgtatgtacacatgtgtaagcatgtgtacacatgtataaggcctaggtactgcggggggtgggggggaaagcaaggcaaggaaaaaaggggccaacgaaagacaaaggagggaagttggacacggtggctcatgcttttaatcccagcactttgggactttgaggccaggagttcaagaccagcctgggcaaggtagcaagacccagtctcttaaaaaaaaaaaaaaggtaaaaacagagagagatggagacacaccccctttggtccctctctcaatcttcccttccctccctctcccggtgattccatttagaccttggtgattccatttaggcctgggtgtggcagaaccgggctcagagcagcctgaagatagataacccttctgggaactggacctctctccccaatcctgctttaaaaagtaagggggtagaggtcgggcgcagtggctcacgcctgtaattctggcatttcgagaggctgaggtgggaggatcgcttgaggccaggacttcgagatcaacctgggcaaaagagcaagaccccgtctctataaaaaatttttttttaatccaggcgtgctggcacctgcctgtaatcccagctacttgggaggctgaggaggatcgcttgagctcaggagttcgagaccagcctgggcaacatcacaagacctccgtctctaccataaaaataaaaataaaaataaaaagcaaggggatagggacctcatcagtcgtcctgcagagtcctggtctccgcctcttccctgctctcctctctgccgccagttccttagcgacggtctctaagtccctgctaggtgccccctgccccatctcctcctggccgcttaatagagtgtatcttcccctttaaagcagctgcccccggtcggtcattgtctcgcctggcagccaatcggcggcgccgttggagcgggggatccggcctcccaattggccgctgagagtcccgccccgccagggatcccgggagctgtccggccgcctcggtgctgatcccgccaccgcccacgggccgctagcagcgcagcgggcactatgagcgggggcgtctacggcggaggtgagcgagcctcgggcccccggctcccgcagccctgcgttccaaacccgcgccatccatccgagctctgggcaccccggggcctgtcacctccgcgcacgagcgggtcgagtctcaggctcgggtctcccgccacccctgcgctcggtcctccccagacgccccgcgcgcacagggccctaccttgcaacccacctccacctggccccgggccccttcctttcccgtcgggagggtgccctgagcaaggccattgggcaagaagggaccctggcggtgtgatgcccccacccccagtcccaggacctcggactccaggcccagctcccaccggccccagactggtgttgaaagtggcgagactgtggctctgccctgactttctctcggagctacctagcgggagagagttcgggggaggtccccttacaggcctgtctccccgcacagatgaggtgggggcgctggtctttgacattggctccttctcagtccgcgctgggtacgctggggaggactgtcccaaggtgagccttccagtctcctctccaaatcctaggggcttcggacccttcttcaggctttccagtgacccagggctctcccagatcgcccagaagctctgctgagcgggaatatgggaataaacccaggggcggtctgaggaccctgctgtggggctggacaggggcaagagggtgacctctctccctgccaatactcccccaacccttccccaccaggctgacttccccaccacagtggggctgctggccgcggaggaggggggcgggctggagctggagggggacaaagagaagaaagggaagatcttccacatcgacaccaatgccctgcacgtgcctcgggatggagcggaggtcatgtcgcccctcaagaatggcatgagtaaggggcccccacccatcacctcctgacagaaaaggagcccgctccccacaatctgggtcatagcagcccccactccccgcggagtcttccttgcagccccagggttcttctggctgccagggttcttctcgctgggttcccttcccaggggcccaccaggtttctgggaaggggggcgttcccctggagctggactcactgaccctcctttgggcttggcctttctccctccttttcttcctgtccctgtcccctgcctgccttcttgcgtctctgcacgctgctcttctggccccagtcgaggactgggagtgcttccgagccatcctggatcacacctacagcaaacacgtcaagtctgagccaaacctgcacccagtgctcatgtccgaggctccggtgagtgcctcctccatcctcatgtccaaccctgatctccactgcacctccttcccaccatccacctctcctcctctcccctcaagccactgctctgagccacttcccttcccttttcagactcccctcacccatcccaaacaatttccttccttcttggctaagtctccatccctcctgctctcttcttgctctatgcactctgctgcccttctctgtctccaagtcctttttaaattttttttttttgacacagtctcactccgtcacccaggctggagtgcaatggtgagatctcagcctctgcctcccgacatcaaaggaatctcctgcctcagcctcctgagtatctgggattacaggcacccgccaccacgcctggctaattttttgtatttttagtagacagggggtttcgccttgttggccaggctggtctcgaactcctgacctcaggtgatccacccgccttggcctcccaaagtgttgggattacaggcatgaggcaccacgcccagcctccaagtccttttttgaccttttcacttattattattattatttttattattatggtcaactttggtgagctggggatgttggctcacacctgtaatcccaacactttgggaagccaaggcaggaggatcacttgagcccaggagtttgagaccaccctaggcaatatggcaagacccgtctcttttattaaaacaataaaaattaaaaattttttgccgggtgtggtggctcacgcctgtaatcccagcactttgggaggccgaggcgggtggatcacgaggtcaagagatcaagaccatcctggataacacggtgaaaccccatctctactaaaaatacaaaaaattagccaggcatggtggcgggcacctgtagtcccagctactcgggaggctgaggcaggagaatggcgtgaacccgggaggcggagcttgcagtgagctgagatcgcaccaatgcactccagcctgggcaacagagcgagactctgtctcaaaaaaaaaaaaaatttaaaacctcatttaaaaaaatgttcttacccacctccttataaattcctctttataaaagcaactgtttttctcctttttagctaatgttgggggtattttcttccatatctctaatactacacttaaattgctgcctgtggagtgtttagttttaggtattatcgctgaattttccactttagaaaatgatcgcttagctctcttttcctccccagcctatgccacacgtatttcttatcaccctcctttaagtacagtgggttttgttgttgttgttgttgttgtttggggttttgtttgttgtttgtttttgagactttgcctcaaaaacagggggtctgctcagtttgtcacccaggttggattgcagtggcacaattcttcagccttggtctcctgggctcaagtgatcctctcatttcagtctccagagtagctggaactacaggcataagccaccatgcccagctgatttttaaattttttttagagacagggtttcatcatgttgtccaggctggtcttgaattcctgggctcaagcaatctgcccgcctcggcctcccaaaaggctgggattacaggcgagatccaccacacccagcccagttgtattttagactttaaaagaaatcagtattcagtatttacattctttttaaattagaaataattttaagagaatcttttgcagagatggggtctcatcatattgcccaggctggcttcaaactcctgtgcttaagcgatccttctacttcagctaacaaagtgctgggattacaggcatgagtcactgtgctcagcccaatatttacactcctattactatgtatgctaatcaggcctgagacaggcaatacaccatgatcacctttcctttcttgtgcaactttttgttttcctagaactggaaaaaaaatgtgttcaagttctttttttttttttttttttttttttttttttgagacggagttttgctctgtcaccaggctggagtgcagtggtgcgatctcagctcactgcaagctccgcctcccgggttcaagtgattctcctgcctcagcctcctgagtagctgggactacaggtgcgtgccaccacgcccagctaatttttgtatttttagtagagacggggtttcaccatgttggccgggatggtctcgatctcttgacctcgtgatccaccgaccttggcctcccaaagtgctgggattacaggcgtaagccaccatcccagccctgtgtttgattatatttggtctggttttctatctacttaacagtgtgaaccctaaatcattcatcaattgtatcttttgtcaagacgtcaattccattagatattttatcaatttctttttttttttttttttgagacatagtcttgctctgttgcccaggctggagtgccatggcgcgatctcggctcactgcaagctccacctcctgggttctcctgcctcagcctcccgagtagctgggactacaggtgcccaccaccacatccgactaattttttgtatttttttttttttttttgagatggagtctcactctgttgcccaggctggagtgcagtggtgcgatctcggctcactgaaagctccatttctcctgcctcagcctcccaagtagctgggactcacaccattctcctgcctcggcctcccaagtagctgggactataggcacccaccaccacgcccggctaattttttgtatttttagtagaggcggggtttcaccgtgttagccaggatggtctccatctcctgacctcgcgatccgccggcctcggcctcccaaagtgctgggattacaggcgtgagccaccacacctggcctctcatcaatttcatttcttgaagaaatttcttcaggagcccactgacctggtccagtttgcactagtagccctctgccaggggacagacctgtcatgctggcatcttccttcaccatcatcttgtagaatccttttgcctctgtcctggttagaagtcctgtttcctgtacttgactccttttcttgacttattcctttgttttcatggagcaggtccttcagtaactgccttagaaaggtcatgagaggccagagacagtcgctcactcctgtaatcccagcactttgggaggccttgagtccaggagtttgagaccagcctgggcaatatactgataccttatctctaccaaaaatataaaaattagctggccatggtggtgcatgcttgtagtaccagctactcggaaggctgaggcaagagaattgcttgtacccaggaggcagagattgcagtcagcctagatcatgccactgaactccagcctgggcgacagagtgagactccatttaaaaaaataattaattaaataataatctaaaaaaaaacttttttttttttttgagatgaagtgtcactcttgtcccccaggctggagtgcaatggcgtgatcttggctcactgcaacctccgcttcccgggttcaaggattctcctgcctcagcatcccaagtagctgggattacaggcacctcccatcacacctggctaatttttgtatttttagtagagacggggtttcaccatgttggccaggctggtctcaaactcctgacctcaggtgatctgcccgccttggcctcccaaagcgctgggattacaggcatgagccaccgcgcccagcatctaaaaaaaaaatttaaaataaggtcatgggaagtatattttttgagactttgtgtgtctcaccttgagttgatagcttagctaggtatcccatgccaggttagaaatcattattcttcagaatcttgaaggcacttttccattgtccttcttccagcatatatcgttgccatttagaaggatgaaaccatctgatttctgatcctctgatgtaatgtttttctttctgaaagtttatagaatttttactttatcctcagtgtggtgtattttcattcatggctctaggcacttagtatgtctcttcattctgaaaacatatgtctttcaattcagtgaaaaagaattatttatttaattatttatttctctccattttctctcttgggattttctgttattggattttgttgccccctgaattggtcccctaatttaattcccttttctcttatattttccatctctttacctttttcctttggtttccaagatattccctccactttatgttccaatccttctattgagtttttcatttctgttcatgtagttttaattcccacaagctccttactttaaattttttttttaatgagacagcatctcactatgttgtccaggctagtttcgaactcctgggttcaagcaatcctcctgcctcggcctcccaaagtgctgggattataggcgtaagccaccctgtctggcctgtgcaaatgttttaaatgcatgtgtgtgtgactgtgagtgtgaatatatgtgtatgtgtgtgtgtgagtttgtgtgtgaatgtgagtatatatgtgtttgaccgtgtgtttgtgagtgtgtttgcatgtgtgaccgtgagtgtatgtatagtgtgaatgcatgtgtgtgtttatgtgtgtctgtgaatgtgagtgtatgtgtgtgtgtttgagtgtatgtgtgtgtgtgtgcaagtgaatgcatgtgtgtatgaccgtgagtgtatgtgtgagtgtttaggttgtgtatgtgtgtgcaagtgtttggatgtgtgtgtgtgaccgtgagtgtatgtgtgagtgagtgggttgcgtgtgcgtggatgtgggtctgtgcctctcccttcctgaatcctccccctctgcactttctccacagtggaacacacgggccaagcgggagaagctgacagagctgatgttcgagcagtacaacattcctgccttcttcttatgcaagacggctgtgctcaccgcgtatcctctggactgagctgctctgactgggtggagggctggggtggggcctgtgctgagctcagctgtgatgagctggagggtcaggcctggttctctgaagatcagtgtcccaatgggcagacacctccctctgccccactagtgcagaaggcccagtggactgagcacctccgactctggggtggccagatcagcggcccctttcggttccccggatcaggctgagcagacagtgagctgggcccgggagagagtaggggctggaactggacagaggagggagacgtgtagaacactgcggcagtcccttcccaagaactccttcaacactgactgtttttaggatctgccttgcattgaaccctgtgctatgcactggggtgatagcgaccctaatttcagggaatctgtaggacacaaccaaaaataaaggggctggccaggcgcggtggctcacgcctgtaatcccagcattttgggaggccaaggcgggcagatcacttgaggtcaggagttagagaccagtccggccaacatggcaaaagcccgtgtctactaaaaatggaaaaattagccaggcatagtggtgggcacctgtagtcccagctacttgggaggctgaggcaggagaatctcttgaacccaggaggcagaggttgcagtgagctattgcattccagcctgggcgacaaaacgaaactcagtttcaaaaaaaaaaaaataactaaagaagtaactggggtcgccgggtgtggtggctcatgcctgtaatcccggcactttgggaggccgaggcgggcagatcacgaggtcaggagatcgagaccatcctggctaacacggtgaaatcccatctctactaaaaatacgaaaaattggccgggcgtggtggcaggcacctgtagtcccagctactcgggaggctgaggcaggagaatggcatgaacccgggaggcggagcttgcagtgagctgagattgcgccactgcactccagcctgggagacagcaagactccatctcaaaaaaaaaaaaaaagaagtaactggggtctcagagcctttctccaggagatgagtcatcaccagggggagagatttgcagactggggatgggctggaccccggtagagcagagagtgaccagacaagatctgggcccaggcccctcacttgctgctgctgtctctttgacttacccatccgatgccagctttgcaaacgggcggtccactggcctcgtgctggacagtggagccacccacaccacggccattccagtacatgacggctacgttctgcagcaaggtggggcttcggcagggggtgggggtgctccaggaggaccaggtcctgacagtgccttccttctaggcatcgtcaagtcccctctggcaggggacttcatctccatgcagtgccgggagctgttccaggagatggccattgacatcatcccaccttacatgatcgcagccaaggtggggcctctggggacatggagctgccactagagtcctggccactcgccccatggccgtcaaccctctgacacatgagatatcagagcagagagcagcaggctccccagtgggtcctggctccagttcctccttttataatcgaggcatccgaaatccagacaggctgagggatatgctgaggtcatgaaaccagctggcagacagcaggatgtgtgagggccagtgtggtgggttctagggtccaatatagacccaggttcaagttctgcctctgccgtgcaagagctgcaggaccggtcaggcatggtggctcacacctgtaatcccagcacttcgggaggctgaggcaggcagatcgctttgagctcacttcgagaccagcctgggcaacatggtgaagccacgtctctactaaaactgcaagaactagccaagcatggtggtgcatgcctgtagtcccagctacttgggaggctgagactggagaatcacctgaaccccggaggcagaggttgcagtgagccgagatcgcgccactgcactccagcctgggcgaccgagtgagactccatctgaaaaaaaaaaaaaaaaagagctgtgtgaccaacagcatgatatcaaagctccctgggcctcaggtttgtcttatgtaaagtggaacggcagtaggcagtagccagggtgctgtgagtatgaagtgacactgtgtgcttagctccattccgtgccctcacatggatcatgaccccctaggaggccattcccttgaggttctgtcactgctgtattcctggtgttctccagatcagctgcacccaccgcatgaaaggcacacatggagagagaggcatgccccattctctctcctctccatcagggaagggtgagaaacccctcttgcaggcagcacagcagagcctgcagcgccaggtagctgcagagctgggaacagtgccaggaaggtgggggtgggggtcaggtgggctaggaaagggtgttcctacactgtgcccccacaggagcctgtccgggagggtgcccccccaaactggaagaagaaggagaagctaccccaggtctccaagtcctggcataactacatgtgtaatgtgagcctctggagagggccacctgaaacccccctcccctgccatgaatcgggggcgggacagaggccccgcatgggagggggagcagggagggggagcggggcagggggtgctgctcacggggaaggcaggccctcaccacctccgctgggatttcaggaggtgatccaggacttccaggcctccgtgctgcaggtctcagactccccctacgatgaacagtgagtgtggctcagggctttggggtgggagagagggcagaaccggcactcttggggtgggctggggggctctggtgctgcccacgcactgatccttcttgagcaccccaggcagagtcctgctcccttctgggtagggtggctgcacaaatgcccacagtgcactacgagatgcccaatggctacaatacagactacggcgccgagcgactccgcatccctgagggcctgtttgatccctcgaacgtcaaggtttggctgtgtggcgaggactggggtgggtgctggctgcagtccctggatcctggggcgtgggggaggctgggaaggattgcaggggtctggggggaagggggagagagcccacagccccagtcacctctctctgcagggcctgtcggggaacaccatgttgggtgtgggccacgtggtgaccaccagcatcggcatgtgtgacattgatattcgcccggtgaggccaggccggagctgaggctcggcaaaggggcccaggggaagtggggagacggggttggggggctgcccccgcagctcactccttctccctgctctcagggcctgtacgggagtgtcattgtcaccggcgggaacacactgctgcagggcttcactgacaggctcaatcgagagctttcccagaagaccccaccggtaggagcccacccctgacccagagccctggacacccgtcctggctcagctgtccaggactgagtcccttcatccttcccatgtccttccttctgttctggccaccagagcagaacccctgcccctgtggcttcccaagtcttcccctctcccccaagccctgtcccttcccagaacctaggtgtctgcttcccccagcccctttttacccccagagcatgcgactgaaactcattgccagcaacagcaccatggagcgcaagttcagcccctggatcgggggttccatcctggcctcactggtgagaggaaagggacctggcctagcactgactgtgggggagaggggagacccagacagtgcccgccactttgactgcctcttcgttcattcattcattcaacaaacatttagttttgagaaatgtcagtcaatgaatgttcccagaagggtgaacaggacacaaatcggggggcaggggcccggtatggtggcccacacctgtcatcccagcactttgggtggctgaagtggggggatggcttgaggctaggagttgaaaacccagcaggggaacatagcaagacccatctctacttttacaaactggggagaagaggctgcgcacagtggctcatgccggtaatccctgcagtttgggaggccgagacgggtggatcacttgagctcaggagttcgagaccagcctggccaacatgacgaaaccttgtctctactaaaaatccaaaaattagccaggcatggtggtgcatgcctgtaatcccagctattcaggaggctgaggcaggagaatctcttgaacccaggagacggagactgcagtgagctgagatcgtgccactgcactccagcctgggtgacgcagtaagactctcaaaaaaaaaaaaaaattgggagtagagggacaggtagttggagagattggtcaggatgagattttggtgatacacccactgtgctcagtcagcagaggggagaccctgatgttttggggcaagggagtgatgtggcaatgcaggcatgattggaaagactgccaggcatgagtctttggggtcggggtatgagctggggtcaaggggaccttacaaggaggctgttttgattgtcccggagtcatagcatgggtagcagtggggatggggtggacagcaaggggcaactagtaaaggaggcaggcaggttggttctggggcaggaggtggtaagttcagtctggacctgctgctgggttcgaaggaaggtactgagcagggagctggagttgcaacccgcatctggagggtatcagtcacacagaggggacagtggggccatgacagacaaggaggacatccacgagaaaggaagtcccccagggagacagaaaccagggtcagaaagacagaggctggcagtctgaacttagctcagggctgaagcatgtcagccacacagttcttgtttttttcctttttttgtttttgtttttgttttcgagacagtctcactgtcgcccaggctggagtgcagtggagcaatcttggctcactgcaacctccatctcctgggttcaagcgattcttctgcctcagcctcccgagtagctgggattacatgcgtgagccaccacgcctggctaatttttggattgttaatagagatggggtttcaccgtgttggctaagcttgtctcaaactcctgacctcaagtgatctgcccatcttggcctcccaaagtgctgggattacaggtgtgagccaccatgcccggcctgaaattaagtattaataatatatcctggacaagtggagtggctcacacctgtaatcccagcactttgagaggccaaggcgggaggatcatttgagcccaaaatttctagaccagcctgggcaacaaagcgagacctcatctctacaaaaaatttaaaaagcaactggcaatgtggcgcatacctgtagtcccacctacttgggaggccaaggttggaggatcactggaacctggaaggttgaggctgcagtgagctgtgccactgcattccaacctgggtgacagagcaagatcctgtctcaaaaaaaacccaaaaaaattgggtgtgtattttccacttagagcacgtctcaatttggaccagggctggtgagctacaggaagctagtggccactgcattggacagcacatgtgtgtaggctgagaaagatcaaagaagcccagccgtggtagctcacgcctgtaatcccaacattatgggaggctgaggtggaacgattacttgagcccaggagtttgagaccaggctgggcaacatagtgagacaccatctctacaaaaaataaaaattaggctgggcgcggtggctcacgcttgtaatcccagcactttgggaggccgaggcgggcggatcatctgaggtcaggagtttgagaccagcttggccaacatggcgaaaccctgtctctactaaaaatacaaaaattagccgggcgtgttggcacgcgcctgtaatcccagctacccagcaggctgaagcaggagaatcgctggaacctgggaggcggaggctgcagtgagccaagatcgcaccactgcattccagcctgggcgacagagcaagactccatctcaaaaaaataaaataaaaataaaaataattaaaattaaaattttaaaaaaatagagagaagggacactctgagatgctcattgcaggaaccctcaaggggcaagttgtaatgccgaaggctgcagatggggtgccacagtgttggaatggtgaggtggagggaatatcttccttgggaaagagggagactggcggtgttccaaagccctgatggagtgagaagaggacacctggtggggaaggactgtgtgtgtgtagggggtgttgagtgccaggtgcaggttgcctggcctggggctgtgcgtgccatccccccagctcaggaacagggcctagctcagggcagagactgctgttcaataatacttgttgaatgaatgaattattgattgaatgatatgaagaggatactctccctctgaatatgaaaggggacagaccgaggaggggaggatgaggtggggaggggcttcagagggatgtgaacccaaggggtggttggggcctgttggaggattcccaggggctgcacctgcctgtccacacctccctccaaggccaccctgaccctgatattaccccctccacccagggcactttccagcagatgtggatctccaagcaggaatatgaggagggcgggaagcagtgcgtggagcgaaagtgcccctgatggcactcctccccacacacctgctcccaagctcagatggaagtcccttaacccccatgccacattgcccccctcctcctttccctcttgtcctcataaatggtgatgtttctgggttgaaagaagtaaaaatgttttaagaaaaaaaagtttggcctccgtggggtggggagtgggcacaggggtctggagggaggtgaggggagggagtctcacttctacacccatgccgatcccacagtgggtgctgggacacagccccaggggccatggattcctcaggtttcctaggggttgtgacccagggagggccacatgacgaggaccgggggttgggggagttgctgggggctaacagttgtggtgggaggtgggaggggctgcagggtgcagtggaggggcacggcctggggtgagtgtggcaggaggtgggtggagcaggaggtgaagcctggatgggcggaacaggaggtggggcctggtgggcggggcctcagcgtaggccttaggtctcaggggagcagcacgcctgagcaccccaggacctgcgctcaggtgagatgcgctatgccctccttcctggggctcttggtggtgacagacatggggcggggactagggcgctggtgcatcccagcagctcggaacttctctggacctgagtaggagctgatgttccccaggggaaacccgaaagggaaacttggtgggaccctgagccctcctcttcagagctacttgtcttggggccctcggaagggtttggggacctgcgccccctgcctgtttagcagtttatgcctgtgacatgtttctggggtgaggctaactggcctttcatcagcctcagaacccaaagaggtagaaacccatgtgatccaagtccttcggtgaccaaacgggccggtgcccagggaggaccatgacttgtccagggtcacccagctctgcccacaccttggcggggactctgatcactcctccccactgacccacatatccctgaccccaggacccctatctgggagctctcgctggtctcatctgaccatgtgctcccacctgtgcccctccttctccagcagccagcaggagtctgagaacgacctttcaaaagagacacacatgcacaccaccagaccagacccccaagtcacaccactgtggtgcctccagcttagaatgccactggggcaagtgtcaggacagggaggacagctgatatgtcacaggaccggggcactgggggactctgaaggccagatgaggaaggggcagatgtcttaggggtgaatcttccacctgggcatggcggggcttaggaaggggtccccaggatccagggaggggtaaaagcaggagaggggagggggcacccatgtctctgccctcccccactatcggcccccttcccccacccctgatgggaactaggaggccaaagtccgccccaaggtcaaaaaattgattgttttgcagggaggaggcaggcgtggggctgtggagagattggcaggggagagcacagccccttgtgctctggcctggacccgggggccacgtctggaaggctggactgaggccaggactgtgcccccacccttgggggtggtgaggagcagccttggttcaggctgcctgccaggactgataaggggccctcctagggctcccacaaacggtttatcggtttatcgctgggggacagcctgcaggcttcaggaggggacacaagcatggagcggctttggggtctattccagagagcggtaagactagtgggattgggaagaccccttaggccttctctctaagtccctcagccccctcccaagcccctgaggctggcccctcctggaccgtgtcctgacctcgcttcttcccacccctgcccctcccccacgcccccaccaccatgctcatttgacacccccaagtcactgacctcattattgccagatgcctccccaccccccaggcctcttgccccaatctcatgcccacctcgcctgcacagcaacaactgtccccaagatcctctcagaccgtctaccagcgtgtggaaggcccccggaaagggcacctggaggaggaagaggaagacggggaggagggggcggagacattggcccacttctgccccatggagctgaggggccctgagcccctgggctctagacccaggcagccaaacctcattccctgggcggcagcaggacggagggctgccccctacctggtcctgacggccctgctgatcttcactgggggtgagagccgtccccctccccagaagtgaagggcttgggctgggggagatttctggggtccagaggtgggcataaagagaatccccatcttgccacccgccagccttcctactgggctacgtcgccttccgagggtcctgccaggcgtgcggagactctgtgttggtggtcagtgaggatgtcaactatgagcctgacctggatttccaccagggcagactctactggagcgacctccaggccatgttcctgcagttcctgggggaggggcgcctggaggacaccatcaggtagggatggccctgccccatcctgttctcgagtgtccctcccctcatccgctcagactgggcctccctgcctcctggcccaggcctctggtgtctgggtccccctcctgagtcctcccatctgccttcctggcccccctgttcagcggtcctgggaaggatggcaggcattcggagctgaggttccaggggactgaggctctgagggtggcatatttgggaggtgagggagctgactgtctgagatcagaggggtgcagcatccagtatcagactggacagacccagaaaagccttgaatgcctcacccaggcgcctagatttggagcagggagcgctgaggggttctgagaagccgcattctagggaatcagaaaaccaagcaagcaagcctgggcaatacgatgaaaccccgtctctaccaaagaaaacacaaaaattagctggggatgatggcgagtgcctgtagtcccagttacttgggagcttgacgggggaggattgcctgagccggggaggcggaggttgcagtgagccgagattatgccactgcactccagcctgggagacagagcgagaccctgtttcaaaaacaaaataacggcagggtgcggtggctcaggcctgtaatcccagcactttgggaggcggaggcgggcagatcactaggtcaggatatcgagaccatcttggctaacacggtgaaaccccgtctgtactaaaaacacaaaatattagccgggcatggtggcgggcgcctctagtcccagctattcgggaggctgaggcaggagaatggcttgaacccaggaggtggagcatgcattgagccgagatcacgccactgcacttcagcctgggcaacagagcgagactccatctcaaaaaaaaaaaaaaaagaaaagaaaaaaagaaaaacaagtaagcaaatgcatttgtgggtgcagatccagaagctaggtccacccatagccctcttttgggacgggagtaatttttcagtggattcgcctgggttttctaagtaggtaatcagctaagctacagatagtaggagatggagattctcttttccaatgcttataccttctacgtttttttttttttcatttctcattgcatttgagaggacatgaatttaaggtaaccgtggcagtaggtatccttgcctatttcctgactttaatagcaatgcttttataatactttgccattgacaatgaactttgctgtgctccagacagctttttaaaattgaattaaggaagtttcctttcactcctagctcactgagacttttattgattgattgattttttgagacggagtctccctcttatcacccaggctggagtgcagtggtgcaatcttggctcactgcagcctccgcctcccaggttcacgcgattctcatgcctcagcctcctgagtagctgggattacaggtgtgtgccatcacgcttgattaatttttgtattttttagtagagacagggttttgccatgttgcccaggttggtctccaactcgtaagctcaagcgatctgccaaagcgcttcggcttcccaaagtgctgggattacaggcatgagccacagcacccagcctcttctttaatgtttatatagtaatttgtgttaatagatttccttatcttcctgagctcaacgctaaccttgatcaaggtgtatgattactcttttgatatgttgctgggttcacctgctgaaagaccttgagtctgtggaatcaacaatgttcagggctttatttttttgagatagggcctcactgtcacccagacagtgccgagatgatagctcactgcagcctccaactcctggacccaagtgatcctcccaccttagcctttcaagtagctaggactacagatgtgtgccactatgcccggctatttttttttttttactttttttgagacagagtttcactgttgcccaggctggagtgcagtggtgcgatctcggctcatggcaacctccacctcccaggttcaagcaattctcctgccttagcctcccgagtagctgggatcacaggtgcctgccaccacacccaaccaattttttgtatttttagtagagatggggtttcaccatgttgggcagactggtctcaaactcctgacctcagatgatccacccaccacggcctcccaaagtgcagggattacaggcatgagccaccatgcccagcctaatttttaattttttttagtagaaacgaggtctccctatgttgcccaggatggtctcaaactactggcctcaaacaatcctcccacctcagcctcccaaaatgctgggattataggaattaggtaccgcacccagcctgctcagggcttttaaattaaattacaggtcaggcatggtggctcacacctgtaatcccagcactttgggaggccgaggtgggcagatcatgaggtcaggagatcgagactatcctggctaacatggtgaaaccccgtttctactaaaaacacaaaaaattagctgggcgtggtggcgggcacctatagtcccagctacttgggaggctgaggcaggagaatggcatgaacccgggaggcggagcttgcagtgaaccgagatcgcgccactgcactccagcctgggcgacagagcaagactctgtctcaaaaaaacaaaacaaatacaaaattagccgggcgtagtggcgcatgcctgtaatcccagctactcgggaggctgaagcaggagaatcgcttaaacccaggaggcggaggttgcggtgagtcaacgtcgtgccattgcactccagcctgtgaaacagagcaagactccatctcaaaaaaaaaaaaaattaaattacattaattttttttgagacagggccttgctctgtcacctaggctagaatgcagtggtgcaatctgggctcactgcagcctcgatttcccaagctcaggtgattctcccatctcagcctcctgagtagctgggtctacagggaggggccaccacgcccagctaatttttcatttttcttttttcaaaattattattattatttagggacaggatttatttatttttatatatttgcaaccaattctcactctgttgcccaagctggagtacagtggcatgatcttagctcactgtaacctccgcctcccggcttcaggtgatttttgtgcctcagcttcccaagtagctgggactacaggcgtgagccaccatgcccagctaatttatgatttttttgtttgttttttgtttttttcttttttttttgtgagacagagtttcactcttgttgcccaggctggagagcaatggcacgatcttggctcactgcaaactccgcctcccgggttcaagcgattctcctgcctcagctccccgagtagctgggattacagtcatgcgccacgacacccagctaattttgtatttttagtggagatggggtttctccatgttggtcagtctggtctcgaactcctgacctcaggagatccacccacctcggcctcccaaagtgctgggattacaggtgtgagccactgcgcccggcaatttatgtattttttttagggacagggtttcatcatgttggccaggctggtttcgaactcctgggctcaagcaatcctcctaccttggcctcccaaatttcttggattacaggcgtaagccatggtgcccagcctgttcagggctacttttatttttttgagcagtatttggtcatctgggtacaggctgagcaggtagatagtttgacaggtctagaagcggggtgtggcactgaggcaaaagtagcagttttggggagagagcaaggatgttgcagtgagccgagatcgcgccattgcattccagcctgggcaacaagagtgaaacatggctctcggtgggatggagagggaagagaaagtggggggagatgatacatgtggagctataggacatttgtcatgttcaatggggttgaagagcaggtacagcgaggataactgggggagttggaacctgacagggtctactcagagagtaggattctggatccttgaaaacttcctgatacaatatatcctgtctatctcagagtctccagcacctaccacaatgcctggcacttactagatgttcagtagatcctcaatggataagtattccagagatggagtgcgggtaatgacaagatgcaggatacgggccaggcacagtggctcacgcctgtaatcccagcactttgggaggtcaaggcaggtggatcatctgaggtcaggagtttgagaccagcctggccaacatggtgaaatcctgtctctactaaaaatacaaaaattaactgggtgtgatggtgcatgcctgtaatcccagctactcgggaggctgaggcaggagaatcacttgaaactgggaggcagaggttgcagtgagctgagatcgcaccaatgcactccagcctgtgaaacagagcaagactccatctcaaaaaaaaaaaaaaaaaaaagatgcagggtgtgaccagggaagtggagtgcctggactggaggtgacaatgatgaagtaattaattcatttatccaacaagtattttggggcatctactacgtggcaggtactaagctaagcaggtggtggtgagatagagactaaaacagtctaactttgttctcatggtgcttacaatccactggagaaaaccaatactaaactaacaatcattcacgactacataattatgactggaatcattgctttgaaagaaaagcaaaggatgtgaggctcagtgtggtggctcacacctgtgagcccagcactttgggaggctgaggtgggaggatctcttgagcccagtttgagaccagcctgggcaacatagagagatcctgtctcttaaaaaaataataataatttgaccaggcacggtggctcacacctgtaatcccagcactttgggaggccaaggcaggtggatctcctgaggacaggagttcgagaccagcctggccaacatggtgaaacactgtttcaccctttttaggctctactaaaaatacaaaaaaaattagctgggcatgttggcgggcacctataatcccagctacttgggaggctgaggcaggagaattgtttgaacctgggaggtggaggttgcagtgagccaagattgcgccattgcattccagcttgggcaacaagagtgaaactccatgtcaaaaataataataataataataataataataattttttaaaaaataaaaataaaaaattagcccagtatggtggtgcatgcctagagtcccggctattcaggaggctgaggcaggaggatggcttgagcttaggagctgaaggttgcagtgagctatggtcatgccactgcactccaggctgggtgacagagtgagaccctatctccaaaaaaagaaaagaaaaggggccgggcgccatggctcatacctgtaatcccagcattttgggaggtgaaggtgggctgattgcctgaggccaggagtttgagaccagcctagccgacatgccgaaaccctgtctctactaaaaaaatacaaaactagctgagtgtggtggtaggcgcctgtggtcctagctactcaggaggctgaggcaggagaatcacttgtacccaggaggcagaggttgcagtgagctgagattgcacgactacacaccagcctgggcgacagagcgagactccgtctcaaaaaaaaaaagaaagaaagaaagaaaaaagaaaagaaaagtgtgtaaagaaagactataaccaggatcctgatttagattgcagttcagggaaggcttcgttgaggaactgacgagtctaaactgccaagatgagtaatttgccaggcaaagagactgtggaaaaacattcaggctgagattcaccatttgcgaagggtctgaaatgtgaagatggtggcctcttggaggaagggaaagatggtccatgtggccggtgaggtggatgtagctcaggccctaaagggccttactggctactttaactgttttgaattgaattttcctgcctcatccctgagtgatcctccccactcccctccccataagcaccttatctcacgcttttgatgtgtagctttaaatacacatatggggcgggtcgtcatggttcatgcctgtagtcccagcactttgggaggatcgcttgaggccaggagttcaagaccagcttgggaaacacagcaagacttctcgtctacaaaaaatttttaaaaatcagcggttggtggcgtacacctgtagtcccagctgctcaggaggctgaggcgggaggatggcttgagcccaggaaccggtgattcccctgagtaccttggtgtaaagtgtctccatgaggcccacgtggaggatgggggagatgaggagggtctgctgcctgcccagttagctctttcgaaggaaagtgtttgggtgctgtgtgtgtgtgtgtgtgtgtgtgtgtgtgtgtgtgtgtgtgttgacgtcgggaggaacgaggttgggggagagagtttggcttgagccgggaagaacctacaggatgatgggcaggacccccagctatgggaagtcaggttttaagcagagtgaggtcctgagagtctccggcgccgccctggtggtgatgggagaaaatgggtccgcggagggccctgcactgcggctcgcgcctgtaatgccagcactttgggaggccgaggcgggcagatcacctgagatcaggagtttgagaccaacctggtcaacatggtgaaacccgtctctactaaaaatacaaaaattagccgggcgtgatggcacgtgcctgtaatccctgatacgagggaggccgaggcaggaaaatggcttgaaccaggaaggcggaagttgcagagagccgagattggtccactgcactccagcctgggcgacagagcgacactccgtctcaaaaaaaaaaaaaaaaaaaaaaaaagcgtccgcggggagcgctcttttcctaaactcaggaacccctcgccgcccctgcccctggcgaccccacgtctctggcatccttccctcttccctccctctcctccgggcgcccagaaaagtccccacctctccccgcttaggcaaaccagccttcgggaacgggtggcaggctcggccgggatggccgctctgactcaggacattcgcgcggcgctctcccgccagaagctggaccacgtgtggaccgacacgcactacgtggggctgcaattcccggatccgtgagtgcgcgcgcgggcggggggcgcgcggggagggggacgcggctcggggcgctcaccagccccgctccccagggctcaccccaacaccctgcactgggtcgatgaggccgggaaggtcggagagcagctgccgctggaggaccctgacgtctactgcccctacagcgccatcggcaacgtcacggtgagcaccccctgcccgctcctaggatggggcgcggcacgagccctttcctgggtctcgaaggagggacgcggggagcgcgcctcaccgtcctcgtgtccccagggagagctggtgtacgcccactacgggcggcccgaagacctgcaggacctgcgggccaggggcgtggatccagtgggccgcctgctgctggtgcgcgtgggggtgatcagcttcgcccagaaggtaagtgtccctggacagagggagggcttgagcccgggaaccggagggtcggactgccagtgagaatcgttcagggtgctgtgagagggagacaggaaagaaccatgtggctggatggtaagaaaatataagctgggcacgatggttctcacctgcaatcccagcactttaggaggccaagacaggaggatcgcttgaggccaggaattcaaggcaacacggtgagaaccccctctctactaaaaaaaaaaaaaaaaaaaaggttctttttttttttttttagttagctgggctggtggcacatgcatgtggtcccagctactccggaggctccggtgggaggatcgcttgagcccaggagtgccaggctgcagtgagctatgatcgcgccactgcactccagcctgggcaagagagactctgtctcaaaaagaaaaaaaaaaaaaagagagagaaacagagaagggagggagggagggaggaaggaaggaaggaaaatgttggctggtctgggaattgaatcagaaggaaaaaagaaaatgttggctgggaacaaattgggtgttgggggaaatcagatggggaagggaacagaaacatggggtaccctggagcccggtggggtttgagggctgcctaggagctgctgaggttgggaagacacaggccaggtagtgcccccacatcctctccgtgggatggacagttgcaagcaaaggccttgccatttcctggtttctcctgcccttatgaatcgggtttttttctgggaggagtcctctagtcaccttcctccccaggtgaccaatgctcaggacttcggggctcaaggagtgctcatatacccagagccagcggacttctcccaggacccacccaagccaagcctgtccagccagcaggcagtgtatggacatgtgagtctggggaggctggtcgtgctgttcccaggtcccgaggccacaccttcttgctcagaatagggctggcatgtttttcgtttttcctggaagcccagctcgcagctttgcgtgggcacccctttccctgcaggtgcacctgggaactggagacccctacacacctggcttcccttccttcaatcaaacccagttccctccagttgcatcatcaggccttcccagcatcccagcccagcccatcagtgcagacattgcctcccgcctgctgaggtgaggggagtgttggggaccagaagaggaggaagcagagagaggaaggctgcagcgaggccacagggtgattgtgggtgaactagaaaaaggtgactcttgtttaagcctgcagtgagccatgactacaccattgcactccagcctgggagacagagagaccctgacctttttttttttttgagatggagtcttgctctgtcttccaggctggagtgcagtggtgcaatcttggctcactgcaacctccacctcccgggttcaagtgattcttctgcctcagactccagagtatctaggattacaggtgcccccccaccacgcccggctaatttttgtatttttagtagagggtttcaccatgttggccagactggtctcgaactcctgacctagtgatccgcccatctcggcctcccaaaatgctgggattacaggtgtgagccaccatgcctggccgggaccctgactctttaaaaaaaaaaaaaaaaaaaaaaagtgactcttctggatggacacagcctttctccagggtctactgtctggcaactaaagttcccactggattgcacacctacctcagctgagaaccatccaaggcagccctgactgcactgccctacccaggcagcgtccagaggcagcgatctggagccagaaagggtgggagggaaagaaataaggaaaagagtgatttggactcttctgggtctctctacaacttccccctttctgccttcctcctctccaggaagctcaaaggccctgtggccccccaagaatggcaggggagcctcctaggctccccttatcacctgggccccgggccacgactgcggctagtggtcaacaatcacaggacctccacccccatcaacaacatcttcggctgcatcgaaggccgctcagagccaggtatgctgtgtgtccagtatcactcacagctggtggtgggctgggggaatttctgcccatacaccctggcaagatagggggctggtgcacgaggccccaagaggggacaggagtggtgcccagaggagggaagctggcaagttgaggctgaactgggtctgatggtggcagcagtgaacagacctcaccttccagcctgtctagtgatggaatgggggttgttgcccagtagtgagctccccagcactggaagtgagtaagcctaagttggatgatgttgtaatagaaactcaagcatgggccgggtgtggtggctcacgcctgtaatcccagcactttgggaggcccaggcaggtggatcacttgaggtcaggagtttgagaccagcttggctaacatggtgaaaccccgtctctactaaaaatacaaacattagctgggcccggtggcatgcatctgtaattccagctattccggaggctcggacaggagaatcacttgaacccaggaggtggaggctgctgtgagccgagattgtgccattgcactccagcctgggcaacagagcaagactttgtctcaagaaaaagaaaaaaaagagaaagaaagaaagagagaaagagaaagaaaaaaagaaagaaagagagagagagaaaggaaggaaggaaggaaggaaggaagactcaagcatgaaagaaagatcagatcagattagatagaagcatagatggccctttcaagcatagctagatgtggatggcagtggagaattaaaataagtaattgacagatggggcaacaaagccaagacttcacaaaaaatttaaaaataagagaaattggctgggtgcggtggctcacgcctgtaatcccagcactttggaaggccgaggtgggcggatcatgaggtcaggagatcgagaccatcctggctaacatggtgaaaccctgtctactaaaaatacaaaaaaattagctgggcatggtggcaggcgcctgtactcccagctactcaggaggctgaggcaggagaatggcgtgaacccgggaggtggagcttgccgtgagccaagatcgtgccactgcactccagcctgggcaacagagcgagactccaaaaaataaattaaataaataaataagtaagtaagtaaaagaaattagccgagcatggtggcacacatctgtggtcccagctacttgggaggctcaggcaggaggatggcttgagccagggagtttgaagctgcagtgagctatgatcacaccactgcacactccagcctgggtgacagaaaccttgtaagtccagaatgaccgcaggcacccagctgaaggagcacaccatccaggaagggccaagtggggaggggcgccctctttagggactggagggactgcagggctagggttgccggaattgtgatgggctgagagacacaggcagatggaggatgcccccagggtgcagggtgcagtgtcagaagtgggtcccaaacatcccctccccagatcactacgttgtcatcggggcccagagggatgcatggggcccaggagcagctaaatccgctgtggggacggctatactcctggagctggtgcggaccttttcctccatggtgagcaacggtaaggtcagggccagggcctgggcctgggctaggcagcggtgggcctgtggcccgaggaggatagggcagagaggcagtgagggacacagactggccagtggtcacttggacctcggcatccacattgtacctgagtggccctgggccagtcacttcacctctatttcgtcacctaaaaatgaaagtgaggccgggtgcggtagctcacacctgtagtcccagcactttgggaggccgaggcagatggatcacctgaggtcaggagtttgagaccagcctagccaacatggtgaaaccctctactaaaaatacaaaaattagccaggcgtggtggagggcgcctgtaatcccagctactagggaggctgaggcaggagaatcgcttgaacctgggaggcggagtttgcagtaagccgagatcgcaccactgcactccagcctgggcaacagaatgagcctccatctaaaaaaaagaaagaaaagaaaagaaaaaaagtgacatgaatgataatcatagtccatgggtctgtgtcaagattaagcatgttgggctggacgtgatggctcatgcctgtaatcccagcactttgggaggccaacacaggagaatcgctggagaccaggaattcaaaaccagcctgggcaacatagggagactgcatctctacaaaagttttttaaaaattggctggacttagtggtgcatgcctgtaatcccagctacttgggaggctgaggcaagaggatgacttgaacctgagaggtcaaggctacattgagccatgattgcaccactgcactccagcctgggcgagagagtgagatcctgtctcagagagagagacagagaaacagagaccctgggggaccaggacagaagaagacaaggggagggtctttgcttggcccctgctaagcctgtcctccttcccctctgtccccaggcttccggccccgcagaagtctcctcttcatcagctgggacggtggtgactttggaagcgtgggctccacggagtggctagaggtgatacggggtcccgggcaggtcgttaggcattggggagaggtgggggtggggggttcccactccacactggtcacccacccacagggctacctcagcgtgctgcacctcaaagccgtagtgtacgtgagcctggacaacgcagtgctgggtgagctggggcagtgccaccacctggccccctggggtccacccttgcctctggggctgagccctgagcctggcatccctcccctcccctttttccaggggatgacaagtttcatgccaagaccagcccccttctgacaagtctcattgagagtgtcctgaagcaggcaagagcaccccaggaatagggggtgaaggggagtaggttgcggggaggagcagagcctgatcagtgcccttccccaacccccaggtggattctcccaaccacagtgggcagactctctatgaacaggtggtgttcaccaatcccagctgggatgctgaggtgtaagttgggggggtagggagagctggggagggatgtgggggagcctgaacccacagatggttccaacccacctgcccccaggatccggcccctacccatggacagcagtgcctattccttcacggcctttgtgggagtccctgccgtcgagttctcctttatggaggtgagacgtcctccccctgccccagacacagcgctagtccttcagcctgtctgcctccgccccagcgtccaccctgtcctggcaggacgaccaggcctacccattcctgcacacaaaggaggacacttatgagaacctgcataaggtgctgcaaggccgcctgcccgccgtggcccaggccgtggcccagctcgcagggcagctcctcatccggctcagccacgatcgcctgctgcccctcgacttcggccgctacggggacgtcgtcctcaggcacatcgggaacctcaacgagttctctggggacctcaaggttcaagaggcccaccccgctcttggtctctgggagtgggaggcactgcccaggccagggggtccagccccttctctctgcattccctggggtctaggtcctctctggcaatccagcccattaaccccctgcctccagtctcccagcccccagcatgtgccatcgcccaacctggcaggtgcaggatcttctccccactcccttcatcctgcctccagcactctgtcctcgtctacctcctccctcctgccaggccaggggtcccagcccccttccccatgctaggcgggggtccttgtccccatgctaggcgggggtcctggcccctgccgccagccccagcccgcgcctccccaccccaggcccgcgggctgaccctgcagtgggtgtactcggcgcggggggactacatccgggcggcggaaaagctgcggcaggagatctacagctcggaggagagagacgagcgactgacacgcatgtacaacgtgcgcataatgcgggtgaggccccgccctcctcgccccgcccccagtgtcccgcccctcccctggggctccacctcctggacctggccccgtctgcgcgctcctctctctccccgcctacacagtcccggtcctctggatgctctcttcccagtcctggacacgcagtgctcatagatcggtcaggctggaggacccgagcgatcaaagtgatgaaatggacagggagggccagcctcttggccacagtcgcctggtttacgcctggcagaactgggacaatccaccctcccccacccctccccgctgactcccctcctatagctcccactgcctcctcgacccttctggaaagaaaaagcatgtccacactggtccacaatacgaggttacaggctgggaagtgcagaaggctaaagatattcagagtaagagagctgttttccttctgataatgaaatgggtgaaatccagaaaggctgcctggaggaggtgtcacgtgaaagttaaacaagagcttattccctcaccaatcccttctgcttagctttgaatcctttgcagcccacaccccacctccagttccaactcctccacttccttccattttcttactccaagaactcaacccctcaaccctttgatgtcaagaaatgggtgagtagggactgtggccatggggaaaggtctgcagggcaaaatagtaaacaggatcatcctcaatgagtgtggggtgagctgggaactgcagtgtacacagagccacttgtgcacacacactcacggttttcagagccagcatggctaccccttggaggctcatgttatctctcctccttgcattttcctgcttgtgccctctgcctgtcccccttggccatttacaaacctattgctcttgctcgttctcccttgcccagactagagtgcagtggcaccatctctgctcactgcaacctccaactcctgggctcaagtgatcctcccacctcagcctccctagtagctgggagtacaggcacgtgccatgacgcccggctaaatttttctattttttgtagagacagggttttaccatgttgcccaggctggtctcaaactcctggcctcaagtgatcctcctgcctcggcctcccaaattgctggggttacaggcgtgagctactgaacctggccttctcctctccttcttatatctctttctccattcattcttctttaacctttgcctcctctactggaacaggggtgaccctggggtgaggcaataggttgggtatggttcattctcattcacagatcttggtttaacctcagctgtgtcagcatgcagaagacaaaaagacacccacctttcaaagttgccatacccctgtccccaccagggataaaagggacctgcgtgtaagatgcatgacttaggccaggcacggtggcttacgcctgtaatctcagcactttgggaggctgaggtgggcggatcacctggggtcaggagttcgagaccagcctgaccaacatggagaaaccccgtctctactaaaaatacaaaattagctgggcatggtggcacacgcctgtaatcccagctactcaggaggctgaggcaggagaatcacttgagcctgggagatggaggttgcagtgagccgagagcacgccattgcactccagcctgggcaacaagagcgaaaatccatctcaaaaaaaaaaaaaaaagaaaaagaaaaagaaaaagatgcatgactcaggctcagggatggagagggaaggactcaggacttcagagcctgcaatacaggattgggccagacccagtgaattttatggctctagaccaggggttggtgaactactgcccattggccaaattcaaactgccgcttgtttttttgttttttttttttctgagacggtctcactctgttgcccaggctggagtgcagtagcatgatctgggctcacggcaacctccacctcccgggctcaagcaatcctctcacctcacctcagcctcctgagtagctgggactacaaggacacactaccacactccgctaatttttaaaattttttgtagagatgggatctcactatattgtccaggcttgtctcaaaatcctgggctcaagcgactctcccacctcagcttcccaaggtgctgggattacaggcgtgagcctctgctccctgtttttgtaaataaagttttattgaaacagccatgcttattggtttcacgctctctatggctacttttgtgtaatagcagcaacgttaagtagctgcaataaaagcagcatggcctgcaaaatctaaaatatttactatctggcatttcacagaaaaagtttgctgaccttggctttagactgtgacttggatcttgaagaacaggcaggatgtggattgatgcaaagtaaagaggacatttcagggtggagagaccagaattcgggtgtggcagtgaaatcagtctggttttacttggaagcggggtgtggaccagcagagccagaacaggggccccatggagaggcagaggggagggaaccaccaaatgtggtgttatcgatcaactgtggggagcctcgaacaccaggattagaagtttggatgttaagggtcttagcatcaaggaaattagagaggtttttgagcagagaggtgatgtgagcaaaggggagtttttatttttatttatttttctttctttattttttggagacagtgtcttaatgtcacccagactggagtgcagtggcgcgatcccggctcactgtaacctctgcctgtcgggttcaagtgattctcccacttctgcctcccgagtagctgggactacaggcgcgcacaaccatgcctaattttttttttttttttttttttttggtagagaaggggtttcatcatgttggccaggctggtcttgaactcctgacatcaagtgatctgctcacctcagcctcccaaagtgctaggattacaggcgtgagctactgcgcccggctgggagtttttgtttttgaaatgaggtctcactgtgttgcccagactggtattgaactcctgggctcaagtgatcctcccaccttggcctcctgagtagctgggactataggtgcacaccaccacacccgactaattttttatttttatttttgtagagatgagggtttccatacattgcccaagctggtctcaaactcctgagctcaagtaatcctcctaccttggcctcccaaagtgctgggattacaggcaggagccaccatgctggacaacaaagtagagtttttaggagtgattttggtcagattgcaaatgtcttgagagtggcaggtgggagcaaatgctcataggtggggactggaccgatgtcaggtgtttagaaggagaaattgacagatttgatgttgagggaagaggaggagaataataataatagttgtcttagaatagaagaataataaaatagcagttgccatttgtttttgtttgttttttgagacggagtctcgctctgtcaccagactggagtgcagtggcacgatctcggctcgctgcaacctccgcctcccgggttcaagctattctcctgcctcagccttctgagtagctgggacaacaggcatgtgccaccacacccagctaatttttgtatttttagtagagacggggtttcgccatgttggccaggatggtcttgatctcttgacctcgtgatctacccaccttggcctcccaaagtgctgggattacaggcatcagccactgtgcccggcctgtttgtttgtttgtttggttttgttttctgagacagagtcttgctctgtcacccaggctggagggcagtggcacgatcttggctcactgcaacgtccgcctcttgggttcaggctattcttgtgcctcagcctcctgactagatgggattacagggacacatcagcatacctggctaaattttttgtatttgtagtagagacagggttttgccatgttggccaggctggtctcaaactcctgacctcagatgatccacccgcctcagcctctgaaagtgctgggattacaggcatgagccactgtgcccagctgcagttaccatagtagaaggttaccacatgctagaggatttatttcatttgcttcccccagcgctgaggttgctagtattatatccagaaactggggctaggagaggctaagaaacttacctgaaatcatatagttagtaagtggaagagccgaaattggaggccaggtagtctaccttcaaagcctgtgctcaccccatgctcactcccctttgagggtgacagcttgacacctgcagaaagccatgggccacatgagtgtgggcccaacgcccaggtttgggaagagatcggtactgatatgtccaggtgctcccaaacccagtggggaggtccagatggctggagggcaggattccagtgggtcattgggtggggagatttggcatctgtccccacagaggtcctggttgacatcaggggcacagatgagctctgtgagtgaatgatggaggccttaaaaagatgtgagcatctgaaaatcagctgggtatggtggcacgtgcctgcactcccaactactcaggaggctaaggcgggaagatcacttgacctctggggtttgggttgcagtgagctgtgattgcaccactgcactccagcctgggtgacagtgagaccctgtctctaaaaataaaagatgtgagcatctgagatcaccccctagagattctgattttactggggcggtgcccaggcaatgataatttaataggtacagagaagagggaggtggaactttgagacctgcccacgggtggaagcagaacaaaccagagatggggctaggagaggctaggaaactaggagaggctggcagaaaggagggaggagattaggtcaggagcaaggccgtctcaggaaagacggaacagcagctgcgtcagagggaggaaagccaggcttttcatgaggactggactgtccccttgaccttcgtctctgggctgtggacattggtgggggtggagaatgactcggtgtggggaggtgtggtgttaagaagggaacagcagggcgatagattgttctttgaggctttgagcattcactgaatgggtgaggaaggaagactcgggagaactacatgcaggcttaggggttctagagatagaaggggaggcctagcgcggtggctcacacctgtaatcccagcactttgggaggccaaggcgggcggatcacttcaggttaggagttcgagaccagcctggccaacacggagaaaccccgtctctactcaaaatacaaaaattagccgggcgtcgtggcgggtgcctgtaatcccagctactctggaggctgaggcaggagaatcgcttgaacgctgaaggcggaggttgcagtgagccgagatcgtgccactgcactccagcctgggagacagagcgagactccgtctcaaaacaaacgaacaaacaaaaaacaaacacaaaaagaaaacaaacaaacaaaaaaacaaaaagactggctggcgggaagggtgactcgggcctttgctcccgagccagagcccccaaccctgacctgatccccctctctgcgcaggtggagttctacttcctttcccagtacgtgtcgccagccgactccccgttccgccacatcttcatgggccgtggagaccacacgctgggcgccctgctggaccacctgcggctgctgcgctccaacagctccgggacccccggggccacctcctccactggcttccaggagagccgtttccggcgtcagctagccctgctcacctggacgctgcaaggggcagccaatgcgcttagcggggatgtctggaacattgataacaacttctgaggccctggggatcctcacatccccgtcccccagtcaagagctcctctgctcctcgcttgaatgattcagggtcagggaggtggctcagagtccacctctcattgctgatcaatttctcattacccctacacatctctccacggagcccagaccccagcacagatatccacacaccccagccctgcagtgtagctgaccctaatgtgacggtcatactgtcggttaatcagagagtagcatcccttcaatcacagccccttcccctttctggggtcctccatacctagagaccactctgggaggtttgctaggccctgggacctggccagctctgttagtgggagagatcgctggcaccatagccttatggccaacaggtggtctgtggtgaaaggggcgtggagtttcaatatcaataaaccacctgatatcaataagccacctgttgacatctgttattgataagcgccttcatgcttcttcctcaccctcatgcccatcccatcccatcatcccttcctagagacctagggaattgggcagaagggaccagagagggtgcacacaggaatgctgtctccacggggaaaaccgagctgtttctatcactcaaggaaaatgcctaaggaaatactgaaggccccttctccaaagaccaccataaagcaggtggtctttggagaaggggccttcggtatctttttttatttttgagacggagtctcactctgtaacccaagctggagtgcagtgacacaatctcggcccactgcaacctccacctcccgggctcaagcgattctcctgcctcagcctcctgagtagctgggactacaggtgtgcaccaccacgcccggctaaatgttttcgtattttagtagagacgggggtttcaccatgttgcccagggtggtcttgaactcctgagctcgggcaatctgcctacctcaacctcccaaagtgctgggattacaggcatgagccaccacacctggccagtatcttgtcctgggatgaggaatggttacataatttgcaagacctgctgcaaaatgaaaatgcaggaccccttgttcaaaagcagaaacaagctgggcacggtggctcatgtctgtaaccccagtgctttgggaggatgaggcgggaaggtcatgtaaagccaggagttcaagaccagcctggacaacacaggggagaacctgtctctacaaaaactaaaaaactttagttgggcatagtggtgtgtactgtactcccagatactcaggaggctgaggcaaggcagggataatttgagcccaggaatttcaggctgcagtgagttatgatcgagccactacactccagtctgggtgacagaatgagaccttgtctcaaaaaaaaaaaaaaaaaaaggaacaaagcttttttttgtttttgttttctacaatttctcaacctgtcatggtattcttttatttgatatttaatgttgcactcctttggatatggggacacactttcaaaacataaattcatgcttgaacccgggaggcagaggttgcagtgagccgagatcatgccactgcactccagcctgggtgacagagcaagactctgtctcagggtaacaaaaattattaggaatttcaaggttggcacagtggctcacgcctgtaatcccagtactttgggaagccaaggcaggcagattgcttgagcataggcgttccggagcagcctgggcaatatggtgaaatcttatctctacaaaaagtaaaaaaattgctgggtgcgctggctcacgcctgtaatcccagcactttgggaggccgaggcaggtggatcacgaggtcgggagatcgagaccatcctggctaacacggtgaaaccccgtctctactaaaaatacaaaaaattaggtgggcgtggtggcgggcgcctgtaatcccagctactcgggaggctaaggcaggagaatggcgtgaacccgaggggcggagcttgcagtgagccaagatcgcaccactgcactccagcctgggcaacagagcgagactctgtctcaaaaaaaaaaaaaaaaaaaaattagccaggtgtggtggcgtgcacctgtagtcccacctactctagggtgctgaggtgggagaattgcttgagcttgggaggcggaggtggcagtgagccaagatcatgccactgcactccagcctgggcaacagagtgggagagtggaaccctgtctcaaaaaaaaaaaaaaaagaaaaagaaaaagaaaaagaatgtcaacataacaatctcagagcattaaaccccaagcacagaacccccttctgagcatggggccctgtaagactccaacagtggttacacacattagatgattggccctgcctggaacatcctccaggatccccccgcctcctttttttttagacggagtctcgcactgttgccccaggtagagtgcagtggcgcgatctcggctcatggcaacctctgcctcccaggttcaagcaattctcctgcctcagcctccctagtagctaggattacaggtgcccgccaccacgcccagctaattttttgttgttgttgttgtatttttagcagagacagggtttcaccatgttggccaggctggcctcgaactcctgacctcatgatctgccctccttggcctcccaaagtgctaggattacaggtgtgagtcaccatgcctggccaggatcccctttgaccagtctttgtccagtgagggtggagacactgaagtgtaagctactggaggcagggaattctaagtgctgctggcaccgtgtgcctttaatcacagcttcaggaggctgtggtcttgacagctcttcaagacactgggaagtaaaagcttcttggtctaaggcttgggatgccacagggctctggatttcaggatgcaactgtaccctccttagccccctaagcttgacttgttgagttctcagaaccctgaattaggatcagaaacctcctgagctatttgcttccctgagatacagtccagacaagtgtcccaaagcaccttctcaacccttcttcactttgtccatttctccctgtggtagacagaataatgatctggacaaaaatgtccatatcgtaatccctgaaacctgtgaatgaagtccctaaaacggacattgcacatgtgatcttgagatgggtgaattaaggatcttttggtttgtttccttacttatcggaaatttttaattttaattcagcctccagagtagctgggattgcagacatgagccaccacgcccagctaagtttttgttttgtagagatagagtctcactatgtggcccaggctggagtgcggtgctgcaatcatagcttattgcaacctcaaactcctgggttcaagagatcctcccacctcagcctcctgagtagctgggactgcaagtgtgagccaccatgcctggctaattaaaaaaaaaaaaatgccaggtgtggtggctcatgcctgtaatcccagcgctttgggaggctgaggtgggcctgaggtcaggagtttgagatcagcctggccaacatggtgaagccctctctataattatacaaaaataagtcaggggtggtggcgcacctctgtagtcctagctacaaaggaggctgaggcaggagagtcacttgaacccaggaggtggaggttccagtgagccttgattgtaccactgcactccagcctgggcgacagagcgagactccatctcaaaaaaaaaaaatttttttttagagacaggctcttgctatattgtccaggctagtgttgaacttctggcctcaagctcttctcctgctctggcctctcaaagcactaggattacaggcgtgagcccctgcccccagcccctcagaaagccttcttgaccacaccagtaacaaggtcttttcacaagtactcacaagaccattaacctatgtggcacctcgaatgcgttttggggacctgggcgcatccagactggtgtgaacggatatcttccatacacatgtaatttagcaaaggggtttcctgggctatggcaagagctgtccccagactcctggacacaaacggcacacccattctccatgcagtatcagggccacaccccactggagccagttctgggtgtgagagggagaagactcccagggtagtggagcaggtcccaatgcccctaaagtaaagctggaacaactgatcaccttccagtgctgtgacagcctgggtctgtcttaatatcttgctgatctttgttcccagtcaaccatctgcccagagtcactggctctccctcctttttattttttttgtagaaatggggtctacgctatgttgtccaggctggtcttgaaaccctgggctcaggcaatcctcccaccttggtctctcaaagcactgggattacagatgtgagccactgagcctggccattctccctcttcctctgtttctcctcaccctgcacctgaaggagggcaggtgagctggaagcttgcttttgtaaatcttattcttttcctgtaccctagttttttctttttttttttttttcctggttaaggtgaggttatgtcaagcaatactatttcccccatattggtagggactttggtgtttctgatccatgggagttgaagccttgtttcttttttttagatggagtcttgctctgctgcccaggctggagtgcaatggcacaatcttagctcactgcagcctccacctctcaggttcaaatgattctcttacctcagcctcctgagtagctgggattacaggcacctaccaccatgtccagctaatttttgtatttttagagacaaaatttcaccatgttgggtgtattttttgtatttttagagacaagagttcaccatgttggccaggctggtctcgaactcctggcctcaagtgatccactcgcctcggccctgcaaagtgctgggattacaggcatgagccactgtgcccagccaagggagttgaagtcttaaaggaaagacccaggaaaacagatatagggtccaaaaggcagaaaaggattctaggggttgtaaacacccaggtaaccctggtgaaaggctttgttgcctccagatggtgggacaggagttccaccgcaggcaggattaggtggtattttcattcatttctttttaggttaatacattggcttagggacaggatcctattccagggctgaaggggatcttgagaatcaacttgcccaatgctctcattttgtaggtagaatctacagctcagagaaattaaataatttgctcatggtcacatagtttttcagcgcaagcaccaggagtgacctaactcttctaaatcctcgctgggcctcatcactgccccaagtgcctgggtcccctgggaacaggggtgggagaactagaggatgtctgagtaccaaaaaagaagtgggaagacaggggcaagtaccctacatttctgattatcattttaaaaatgtattttattcaacttggaaaatgagtacaaatccctgggtgttttttgtcagggaggagtggggagtaggcaggaaagagaagagggtaggaggcaaggtaaggtatgagcatcacagtggctgcctcaagaccctgcccagggagggtggggtgggctgggggttgagcacggagctcaggtccggaggaacaccatggtgaggaggcctggaggggggacaaagaaagaatagggtcgcatgggcagccctggggctctgttagctctcctcccgtcccttctccctttttcctggggcctgggtccctggccactactgtcctcacccaagacgtaggcggccaccaacttttgtcccagggagacgtgcaggacttgaggcagctggctgccgagttcgtccgggagtgggagcagcaggaaggccacagacacaatccccgtcagcaagaagaggaggaaggagctggtggccagttgctggcgggggtctgagaaacaagactcatcagatgctgcagcccccactcctgcccagcccaggtcctccagggagaagcctgaacaaggaagatgtatctactttttttttttaattatcttttattttttgtagagatggagtctcactacgttgtccaggctggtctggaactcttggcctcaggtgatcctcctgccttagcttcctaagtagctgggactatgggttcatgctaccatgcccggctaatttttaagttgtttgtagatggtcttgctatgttgtccaagctgatcttgaactcctggcctcgagcaattgcaatcctcccaccacttcagcctcccaaagcactgggattataggtgtgagtcaccacaccctgtatctacttttttttttttttgagacggagtctcactctgttgcacccaggctggagtgcagccacacaatcctgactcactgcagcctctgcctcctaggttcaagtgattctcctgccttagcctcccgactagctgggattacaggtgcgagccaccactcccagctaatttttgtgtgtttttagtagagacggggttccatcatgttggtcaggctggtattgaactcctggcctcaggttatcagcccacctcagcctcccaaagcactgggattataggcgtgagccatcacaccctgtatctactttttactgccctccaggggtacactgcaagtgtcctctccttcctacagcctctgtccccaccaccacaagaactctctcctccagtccctcagcattcattttctctcttctgtggacctatccgacaggcagggacctctcttgatctcatacccagcacacaacttggtacagggttaattgctcaatacaggtttcttattgaactgaactgagctaccacatgataggaagtactgcggttacagtcaaggaagaactttttcctctaagtagaagtcagaaaccagggaagctgtaagtcttttccccctcacctgatataaaatctcaactcggaggaatgtttccaccaaaagacaaaagactgaaccaggagacttcttcaaatccaatttatctcatctctagggaaatgctagttcctccctccctacagaactcaagatcccagtctcccaactcacgctcctggaagtgtctggccgtgggtggtggtgtcccagcaggaggccctgggcgaggcgctggatctggctgtccctgaagctcaagggggtacgctggggctctcagaatggaggtaatgtccttgcgtcccaccactcggccctcagctccttcctcagacagctcaatgcggaagcggtcctggacatcatagtggctgggaatgggtgccacatggcgaatcacactggtcccaaggtaggagagaagcccattggggtgaatgaggcagtaatccaaggaaatctgggcctccccccagaagtctctcccttaggggcacaggcagaggatagggcaaataggttaaagggggcaaggtctcagacctcagacaacaggtggcagcgacccctggcttccacaagcctccccaccctcccagctcactcacatgtcaatgcaagactggggcttcacatatccctctgcgtcaaacaccgtgtatttggcaggtgctgtgcacaggactgggggatagagacacacacagacaagccctgccatgtgggtcatttaagtcccctctgccttctgccccggaggctggacatgactttcccagtccaccaaagctggacgtgcaaccctacccatctgactcctccagccaacacaaccccccagtgtccggccaccagcccccacgaggcgccgatccctttacctcggaagcgaagcgcagttcctgtggggttatagagggtcagcagctgtcggggtccgctccgctggtccgccctgaatactagatccgggggaaagaccaggaccgggacaacgggtcccaagggaggaggggcgccccgggacccccgcccagggggccccggacccaccagctcctggtcctggggcgccccacggcgcatgcaggctctgggcggtcggacatccgagggcagagctcaggggacagggcctggagtcagagctggggggcgtgaggggcgaaaggggacaagatgagctcccggagcagggcctcgactgatgccgccgccgccttggaaccccgctagatggggctcccgcagacccaggcccagggcccccaagacctttcctcttccagctctgccccaggttccttcggacccgccgagccccacctcgacggccacgcccaccccgctaaacccggcccctcgcagctcccaacccggccttctcctcacgcccagctcacgatctccataagccccgccccgccgctggcctcgccccttccgggcgttcccggacgcccgcctcctctctccagccagactccgcccgctgcagcgggcgcctgcagagcgacctgtgacgccgcctgcttcctgggagacctgtgtttgcgtctccggcccctccctaagctcggacacgggccccatcgggcttctgcctcaaaacggtcgctcgcgttaggatgcccaccttgtggttaaagcacctgccagtcagcttgtggtcagattaatgttgccatgttccagagagtccttttctatacttccgccgtacggcctctgtcattggctaggacgtctttgtttctgccgtaactatacgccgattggtgtgctgaaagaccaaacaacgccctccttctgtcgtctgcgattggctggattccggtgacgtaacagttgtactggctcgaactcgagccctgaagtaactcagagaaccgggggcggggtttcgaactgggctttgttctttcctccctattcttgagatggtccaagtcaatctcccaccgggaagcccttttcctcctcttcattccaggctctagaagcctctgcaggaaccaagcctgttttctttgcttttttttttttttttttgagacgaagtctcgctctgtcacccaggctggagtgcaatggcacgatctcggctcactgcaaccaccgcctccagggttcaagcgattctcctgtctcagcctcccgagtagctgggattataggcgtgcgccatcacgcccgggtaattctttgtatttttagtagagacggggtttcaccatgttggtcaggctggtctcgaactcctgacctcaggcgatccacttgcctcagcctcccaaagtcctgtaattacaggcgtgagccaccgtgcccgccctcttttttgcttttttagagacagagtctcactctgtcgcccaggctggagtgcagtggcgctatcattgctcactgcagcctccaactcctgggttcaagcgattctcctgcctcagcctcccgagtagctgggattacaggcgtgcatcaccatgcctggctttttgtaattttttgtagagacgatctcgctatgttctgcaggctgttctcgaactcctgggcccaagcgatcctcccacttaagcctcccaaagtgcatgagagccactgttccttccccaggctcaaagtctgttttctatgggttggaggttcctcccatctgggactccagactaagtcttgcctcctgtttctcaccttcctgtgagggacgtgggaaatcactcacatttgcacagggaattaagatttgctgatttcaaacccatgttgtttgagtaattatatattttaaaaaaggatttgctaaaccctgccactttaattgcatcgaatcttcaactccttttacagcctggataaggtgaagaatctgggtctctgagggcacccagttagcaatggagcaaagacaaagttgatcttatctgaaagtctcctctgaacatcttgtgtagaatccccgtgttctcttttacattttctttttctttttctttttttttttttttttttttgagacagtcttgtgctgtcacacaggctggagggcagtggtacaatcatagctcactgcagtctccacctgcttggttgcgctcaaccaatcctcccacctcagccttctgagtagctgggactacaggcgcgcgacttcacacccggctaattgtatttgttttttttgttttgtttggtttggtttattttttgagatggagtctcgctctttcacccaggccagactgcagtggcgcaatctcggactgcagtggcgcgatctcagctcactgcaagctccacctcccgggttcacaccattctcctgcctcagcctcccgagtagctgggactacaggcacccaccaccaaacccggctaattttttgtatttttagtagagatgatgtttcaccatgttagccaggatggtctggatctcctgaccttgtgatccgcccgcctcagcctcccaaagtgctgggattacaggcgtgagccaccgctccctgccctgtatttgtttttttaatagcacttatagtgatacatgacctcctattttattgtttctctctcctccagtagaatgttttttccttttcacaagagcagggactttgtttagttttctgttgtatctttaggacttatgacagtgcctaccatttggaatgaacaaatgaatgagtgactaggatgaactttgagcagagatctgactggatttaggaagtgaaccatgagatatgtctatgggagagaattctggatagaggaaatagcaaaggcctaaaacagaagtgtactagaaatgggcaacaaggccgggtgcggtggttcacccctgtaattccagcactttgggaggccgaggcgggcagatcacaaggtcaggaattcgagaccagcctgaccaacatggtgaaaccccgtctctactaaaaatacaaaattagccgggcgtggtggcacatgcctgtagtcccacctactcgggaggctgaggcaggagaatcgcttgaatctgggaggcggaggttgcagggagccgagatatcgccactgcactgcagtccagccagatcatgccactgtgctccagcctgggtgacagagcgagactccatctcaaaaaaaaaaaaaaaaaaaaagaaatgggcaacaaactgaagttgccaatgtgactggaacagatgatacataggagataatagacatgaagctacgaggcaggagagagaatgcagatgatatagggccttgaacccttggtaagacttaggaaactacaggaaagttttgagtaaaggagggacaagatgtgacataatcggccgggcatggtggctcacgcctgcaatcccagcactttgggaggccaaggggtgtgcatcacctgagattgggagttcgagagcagcatgaccaacatggagaaaccccatctctactaaaaatacaaaattagctgggtgtggtggtgcgcacctgtaattccagctaatcgggaggctgaggcaggagaatcatttgaacccaggaggcggagtttgcagtgagccgagattgcgccattgcaccccagcctgggcaacaagagtgaaactccgtctcaaaaaaaaaaaaaaaaaaaagagtgacatattttcttttcttttttattttatgttatttttttcagacggagtctcactctgttgcccaggctgaagtgcagtggcacaatctcagctcactgcaatctccacctcttgagttcaagcaattcttttgcctcagcctcctgagtaacaggtgcccgccaccacgcccagctaatttttttgtatttttagtagagacggggtttcaccatgttggccaggctggtctcaaactcctgacctcaagtaatctgcctgccttggcgtctcaaagtgctgggattacaggcatgagccaccgcgccccgccaagacatgacatcttttctttttacttttttagagacagagtcttactcttttgcccaggctggagtacagtggtgtgatcatagctcactgcagcctcagagtcctgggctcaagcaagcctcccacatcagcctcctgagtagctgggaccacagatgagtaccaccatgcccagctaattattttttgtaaagacagaatctggccatgttgcccagactgatctcaaacttctgacctcaagtgatcctcccaccttagcctctcaaagtgctgggattacaggcatcagccactgcacctggcctgtgacttacattcttttttttttttttgagacagggtctcactgtgttcccccaggtggagtacagtggcatagtcacagctcaccgcagtcttacctccccgggatcaagcgatcctcacacctcaacctgagtagctgggactacaggtgtgcaccaccacgcctggctaatttttgtatttttttttgtggagagggggttttgccatgttgcccaggctggtcttaaactcttggcctcagcaatcctcctgactcagcctcccatagtgctgggattacagctgtgagcagccacccctggccacattcttaaacgattattctgtatagtaaatatgtgttgagttaattaattaatgaaaagaaatcctcaagatggaccccaataccataagcatggagatctgacccattcctcattaagaaacatttatttggataagaaagaaggcctgagggctaggggccggggctggcctgcgtctcagtcctgggacgcagcagcccgcacaggttgagaggggcacttcctcttgcttaggttggtgaggatctggtcctggttgggccggtggagaaccacaaagctctctggaggaaggacggggcctctgttctcttctacctggcccatcagcagataactgactcctggaagaaggagggaggggttgagatctcttattcttgagacctgtcagcaggtctcaagattccacaccttgatcatttctgtgtggcttagcttgacccatccccatttccccacatctctgttacctttcttcatgggggggcactgcttgcaaggcacgtaaaacttcagggaggcaccagtgggtggagaaggcaggtccagtcctccagttttataagcaccaataagactgacagtcacggcaaggccctcccctggctcccgaaccatggacttcactgtcgcagtcaccactgtgggagaatgggagtgagagatgaggagatgggaggttccagatggcaggactggaaacagaagcaggaggtggttcgaggagctggaatggggttgggggtattcttaccaaggctgctggcacagaagttgctctgcaaggtgcctgtccggcggcactgctttgggcaggtgggtgcatctaggagggaggagggtggagggtgacctgctcagcaggtaggagggagcactgtccccataacagcctcattgacttgaactgttcagagctctgtcaggcttccggtcctagcacccagtaggggtcatcggcaggaaggaggcaccagtgagtaccagatgaatcaatgagtgaatgtagccaaggaagaacttttttgtttgtttaagatggagttttgctctgttgcccaggctggagtgtagcggcacagtcatggctcactgaagcctcgaccttcccagctcaagcaatcctcccacctcagcctccggagtagctatgaccacacgcctggctaagttttttttttttttttgagacagaatctcactctgtaacccaagttggagtgcagtggcacaatctcggctcactacaatctccacctcccaggttcaagcgactctcctgcctcagcctcccgagtagctgggattacaggtgtgtaccaccacacctggctaatttttgtatttttagtagagatgtggtgttgccatgttagccggggtggtcttgaactcctgacctcaggtgatctgcctgccttggcctcccaaagtgctgggattacaggcgtgagccaccagcccagcctaattttttatttttgaaaagacagggtcttgctatggtaaactcctaggcttaagcgatcctgctgtctggacctcccaaaatgctgggattacaggtgtgagccacagcccaggtcagaactttttgaaatggcccccttcagtctgtttccccttcctcccctatcccagactcaccaggggctgaaggagattcctctgttttctccggaggttgggacttggggggcagcttgactttaggctcagttccccgtttggggccgggcccttgcccttctttggcagtgccccgcggcagggtcttgtaggaggctgagaagccatcagcggtgacactgagatctgagacgaactggacgaggagttcattcccttcggaggagatggagctgcaggtggccaccgagcattgggggaagtgtcagggcgggcgtgcaccacactcttctcagccccatgaccttttttgtttgtttgagacagggtctcactttgtctcccaggcttgagtgcagtggctccatctaggcttactgcagccttgaccttctgggttcaagtaatcctcctgcctcagccccgcaagttgctgggactacaggcacgccaccatgcccagctaattattttgtatttttggtacagacaaggttgcgccatgttgcccaggctggtctcgaattcctaagctcaggtgatcctcccgcttcagcctcccaaagtgctatgattacaggcatgagccactacccctggccaggtggccttttaacttcgtcccaacttcgcagagccccagtcgcctctctatccgcggaccccagacccggggccaaatctcctctttgcctggcctccaacctgctcccctcgccggtttggagccctggggttcagatcccgtccctttagctgaaccccgcccctccaaacagccgcgtgcgtgcggtccgccgactctctcccggactcgcccaggtcccgcccctcaccccgggactgcgtcgccgcagaacttccccagcctccgggagtcgtcgctcacggctccgttgaacacgctgaccgagtcatagcggcagtaggtgtccggctccaggtcaaacttctcgaaggtcagcgcgatgacctggcggcgggcggaggcggggactgcgcggcgggacacccctgggcgcctgcacctcatctcctactgggtgcctgcagcagctcccactcccacctcccgcgtcctctgggcccccctcctgaaggcgttcacaccacagcacggaggaccacacacacccatgggaccctgcaggggtgtcggtcgtcgtggttggcaaggtcaagtcctggcgcactcacaagtgacaggcccgcgtgttataccaggaccctgtacctcgctctcctgagacttgtctcagttgtaatttttacatttttgtttgcgtgcatgcaggggttggggctgttttgggtgcccaccagcgcaagcgcagtgctcgggacacagcagatcttcaataaatctctgctggctgcaagctggagggcgccgcctgggtcccctagggcagcccggggaggagggtcggtacctggtccgggggcgcgatgatgtgccaggaacagctgatgcccggggggtaatcggactcgggccagttgggcgtggtcagggttccctgggccttctccagccgccccccgcaaaattggtgctctggggaggggagagaggagcgggggtggggggcggtggagaccctcggtcagcttcaggagaactctaggctgggagccccggcaggcagctcggatgtctggggctcaggatgaggggacgagaagaaggggaggtaagatgggggcaggttaacagagagcggccgggaggagcgcggctcggggaagtctggggccgcagggcgcactggcgggcggtggaagcgggaggaggaactggctggacgcccccttctggcccctccccgacccgcggccgcaccgcgcctcttcccctaggagatcccatctccccggccctgcagcagagtcccctttcaggctggagagggtgtcctcgacttggggcacagcccccgaggacccctttagggaggtccccgcctgaaacattgcaagggagacttctgccgccaggagggggtgatgggaccgcaatcgggagcccagggctgggtgtaggggccccccggggttggaggaacctagtccccccagccctggggtgccccctcgcgcccgacggagggagcccgattgcggacgggggccggcagttactcaccgtcccagtaaccccaggccgcccattccacccgcgggtcggtgacccatttccgcctcgcgcctggggggggccctggaagagggatgggtgggtgcgggaggaggggagagaagacggggaggagggactgaaggggcggttagtgaggaaaatgggtcagggaggtagggggccctaggcactggggcgcggggtgggcggggcggaagttagggctgggggcggggctgcggccggggcggggcctggagggggggaaggcggaggtgagggagttctcaccagtgcccgaggtggcccgcccgctgtaccagagcaggaagcctcgtcctcctgtgccctcatccgtcgtcatcctcagggtcacctggttgccgggggcgactaggggcgcaggccggaaggtcccacaaaagcgtccgagccgctggccggaagtcccagacccagcgaagacctccagagcatcgtagcggcaggcggggtgcagctccaggtcgaagactcggaatgagagggacacagtctggccctcggggacctgatagcggggacagaggcggggacccacagagtcaggccccacacaacccagccagagggcagctcccctgccccaagcgtttcttgcagaaacggactgaatgggaaggggcctccatgtgagtgcagagcagagggcctggtctctgcagctctgctggtagcctgtgcaggggacaagagctgaggctttggaagaggagggagggccggggactggagaatgaagatttgagggaagggttaagatgatgcgtgttacggtgggaatgatgccttcagtgacagagggaagacacttggagctgccccaggttgagaaggtggtgcgggggggacggggggggggtcccttcgcagtcaggcctttttgctctgagactttaacaaggggtagtgcccagaggggtttctcaccgttatggtccagatgcactccttattaggggggtagaggttggggaacccctcacttgccacgtaacctgattcccccttcacatcccctccgcacaggaacacgggtctggagaacagaaaaggggtcaggaaagagcagggacgggtgggacgggggagcactggcaagatggggatgaggtgatgaggatgaaactccaaggagggaagctgggggatgaaatggaaaggccttgagagacctggggcagcttccaccagccaggacagggctggggtgtcccagactcccacaaagataagggaaaagtgggcctggcaactcgaccatccctccaaccccaagagtccccacccccaccccaacaggaattcccggaatcctcctcggccccccttccagactcccgcctcactctgcctggcagtccagggacaggagccgcctaactacttccagatgtggacacagccacgaggcggtaggggggagggggtggagagatggagggagctgcagtggcgatggccctctgattgaacctggaggccaggctccgcgagttccacaccttagccctgcccctgttccaaactacttcagattctgactcccaagtctccactcactgccccctcctccccctacaatccctctcgaattccttcctggaatccagctaccaggcaagttcaggagcttggctctctcttgggttctatggggggtcaaggatctgggtgggtggggagacttaagagaccagaggacgaaggtgggggaatgggagcagtggtggcctgcaggagaccaaggtcttgcagcagatggggaggatttgggggccagagaagggtgaggcggtggggaatctggggagtggtgtgtcagcaagggaacccaaaatatctccaggcataaccccaaaggaatcgggggtctgaagttcactggagctgtctggaagatgccaagagacctacctggtgtagttgggggtctggccctgggcaaaaggcagcagggcgcaggcagtgaggaggggccccaggagggaggctgtggctgcaggcagcatggccccgggggaaaggcgctggggtcctcaagacagaggcagcagctgaattttgcagagcagcagcagcggtggcggcagcagcaggataatcagcgccagatggggcagccttgggtgtgtgggcgtggggactggccagtggggcgggcaatggggaaggcgggacagtggcgtgtcctgggacctctctaggtctaggacacataaatgttgaccttaggagggggaggagcagtgaggggcagaggccgtctcccaggcctcaagtaacgtcatcgggaaccccactctgtccagtgagggagtatctccgggaacttctgaggactccctagcccccatcctccccccgcccctgcttcctcagctcaggagccctcattgctcaccccctgcctgaccacccctgccagctcattttccacttcaatttctttttttttttttttttttttttgagacagagtctcattctgtgacccaggctggagtgcagtggcgcgatctctgctcactgcaacctccgcctcccgggttcaagcaattcttgtgccttagcctcccgagtagctgggactgcaggtgcatgcctccacacctggctaatttttgtatttttagtagaggcagggtttcagcatgctgtccaggctggtctcaaattcctagcctcaggtgatccgcccacctcggactcccaaagtgctgggattataggcgtagccaccacacctggcctccacttcacatctccattgccttctctccagacctgggccagactaggccaaggagaaggaattctcacccatgacctcttccaactacttgaaggtacaggaagcaaggcaggaggcatggggtgtggatgaagggagtgtccttgttactcaggaagaggtggaaggagtagaaaatagagcccaaacctgggaggtaaacagaagggagagaggaggggggctggcttcaggccgaagggagatgggtgggaagctttcgggggtcaggaggaacaggctgcctcaggatggggacaagtctagtgggcaggggatcccagtggggtagccaagagcatctgtgcatagagttgttccagaaggtagggccagaacttcccagtccaaacgaccaggtgtgctcttgggagcagggagtggacaacaatgtgaagggttcaggcagcatcagctctgctgcacctgagacctggagctgcttgtgctgcctgcccctgcctgggctcctgccctcctgcacccaccaagccgggcacccacccaccccatccctgcccctgtccctcccagcccccaaggcttccacaccaggcctcgctgcagccttttattctatccatcaaatctcttgtccatgatagtcaggttgggggcccctcctgggcagccccctgaacattcttaccctggttagccgtccccaccccctagcaaccccttcccacacgcatgtgcacaatggtcattgctccttagtccctggcctggggccggactccctcctccagggactaggctagcatgagggggattaggtctcaggggctgggggccctacaccacccccgcctccttcagccctctgcagcatgtccagggcctcccagaagaagtccttctgtgcggccatcaggggcatccaccctacgatctccttcatcttctccgtgcggtcctgcaacgtttggcaactgtggatctggctgaggtactcctcgcaggcctgggccatccccccggggtcctggggtgctctggcccccaggctgggctcaggagtccccaccaccctgctggctggcaggtggcgatagggggcgtgctgctcaatgtcgtggctggacaggatgtataggcactccctggtggcacagagggcacaggcacacagagggaccttggaggaggagagaaagggggcatggctgagtggtgctttccttgcagggtttcccagggtgcccgggctaatctgcctattgcattcttccctctcacaccagccctgagccggctaagtcccaggggtgtgtgaggttgggcaaggccagcacagtctgctaagggagaaagcagagagcgtggtgtgcggcagaggagggaggtggggtggtgctagggaaatgggaccccctgggtccctgcaggagccccagctacagcctgtgggcttcctggttcatggctctcatcctccctgggtgcccactctcctgaccccgctctgaccttgacttggagcttgacgaaggaggcactccccttgggccagcctgggaggcggcccccagccccacagccgcagcccagcagctccttgctgaactctgagctctggctcagcaccagggagtggttgaggccgcaccacagggtgatgggccgctgcaggtaacaaacctggggacacacggccagggtccctgagcagggagcaccaagggacgggggggctggggtgggaaaaggttgactggaaggctcggggcagaatgaactggggaggaggaaatgggagccagcactgtcccacgccccaggtatgccctgctgacccctgcagcccccatactctaactggtcacatagggtcttgcacttctgttggtatctcatctatgcccccagaaaatcagctccttgcctgagcccagggcctgctgtggtgtacccctcattctcagcccacccgtctatgccagtccagcctctcatcctgcctgccagcctcggggagacttgcttcttgtgcaattccaggttagaccccaacaccaccctgaggaaggactttcccttccactatccctcccttcctgctctagtattatcttttctttctttctttcttttttttttttttgtttgagacagagtcggaaggctggagtgcagcagtgcgatctcggctcactgcaacctctgccttcctgggttcaagtgattctcccacctcagcctcccaagtagctaggactacaggtccttgccaccacacccatctaatttttgtatttttagtagagaaggggttttgccatgttgaccaggctggtctcgaactcctgacctcaggtgatctgcctgccttggcctcccaaagtgctgggattacaggcatgaaccactgagcccagcctccactctagcatttttattttctcttttctttttttagagatggggtctcattctgttgcccaggctgaaatgcagtggtgcaatcatagctcactgcagccttgacctcctgggctcaagccattcttctgcctcagcctcctgagtagttgggaatacaggcatgtgccaccacacccggcatgtgcctataatttttaaattttaaatttttaaattttctatagagatagtgtctcactatgttgctcatggtgatctcgaactccgggcctcccacctcagcctctagcattttttttttttttgtagagacggagtctcgctctgttgcccaagctgaagtgcagtggcacgatttcagttcactgcaacctccgcctctccagttcaagcaattctccttcctcagcctcccgagtagctgggactatgggtgcacaccgccacacctggctaatttcttttgtattttagtagagacggggtttcaccatgttgcccaggctggtcccgaactcctgggctcaggcaatccacctgccttggcctcccaaagtgctaggattacaggtgtgagctagttgaaatgcttagcctagcattttcaacttatcacataattcttttccaaaatggccaccctgtttttgaaaaaaaagcttctacttgcttcctgccgcttcctgcctctctctcttaagcagcagagttggttacatgaccaatctgaggctgaccacattactgttccttcccacagccagtctatccagcacctccctgggatctcgcttttctctctattacattactgacatgctctctctagaggcacttggcctctcagtggctaaatcccagggcgtcttctgccccctcattctcctgagcctgttagcgctttaattctgaagacactgataagtaatttatggtcattctagaaaaattatgaaacattggcaagcaaaaaattaattttaaaatcattggaaatcccaccatctactattaacatcttgctagatattcttcactgttggctaaacaaacaaatacacataaattgtatattttttattttttagagatagggtctcagtgtcacccaggctggagtgcagtggtgatcacagctcactgcagccttcaactcctggcctcaagcaatcctcctgtctcagcctcctgagtagttgggattacatatgtatgccaccatgatgggcaagttgtgtatttttaaacaaaaaatgggatggggccgggtgtggtggctcacacctgtgatcccagcactttaggagtctgaggtgggaggattgcttaaagccatgagttcaatataagcttgggcaacatagcaagaccctgtctctaaaaaaaaaaaaaacaaaaaaaacaaaaaaaacaaaaacttatctgggcgtagtggcgcattcctgtagtcctagctgcttgggaggttgaggcgggaggatctcttgagccctggagttgaaagctgcagcaagctacgattgtgtcactgcactccagcttgggaagcagtggagaccatgtctcaaaaaagtaataataaaaataaaaagaggctgggtgcggtggctcacacctgtaatcccagcactttgggaggccaaggtgtgcagatcacctgaggtcaggagtttgagaccagcctggccaacatggtaaaactccgtctctactaaaaatacaaaaattagccgggcatggtggtgggcgctgtaatcccatcttggcaggctgaggcaggagaatcacttgaacctgggaggcagaggttgcagtgagccgagatcgcgccattgcactccagcctgggagacagagcaagactctatcttgaaaataaaataaaaataaaaataaaaataaatggtactatgtaaaccatttcataaaagtctttttcacctaaaaatatggcatgactatcttttccatgtcagtagtaaatgtatcttacattgtcacaccatcaattaaccctaccacccaccccatttggaacttccttctcatgtggcttctgggacagtgttagaggggtgcacggcctgtcttagaggcacctcttcatcccctgtctaccacagggcctacttctcagagttgcttttcagtctctacttctgtttgttcaaccatgttcccaggtagaatctaattgccagctagacgtttccaattgagtgtggtttttgttttgttttgttttgagacagagtctctctccgttgcccaggctggaatgttgtggcacgatctcggctcaccgcaacctctgcctcccaggctcaagcaattctcgtgcctcagactcccgagtagctgggactaaaagcacccaccaccacacctggctaattttttattttttctagagacagggtttcaccatgttgtccaggctgatctcatgctcctgggctcacgtgatccacccaccttggtctcccaaagtgctgggattacaggtgtgagatatctttcttccagagccacctctgtcttatacccctctcttctacatctaatcagttttgaggccctattcattttcttcccaaatagctcctgtatccattccttcccattctcgctgcagcaccaggcgcttgtctcaagtgctgtcatcactcaacagcctcctggcgggctcccctccttggcctcctctgcacaaggctcctgacacattctcagtcacctcttgggggttgccttctcctattccagaacctgcagtgactcttccccaaatctacacctctctaagcttgtgcccacctgtaccacctcatacctcagtgattcccaagatgccttctgtgctttagtgagacccgtcttgtcactgtcccaggtatgtgcaagtttcgtgcctatccccctcctcatcacacagaatgccttctctatccctacctaagtcttatgtaacccacgatgccctgctcacatcttttttctttttctttgagacggagtctcgctctgtggcccaggctggagtagggtggcacgatctcagctcactgcaacctcagcctcccaggttcaagagaatctcctgcctcaacctcctgagtagctgggattgcaggcatgtgccaccacagccagctaattttttatatttttggtagagacggggtttcaccatgttgcccaggctggtctagaactcctgacctcaagtgatctgtccacctcggcctcccaaagtgtcgggattacaggcgtgaggctctgcacctggcccctgctcacatcttacctcttctagaagtctctagcctgcccaggtcacccaccctaccccttcactaaattcctattgcatttacagtgtgcactgcacagaatggacctcgtagtgccaaccctgggtaagacatggggtagtaccactggcattacatactgagtggcttaacttcccaaaggaacagaaattggattctgtggaatctggagaagtggacagatctgggggttagggaattggaggaaaggggttgggatgagagttgctgggaaatagtctcacctgtgtgggttcccctcggtccattttgtcccctgttcctagctgcccgtatctgttatttccttgcatgaagattcggccaaattcatccaccaggccaaggtggttgtagccaagagcacagaataggatctagcgtgcaagatagaaaggggatagggattccattccctccagaggaactctgagttccagagtctccaagccactaacctgccatccccagctgatctctttctatatatatattttagagatgggatctcactatgttgcccaggctggtctagagctcctgggctcaagcgatactccctcctcagcctccctccgcaccgagcccccagctgatctcttttggcatacctctccctggggatcccctgcccctctggatcaataatctgattcctataatacttcagaccttccaatccctacagcgccacccctctggtttgccccgtccctccaggagcctaccttggcaggcagtgagagagcaagcggcatctgctggtccagggggtcaaaggcttgaagggtcccaaagagatcgcgatacacccctggggtatgcacctcaaaatacactcccccctggtctggggggtcaggagccctcagctcagcagctttgggcacccatttcctagggataaggccccacctgggatgaaagctacaagatccaaggagtctcatacccactaggaatgcatcaactatgatgcctgggaactgaaaacacatcttttgagaccgagtctccctcggtcacccaggctggagcgaagtggcacgatctcagttcactgcaacctctacctcctggttcaagtgattctcctgtctcggcctctggtgtagctgggattacaggcgcctgccatcacacccagctaatttttgtattttagtagagatggggtttcgccatgttggccaggctggtcttgaactcctgacctcaggtgattcacctgcctcggtttcccaaagtgatgggattacaggcatgagtcaccatgccggccctaaacacatcttttcactaggatgccctcaggggttcaccatgcagctggagtaagggtgaagggtgttgatgtttagagggtctaaccaaggctgcgggcttgagccggggggaggtggtccatacctgtgacgtagagggtgctgctctggttggaagtcatgcaggccacgcgcaggtgaggcaggtagtgggacaccttcctcagggccagctgaaccgtgtaggagcgtggctggtcaagctgggtctcattcactaccaaagagtagatctttccttcctctgggggtaggggaagcaattagttggggaggggattctccaatatccacataaacatcccaagagactccctaggccatatgggtgacacatttactgccctagagtggggctgagaaagaaataagggaagagtgaccccaagtcccccagactccagttcccaccataaatcagggaagtacttcagcatgagagatgagcagagagaaaaatctagcagatttgttagaatccgatttgagtgagaggtctggggattgagggccctgcctggcattcagaagtttagaggtggtcaagtgtggtggctcacacctgtaatcccagcactttgggaggccaaggcaggaggatcacttgaggcagggagttcgagaccagcctgggcaacatagcaagaccccatctctaccttgctccaaaaaagaaaaaaatattttaagaaaaagcctaaagggtctcaggcctggggatgtggttgagtataaaggacattgggaaagtagggagcagtttggagtatagtgaggtggttggcatggaagctggggacatctgatttttttttttttttttttttttggagatggagtctcactctgtcacccaggctggagtgcagtggcataatctcggctcactgaaacctccacctcctgggttcaagcgattctcctgcctcaggctcccaagtagctgggactacaggtccatgccaccacgtccggctaatttttttttttttttttttttgagacggagtctcgctctgtcaccaggctggagtgcagtggcgtgatctcggctcactgcaacctctgcctcctgggttcaagggattctcctgcctcagcctcccaggtagcttagactacaggcacgcgccaccacgcttggctaatttttgtatttttttttagtagagtcaggcagggtttcaccatgttggtctcgatctcttgacctcgtgatccacccgccttggcctcccaaaaactgggattacaggtgtgagccgccgcacccgacctaatttttgtattttttagtagagatggggtttcgccatgttggccaggctggtctcaaactccagatctcaggtgatctgctcacctcggcctcccaaagtgctggggttacaggtgtgagccaccacacctggacagggccttttattcatataaaatattaagcagaatcctagactaggagacagagaagggcagagctgtttagatggagactaggataaggtggcatatggaacccagtctgaggggcctccctccccctcctctgcagcagggtctgaggaatctgcaggaaacagtttgcaaaagccattgctttgggccacacctgtgaggagcagtagagcccgctgggtctcctgaccaaccagcacgatctgcttgaaggtcattgagtggtggaatgtcatcttgaagacccgctgcccactagactgcagatagacctcaacacagtcacaggcccggctgctggtggtacccaccacttcctgcggctcccgagtggccaagacgtagaggtatttacggtaaactgtgtcacaccttgggtccgaggcaaactgggggaaaagatgagggcgtctgggatctagagtttcaaaatgggatggggctggggcagctggatcctggggtgggaagtgaaatgcttgggtccagagttgggaaatgagcccttgatttcaggttcctatgtgggagggcagaagtcataggaaagacacctcaagactgatgggggcctgggtcctcaaaagagaggtggtgatatggttaggctctgtgcccccacccaaatctcatctcgaattgtaatacccagtgggaggtgattggctcacgggggcagtttcccccatgttgttttcgtgatagtgggttctcacgaggtctgacggatttataaggcagttttccctgctcttgcttgtgtgctctcgcctgctgccatgtaagacgtgcctctttcccttctgccatgattgtaagtttcctgaggcctccccagtcatgtggaactatgagtcaattaaacctctttgccttataaattacccggtctcaggtatgtctttttttttcgagacggagtctccctcttgttgcccaggctggagtgcaagggtgcgatctcagctcactgcagcctctgcctcccaagttcaagcaattctcctgcctcagcctcccaagtagctggaattataggcacccaccaccacacccagctaatttttgtatttttagtagagacgggtttcgccatttggccaggctggtctcgaactcctggtctcagctgatccgcctgcctcagcctcccaaagtgctaggattacaggtgtaagccactgcacccggcctctggtacgtctttatagcagtgtgaaaatggactaatacaggtgggctctcagctgccagggttctgctactcacatccttggctccacgacacaacacaacatagcgacaggcccgcttccactgcatctggccgagggtggagaccagggcatttttgaggaagaagagggtccccacgtagtcaagaatgaagacgtgatccttggtgggcaagaagcggcggtagccgtgggctagcaagggggccacgctcttgctgagacatcggcggcggcctccaaatgcctggaaatacaggcccttcgtgtctggaggaaggaaggagatggaaggttcaagggatgagatgacacgagggagatgagttggagcttgggtagatttcttagacacgctggtttgtagttcctccccatccccaggacaggggaacaaacagaccccttatgaaggagatgtggaaaataagcttagattatactcgacatgtgaactttagtctccaccccacctcagcccagggtcaaacatttgcttcttagtgagcagttctttggtgcaaccttgcatcagtgatgttgaggaaaactctaagaataaagacacagaggctgcgtgcggcatccacccccctcaccctgagcccctcctcccatcctcacagctcagtgaatttttgcacgcctgtaatcccagcactttgggagcccaggagtttgagaccagcctgggcaacgtggcaaaaccccatctctactaaaaatacaaaaattatccgggtgtggtggcgggagcctgtaatcccagctactcaggaggctgaggcacgagaatacttgaacccgggaggtggaggttgcattgagccaagattgcaccactgtgctccagcctgggtgacagagcaagaccctgtctcaaaaaaaaaaaaaaaaaaaaaaaatcaaagaaaaagaaagaaaagagaagagacagaaacaggagtgaaaaggaatgattgatgaaggccggtcatcctccctcacccctagctttggatctgttttctgggtcccccttctcttttaatctcccagtgagtgtaagaagtacaccctgggggatccctggaggggaagagggtttatggcatggttctcaggctaggggtgattttgtccttcaagggcattggttgtcacaattaagggggatgctgctggccatctggtgggtggaggccagggttgctgcttaaacatcccaccatgcagaggacagctccccacatcaaggaattattttgcccagaatatcaacagtgagttcagaagccttgggttagaggagggaaaactccaggtttggggagtgagggatgcctctagggaaaaagcgggaagtgtctgtgtacagagggagacttggcagggaggccgctaacgggggctgtgggtggattccgaagacttggaggaagtactcaagggagaatgtttgaactggacccgtttcttccggagaaaggggccctggaagcactgttgggagtgtgggggtcatcaggggactttagagagcaggaaggctaaggcgggacagaggcaaggagaacgggaggttctggggaaggtgtacagttcagaatggcagctctcttccagggccggactccagaaccctgatcttggaggcgcggactgagtctgcgacagatgcgtctccacacgccttccccatcgcacacttcgtggaagtagcggcaggtctggccgagggcaacaaggtctctgactgggaggaatgagatgatatgctccacctgggagggaggagggaagaagcggggagtctttggtggcccctcggtgatctggcccccaatcctattattctcaatccccctccccaaggactcaccagctctggggggaacaactggatggaaatcggatttcctttccccctcttctcttcaaccccaagctccgagccacaagaagggcagcttctcttcacctacccaagaaggggtgcatagggtcccatgagggtcccacatccttttttcccttctctccgcctaccttggggctcatctgactctagctgggcacagttatttcctcccctctctctccagacccatccctaacttctccaaataactcctcccgatctcctgcggccaatccccctcacccggagcccctcctcccgtccacacagcctggtgaatttttgcagcttccgtctctggcttcccctgaccatcctgattgccccctccctgctcctgccctcctgtctcctaggcccttggcccccccgttcctgctggctttcccacaccatgtccccagcctaggcttgggggacctctgaggcccctctgcctcctaggcccctcccccatggagtctggggctaacaaacctctctgtgacctcactgtttggccactgtgacctgttccctttaatcttgcccaggacccatctcttagacagctcctgggttctagctcagttctagccatcacatggctcaagggatatgcattttactggagaaataaagtgtgaattactggtaggtgacatctttatttcagggagcaggaggaagttttcctatttgaggcccttttagcactaactctgtagagaaacactagtgaattcctcacatttcagcaggccaaggcctctagggattggtagctcaagagtatagactcaaaaaactataaactcagtttgacaggtgagatggagaggtgactgtgctaataatcgtttagctcacaaatgattcagcaaactctttagacttgtgaaaaaacacatccaaaaggagactgcagcctggtgccggtggctaacgcccgaaatcccagcacttttgggtggccatggtgcaaggatggcttgaggccatgggtttcaagaccagcctggtcaacatagaccctgcgtctattaaaaaaaaaaaaaaacttaaaaattacccaggcgtggtgatgcacccctgtagtcccagctacacaggaggctgaggcaggaggattgcttgagcccagtttgaggcagcagtgagctatgatcgtgccactgcactccagcccgggcgagaatgatacccagtttcaaaaaaaacaaacaaaaaagaagactgcttttgctttcctgagggacagtaacatcattgcatgtataaaggacaacctattaaggtgggagaaagggatggatttcctctgaaagcttaggatttctcccagggtctctgatattagctttgtcttatgtggggtgacatttatcaggagaaacagcaggggtcagggttgtgtctgtcccactcaggccagatctacaccaataaatccaaggagtggctggctcttgcaggggctcaaaggagtcccatcctgccagaccaccagccctcaccacacagtgtcacagatccgttcattgactgcaccagactgaccacccaaattcccttatgtatggtgcctagccatggctaggctgggatgcctgagatggaattttaattcttcagcaactactcaggaatatcaacctctgagatgtgaactaaggagaaagcaacttcagtgacttatttctgggcaacctaccacatagggaggggactgcattagggactcatgccacttagaaaggaagatctccaagtagacagaaaggtattttccattcctcttgcatttgggtcccctttatccactccatttcaccccaggaggcaaacgagaggttgtgaatagaaaaagtccactgtgggccaggctttgtggctcacgcttataatcccagcacttcgggaggccgaggtgggagcattgcttgagcccaggagtttgagatcagcctgggcaacatagtaggaccctgtctctacaaaaaatacaattagctggcatggtggtgcgtgcttgtagtcccagttactcgggaggctgaggtgggaggttgaggctgcagtgagctgcgatcaagccactgcactccagcctgggcaacagagcgactctgtctcaaaagaaagaaaaagtccactgtgggccgggtgcggtggctcacgcctgtgatcccagtactttgggaggcagaggcaggatcgcttgaggtcaaaagtttgagaccagcctgggcaacatagcaaaaccccatctctacaaaaattgaaaataaattagccaggtgcagtggtgccgcccgtggtcccagctacttgggaggctgaggcaggaggatcacttgagcccaggcattcaaggctgcagtgagccatgactgcaccactgcactccagcctgggcgacagaatcagaccttcttaaaaaaaaaaaaaaaaaggccgggcgcggtggctcacgcctgtaatgccagcactttgggaggccgaggagggcatattgcctgagctcctgagtttgcgaccagcctgggcaacacggtgaaaccccgtctctactaaaatacaaaaaattagccgggtgtggtggcgggcgcctgtagtcccagctactcgggaggctgaggcaggagaattgcttgaacccggacagtggaggttgctgtgagccgagatcgcgccactgcactccagcctgggcgactgagcgagactccatctcaaaaaataaaaaaataaaaagaggaagggaacggaagggagagggagggagggaggaagagaggaagggagtgaaaacatccactgtgaaaactgagggagcgggaaagggctgtgcgtggaggatccagagacctggtttctagagcaagccagctgtcaggaacttgctgttcgctcttgctaacgcatcaacttccctctgcctcagtttctgcattcgtagcaccaagggcgtgttctaggcggtgagatcctttctaagcctctaaaaccccgtggtctggtcccctctccattcctgtccaggggagctcctcgggtgagacggcagaccgtgcaacgctgcacctacaccctccctcctcgagctgggcatctccaggctctgggaagccccccgcccgcccccagcccgggggtcccgagacccctgccagaggcttcacagtcggaggtccccccgctgccccttcagctgcgacaaccgccagtgcactggcctcaagcagtcgcccgaatcccctcaagccctggacgccggctagccccctaacacgtccagctcgcactcgccactgcagcggcgaactgcgttcccggccggccaggggctccgcgttcattcttaacctcagtcttaaagttctagctcacccgcctcctccttagcaaagggaccgccttctcgcccatgctattggtaggtagagccgtccctcagagaagaggcaggtccagattcccttcggaggctctaattggccttcttgacagtcactcgcctgtatctggcttacgattggtctttgggggacgaggactaggcaccccctgcttgcggtccctcggcccgttttcctgctagtggagtgccggtgtcccctcctcttggttggacctgattggctccacctcccgatctgagcattgtgattgggtgcagctgcgctgggcgggacggcctggagcgtcggccgttggcgagcgctctatccttgttcccctcccttctctcgtcagactccggcgccggagctccacccccactgacgggttctgattggccgcttctgacgcgtctcggggccacgattggtccgtccggtcccggacaccgctccctcccccttgaggcaactacggcggctccaaggagggggtgggggaaggagggacggccggtcccgtcagtcaggcagcgggagccgccgggagcggatggcggcggccgtagcggctccactcgccgccgggggtgaggaggcggcagccacgacctccgtgcccgggtctccaggtctgccggggagacgcagtgcagagcgggccctagaggacgccgtggccaccgggaccctgaacctgtctaaccggcgcttgaagcacttcccccggggcgcggcccgtagctacgacctgtcagacatcacccaggctggtgagtgcagccgggccccgggcccaaccgggtccctcatttgcatagccccaccccgggccccgcccggcccggggagtcgggcccgccccttcacctggcggccaggttgctgcccctcctgattgccctaaacctgcagccatcttctcccatctttgagaaccccctagacaatgaacgtgcttctcgtttgcacagaacgccctgcgcctccgagcgttgggagagattcctcctttctctttatttgcatatctgcgcacctgtaggatggtcccgcccctcacctggttggcttatttacatgatctcttaacctcagctccaatcggtctatgaagcagtccccacgagctcctctaataactgctttctctccctcttcatctacacttcttaacccccgtcccaccgagatccgagcagccccgggcacccccttcccagtgactggcccctaagcccgaggtttctgctttctgtgccgcaaccccgccccctaaggtcctggccctctccactgtccacgcagctctccagcctatgggaaagaaacaaatctctacctcccctcactcttttctccctgagctcttccgcctattatccccaaccggcttatctgagattcctcctcctccttcctaagcctgtgaggtcactgtggagcctgtgacctcatagggatcttagaattcccatttcagtttctgctttcccccgggggagggacttgaggccgttgctggagggaaggaaatcttatctcctagctgggagtgctggccagctagagactgtccttccacgcctccacccgcaggatctgtccaaccatgcaccctccaccctggtgtctgtggatggtagggggtgggggacttaactgtgacaggtgagtcaagcctcagctactcaggaggcagcctatgaccttgggccggcagctgggggtggggatcaggatcagggaggaggactgcattcccgaagcctcaccccagcccaggcctcttcctcctctcatctgcacggtgggggaccagagctggaggatagtgcttacttctccctaagcaggtgcctgctcacctgggaacactcaggccggcactggcacacatcctcttccctcttctggggagaaccagtcgaaacctccccactgatctcgcctgctctgcaacacttgagatggggaatgagtgagctccaggagccattcctgccccttacagccctgttccctcccacccccacctaaccccacactccagattgacctcagcagctgtgtgacactcactgtctgttcccttcccctcccccttggttgttttttgacaaagaccaaatgttattctttacttccttaggctgtctctccctgtgtggactcttggggaaaactacccggagctccccggcccctcccagctcccgcccccggccccctcctcccccagcattccggctcagggtgcagccgtgctcctgtgagcttgggggggggtcggaaatcccagcttcccaagaaccctcctctgccccactctctacacagggcccaggttctaggccaagtggggtccctcttgtccagaattctctcctctgtcccctctccgcaagcagggacagaaaggggaagtgacaaaaacatacagttgcccataccctgccctccatctctcctcgccctccaagcagacgaaaagcatcagtgccttgctgcccggactgccttgagccttcccctcccgtctcccatctctttctgagtgtcttcgctgcgtgtcgcctagtcttgggtccctgatctcccttggactaggctccctggggtgatagtaggaagaatcctgaggtggcggggaggggccatcttgcaaaggagaagtgcagctcattctctcccagaccacatcctgtgcccccagtgccctgcctcctgcctgagctcccttccgctcctagcttttgtccccgccaccgcctaccccatcagaactctgagaactcggtctccacccccttcgtccacatgcacacacacaaacacatttgcagagaaagcgggcaggtggaggcgaggctgggaggggcaaatgccatccccccaccctctccagaacggtcatctctgaggccagggcttctgtctgtgcaccagggctgggcagagaggaagagaaaggggtcccggggcatcaggctgtcatccaccctggtaaacacggggcctaccagagccagaacctgacagattgtttctacttcatttcctgtcacaagactcatttccttgggggatatacccggcttctctcctctgcttgcttttgctggcctgcccttccctgagaagggcccttggagaagctcaccaggtctgtggcctgggactccgcctcgcgggccctgggcccctcccaggacaggctgggccgaggaaacagaaaggcaggcttctccaggtctaagccgttagtgggtccgtgctacagggaatcccaaggctgccagcctccgcatagcaaggcagtgctccagataagagggcgattgtagaccccaggccctcccacactctccaccctcgccgtgcctgagatgctcacacagttgctgatctcttgaagtctgtgtcagtaagagaggaagcagagccgggctgctagggctagcagagggtaggaaggatgcctgccctgggccagagaagcccagatgggagggacctgggaactccagctcccatctccaaccaggtcttcttgcccttccctcccagcccttgggaatcagtaactttatgattctttggacctggcttgctggtccttggggctggcgaaaaactcgtccggtgtcggggactttatctctagaaccaagatagagtgacctgtggtttttcccgtgttgaaaacacactggagtagggaagaagggccccgaggagggatgggcactccctgtggtttgccccaggggtttcccatcttccctccgggagccccccagcccctcgccttactgttttcccatgagcactgacccctcctctcaccttcggtcctccgcctcacctggcatctctgaacaggaaccacaggagttagagattccagctgctctccaggatagccctccattgacattccccaacccccaagtctgaggcttctctagcccagtgacgctaaggcctttgccttccctgtgccattctggtcacgcctggaatgtgctcccgttggcagaaggctttgttatctctcctgggaggccacattgatggccttgaatctttaggtgtggaggtgagggagtgggcagccggctctggggggactgaaggtcctgtccgggctgggcctttccgcaactctccccgacacctccttttccccagacctgtcccggaaccggtttcccgaggtgcccgaggcggcgtgccagctggtgtccctggagggcctgagcctctaccacaattgcctgagatgcctgaacccagccttggggaatctcacagccctcacctacctcaacctcaggtagggaggccgagccagggccacgtgggagcgtgtgcttctcagtctcaagtactactgagtgacccacccagtgaccccgagaggatggcagtgctgggatgccatgcctggggagccagtccgctgcctttctcccttccacagccgaaaccagctgtcgctgctgccaccctacatctgccagctgcccctgagggtcctcatcgtcagcaacaacaagctgggagccctgccccctgacatcggcaccctgggaagcctgcgacagcttgtgaggatggggacgggaccaggaaagggacccctgagccaggcagcgggaccttctagggggaggttggggagggcctggagcaaagacagagatgggagggtgggttctgctgggcctggtctcatggccccttcccactgccttcctgataccaggacgtgagcagcaacgagctccaatccctgccctcggaactgtgtggcctctcttccctgcgggacctcaatgtccggaggaaccagctcagtacgctgcccgaaggtgagaagaatgaagaactggagaggaggtgtttgtatgtgcgtcccagttggctcaggctgcggtaacgaaaacactgcagaccgggtagcttatacatggcaggcattcatttttcacagttctggaagctgaagttcaggatctgggtgcttccatggtcagcttctggcagggtgcttttcctggctgcagactgccggctccttgtggtactctccgatggcggagagcagagacagccctctggggcctctttgataaaggagcacaaatctcactgatgagggctccaccctcatgatctcaattacttccctaaggcctcgcttcctaatcccatcactttgggggttaggatttcagcagaggactttttgggtgacacatttcagtccataacagtgtatgtgctttgaagaagttacaggccaggaatcttcagaggagaattacaccttcattgtccaggcttttgcagtatataaaacaaactgtaaacgatctgatttgatcttgacctagcaaccctctgatgctggcagggcgcagatgagcagctgtgttagaaacgtggacacaggcacagaaggggagctggtgggtgcatcagctctaggtagactggcaaggtcagaaggggccttcaaggtcacccagcagccctgctcaccccagcaggggctctcaaacacctgagtcgggatgctccgccactcctcccggagatgccagggccagtgccagagcccaggtggcccatctaatgtgcttgttgtgatgcactgatagcctctgccccaaagcaggcatgccttttgttcagcaggcagcagcatgtgtgtgtgtctgtgtgtgttatgtcttgtgtctgcgtgcatgtgtgtgtctgtgtgtatgtatgtgtttgtgtatgtgtgtgttgtgtctgtgcatgtgtatgtgtgtttgtgtctgtgtgtgtctttgtgtgtgtgtttgtgtttatgtctgttgtgtgtgtttaggtctgtgttgtgtgtgttgtatgtgttgtgtgtgtttaggtgtgtgttgtgtgggttgtgtgtatgtgttgtgtatgtttatgtgtgtgttgtgcatgttgtttgtgtctgtgtgtatgtatgttgtttgtgtgtgtgtgggttttgtgtgtgtgtgtgtgtgtgtgtgtgtgtgtgtgtgtgtgatgtgtgtatgattcctgtgttgggatcaggtagatgcgggtgatgtgactaagatctggggccatctcttagggatttaatggcttcttgaggagagacagtcatagggaagttccgtcagggggttccccagacgggggctagagggaggtggcactggactctgcgtgggggtcctggggaagacttcaccggaggcgcaggcgcagtgggagccgaacattgaaggagaattccccagccttctgcatccaggcagaggacccagcatgtgcaaagcatggggttaggaaggtgagccaggcatggcaggaaggcctgtgccatgctcaagtgtgaacttggttttgaagaacaaggagggagtgaggtggtcatccactttccctgtctccctactccctgaccctttctgcacctgccctcttccttcccagtcaaaaggggtaggaagggctctctctgggccataaaaagaaatccaagcaagatgtcctggggacagaggcaagagcaatgagttccatccaatctgggatgtctggaacgatccaccgaggaggtggtgatgcttgagctgaaccttgaaagatgcatggatggggaaaatggagttctcccagctgagcaaacagcacctgggaaggctcagaagctgagggcccggaggggtgggcagtgaggtgggaaacgcgggtggagccaggttgtggaagccttcctcatgctgggttagggagctgtgggttttattctgtgcttagggccgccatgaatccagactgtgccttttttttttttttttttgagacagagtctcgctctgtcacccaggctggagtgcagtggcgcaatctcggctcactgcaagctccgcctcccaggttcacgccattctcctgcctcagcctcccaagtagctgggaccacaggcgtccgccaccacacccggctaattttttgtatttttagtaaagacaggttttcaccatgttagccagggtggtctcaatctcttgaccttgtgatccacccgccttggcctcccaaattgctgggattacaggcgtgagccaccgtgccggtcccagactgtgcctttttaagatgagcaaaaggcacctttccctgtgggcaggcagcatttcatgcagggtgcagtgctgggcccgtgctggggaaaggggactcccgggcggccacaatccgctcaacatctgcagccctggttgcatgtcacaggaggtgtttgaacagggtttgtgccttgtgctgatcatttgaaaatggagggtgggttcgagtgtggagtgggcaggcgaggagatgaggaggacagacagggctgggcgggacctgacgtccggatgggccttcccggggaagctgagctgacgtccagatgggccctctcagggaggctcgcttagaccgtggaccagaatcatgtggagagaggagcagggaggtttctcccggggaatgacttgagccacccaggggagaggctgtgctgggcccagggtgactggccagctggagccaagggtgagggagtgagcacgaggccacagccctgagcatgttcctgacttttcccttgcccacctgttccagagctgggggacctccctctggtccgcctggatttctcctgtaaccgcgtctcccgaatcccagtctccttctgccgcctgaggcacctgcaggtcattctgctggacagcaaccctctgcagagtccacctgcccaggtgaggcgggtgcctggggggccacgaggacaggggtgtggctaggcaggagtggggttggtccccttggatagctgagcaggatccggggagctgccctccctgccaactccctggcgtgtgctgccccgcacacaggtctgcctgaaggggaaacttcacatcttcaagtatttgtccacagaggccgggcagcgtgggtcggccctgggggacctggccccttctcggcccccgagtttcagtccctggtaagtcctaggtggggaggaaggaagccctgggatactgaatgccccttcccggccccaggcaccccctgctttctggcaggaggatggggggctgttgtccagcatcaggctgaccagatccgcctggctggccccagccctgcagaggatctatttccgggacatcggtacgatggtgggctggactcaggcttccacagcgttgatagtggcagcaagaggtggtctggaaatgaggtaagggcgtcctgtccatgggtgattgagggtgtcagccctgggagagcacctctgaactggggacctccaaattgcagggtgccaggcagaagctggagctgtcctcttccttccctctgcccagcatccagggaagggctggctcagcagagacctgagcttagtccacacaggacccccaggtcctgagcccccatgtacagagaggccatctcccatctctgcctctgcctttacagtcaacagatgaattttcagagctgtcattccggatctcagagctggcccgggagccccgggggcccagagaacgcaaggaggatggctcaggtgagtagcacggctggccgggagctgggctggaccagggcctgggtccccgctcacttgctgacatgctggcctccccagcggacggagaccctgtgcagattgacttcatcgacagccatgtccccggggaggatgaagagcgaggcactgtggaggtgagagcccagctatgcctctcccaagggaggggagctggaggaggggacagggcaggcgtgggcacaggcctgccctcagctgctctgctgttctctccttaggagcagcgaccacccgaattaagccctggggcaggggacagggagagggcaccaaacagcaggtaccccaagcccccaaactgacgccactgcccgatcctcccaccccccaaccgcctccttccctgaccccggggtctgcccctcttgccctgtcttggtccctcaggcgggaggagccggcaggggaggagcggcggcgcccggacaccttgcagctgtggcaggagcgggaacggcggcagcagcagcagagcggggcgtggggggccccgaggaaggataggtgggacccagggccgcccggggctgttgctggacactgagccctggaaatggggccaccgagccccgctgagccgttctgccttggggctagctgaccccacctctccttgttccagcctcttgaagccagggctcagggctgttgtgggaggggccgccgccgtgtccactcaagccatgcacaagtaggtttcctgccagcatcccctccccactcctcttcctatgaccatcatccctctaattcccttctgtctctcctcagcggctcgcctaagtccagtgcctcccaagcagggggctgcagcggggcagggagccccgcccctgcccctgcctcccaagagccccttcccatagctggaccaggtgggacagggattttgggaggaggatggggcctgtgttggtgagggctggttgggagagagggacacagaggggatgcctgtctcacctgcccctgtcgctgtgtccctggttccggccccagcgacagcacctgctccacggccacttggctccattcagagaccaaacagcttcctcttccgttcctcctctcagagtggctcaggtgggtgtcctgccctccccagtgctgacccagtgcttgccagcaccaacggctacatcacccttctgccctgggagccctctgggtctgttgtaccttttgtacctttgcgttgaaaatcccacaagcaagccgggtgtggtggctcacacctgtaatcgcagcactttaggaggcccaggtgggaggatcgcttgagcccaggaattcaagaccagcctgggcaacatagcgagaccccatctccatgaaataaaaaaaaatcccacaagcagagaggcaggaggtgtaggtgccaggccactgggacccagctacagagtcagtggtgagcagtggaggcagccccatgcccccctttttctcctaggcccttcctcaccagactctgtcctgagacctcggcggtacccccaggttccagatgagaaggacttaatgactcagctgcgccaggtgagcagaggcgggagctgcgtgggcaggggcctgggccgggcacctccttgtgttgctgtccttgggaccagcctccctccacatctctgtgcccactctggcacctcccctgaggacaggaagggacaggcacaagttccctgctagccctgagccccccactctccctgcctcccagacgcctctccttccctgacccctgctctatgtggtctacactgccaggtccttgagtcccggctgcagcggcccctgcctgaggacctggccgaggctctggccagtggggtcatcctgtgccagctggccaaccagctacggccgcgctccgtgcccttcatccatgtgccctcccctgctgtggtcagttggggctggggaagaggtgggggatgggccggggcgcctgtggcctctcccttaccacattttcttctttcacccaccccagccaaaactcagtgccctcaaggctcggaagaatgtggagagttttctagaagcctgtcgaaaaatgggggtgcctgaggtatgggggctgctttctaaagagtggtggcatgccggactcagccgagcatgtggcatggatggtgggcttccatttgcagcggatgtctgctctcagatgaaggcacaggctgcccctgccctgcccagcatgccccctgccctgcatgccccctgccctgcatgtcacctgtcctacacatcccctgccctgcaggccccatcttgtcctgcatgtcacctgtcctgcacatgccctgccctgcactcctcctgcactgcactccccctgcccagcacgtcagcatgtgggcgtggttctggccccagcacgtgagggcaggggtgggagggactgtcctgctgctgctgctgacgtctgtcccttgtccttgtccacctgctctcctctcccccaggctgacctgtgctcgccctcggatctcctccagggcactgcccgggggctgcggaccgcgctggaggccgtgaagcgggtggggggcaaggccctaccgcccctctggcccccctctggtctgggcggcttcgtcgtcttctacgtggtcctcatgctgctgctctatgtcacctacactcggctcctgggttcataggccccaaaatcggccctccctcacccctttcccttcctctctatttataaggtccctgctccacccgaccccacctgcggtgccttcagccccaaccaaagacactagtgcacccccttcacagacactgacctcagaggccccactctggtgcccccagaccctgggcccccagcctctggcctccctccagtagccccacgagtccccacctctcagtgctgacggtgccttcatgtccccgccggccctgcccctgccctctgtaccccgtgaggggtggcaggagctggagtctcccccttcctcctgtgccctccccttccccccccaacagctgctatgggggggctaaattatctctattttgtagagaggatctatatttgtaggggttcggggcccaggccgggtccctatctctgtgtataaactgtacagaccgtggccgccctgcctgtgtgtgtgtgtgtgcgcgcgcgcgcgcgtctgctccgcgtgttggtggctgtggccatggctctgtgcccaccagcatctccctcctgagatgccggcctctcatgctcccggagcgtccgccaaccccccgtgtcacctcccttctgttatcgctgacagctttcttgcgtctcatttgtcgccgagccccgagcgcacggtgatgctcgggtctgcccccgaccccctgccacaggccggaagccgcagggggcaccgtggggaagctaacccggccccttcccccaggagtcactgtgccagccccaccacatcctggaagaggagggggccccgggaaggggcctcccctacatcgctgctgtcgtccacgccctgctggaccggccttaggggtgaaggtgggggcacagggcccaccccgcccgggaccccgggagcagaagacgcgcctgggctccgcgctctcagagaagcacgtggtgagggtggcctgggcctgggcacccttggcctgccggcctggctgcctctggggtcgagggtctgggtggaaggaccgcgggtgtcgcaggtgtcgtgtcagccgcaataaacagaagccagaagccctctgggtggccctcaggtgtaactgtgtctgagagcacgtgcgtcgcggggttgttgggggggcctctgtttccggaattcaccgcccagtcgccagggggcgcccgcgggagcccggcgggggcacgcgccacgtggccgggagacgcacagggcgccagcgtcgccgcgaggcctctggggtgggttcgccaggagggcacgttcgcgccgcgccgcggagggaggctgagagggccgggccgggcggcggggacacggcggtaccgtcctgcgctcgggaacgcggaatgttgccctggtcgccgccgcggtggggcgcgggcccggaggaggcgcccgagggaccaggccttccggcgggcaaggaccagggcgagccctggagcgccggagcggacgcccccagggagctggggacacccccatgggacaggtgaggggctcggacggagccgtggggggacagagactgggggcctccatgcgttcaccacgcgctctacggaggcttctccattgtccctgctggagattgggtccctcggtctcccttgcaccaggcacccttgggctccaggggagggtgcgtgggggcggtgtggctgcagcctcagtccctgcccctccagcccacagcccccatcccgtagcccttcctggatctggagagagcagctgctgctgccccaccacctgccaggcccggccactgagcagccccccggagccccaggtaggacaggccctgctgcctctactacccctaagagcctctcactgactgtgagcctgttataatccccaagcgtccccccagatccccgttccccccaggtggcctgggaggtggccccctcgaggatgactccactagcgccctgggaccccaagtatgaagccaaagcaggacctcggccggtgtgggtgagttgggggcaaacctgtgggactggctggggtgctcagggagctgtgcggtggcctgaggctccagtgctctgtcctcctcaccctagggggccaactgtagctcaggagcctcgttctcaggccggacgctgtgtcacccctcattctggccgctgtatgaagcagcctcgggcaggggtctcaggcccgtggcccctgccacagggcactggaatggacagcaggcgcccccagatgcaggtacctcccttggtcccccgggggcgcaaggctgccccaactcctctgggaaccagtgcccaggggtgggagcccgcagcccgccaccctagtggtgtttcctcctagggttcccggtggtgtgctgtgaagatgtcttcctctcggaccctctgctgccccgggggcagcgtgttcccctgtacctgtccaaggccccccagcaggtgagagctctttcccctccctgtccttaccccagcctccaggcttgcctggcaggaaacacattccattctctctcctcagatgatgggctccctgaaactgctgccgccgccccccatcatgtctgccagggtgctcccccgcccatcaccctcccggggcccctccactgcctggctcagcgggccggagctgatcgctctcactggcctgctgcagatgagccagggggagcctaggcccagctcctccgcggttggccccccagaccatacctctgacccacccagcccctgtggtagccccagcagttctcagggtgctgacctctctctcccacagaccccagacacccattgtccatagccttctcagggcagagtgggctggttgtgttgacaataaaacagtgttggtttgcaaaacaggctccgtgtggctgggagcagagtaagtcatagaggcaggaatggggtctctttctgtctcactgcagatcaccccctgctgtgttaggcggagggcgagggtatccatgacctaaggcatttctgggctgactgggcagagcccctttaatgagtgggtgggtggtctgcatggcagtgcagggctgaatgtataggaagcaggcgggggagtaagtaggggcacctcacttttaggggacactagccccacacctcttgtgctggggctccaggagttcagttctgggctgggtggggtagttgtctggctcagaggagacacaaagaatgcactgcaggtgtgtgggggagggtgccggtccatgtaaatgtcaccactggcagaaaggtggccctgccgcagcctacctgagactctagagattcttgcacgaactctgtagagaaacaggatcagggtttcagctgagaaagcccagaagtgtgtagtctcggtggtttgggcggggataggttctagaattttctcccataaaatagcccaacttcttggagaaccttctactcaagacttaggtgccacagctggaagggacacagggggcaggaccccagcttgttgccctgcaggtcacttgtccgaggtggcatctgggccttaaagcccctcacacggtggggagttaggaggcagggcgggggcgttacaatgccattccctccagtccctccctcaaccacccccccatcagtcagcaggagagagctgcctgggtctcaggtctcctcaccgcatagctatgtgggcggagcgtgtgggccctggggacgtcaccaagtgcccccagagaaaggaccaggtccagatcgacgtagctgaggcagctcgtcaggggctctggcctggcggtgccggttccgaggctctctggggccgataacttggtgcacacttcactccctagccagctctgaggggggcaggagcagcgctgagtccctacccatccccagccagcccccacatcgcgatgggcactcctgggcctgtgtccaggctcctgaacccagacttgtaggaatgggctcatagtcactccctgctcccttggttatgtagcccccacccagccccttagggtagaaggctgctgtccccagcctcgccaaggtcttaagggctgcttgctcgatcccctctcccagacaccctggacggctcaggccaatttaatggtccgcaaaaggtggggtctcagggatggggaaaagggagtttgaagggggttataggagggtccccgagcacctgggccttgttattgggccgggaaaacttttttttttttttttttttttttttttttttttttttttttgagacagagtctagctctgttacctaggagtgcagtggttgatcttggctcactgcaacctccgcttccccggttcaagcgattctcctgcctcagtctcctgagtagctgggattacaggcatgtgccaccacgcccggctaatttttgtatttttagtagagatggggtttcaccatgttggccaggctggtctcgaactcctgacctcaggtgatacgcccgcgttggcctcccaaactaatgggattataggcgtgagccaccgggccgggcctgtgcccggagaactctaaacctgcccctttaatgtttgaactttcggcgacctgggggaggggcgagccacggagaaaccacagccagaagcccccgaggcccccggaagcccggggctcgggcctcaccggcatcaccgcgctcctcgagcagggtgttgtatcacgcctgctgctccgcctcgcctgccgccgccacgcgcaggctgctgtcgcgggtgtagaggacgatcaggtggtgctggcgcgcatctgcgcacttgctggtggtgcacgcacccgccaggctcaggctgcgctggagccgcgctcggcacgcgcgaaacttctgctcgctctcggaacactcgggacgcggcgggtctgcgcgcaggtggccgcagaaccgcacgtcggcagggcaggcccagggcagcggctggctgaggggcacggcggccattcccggctctccccggggccgccgcctgcgggcttcattcaggggcgaaggcaataaagtggctgcagaagaggcagagacggctgggtctcgtgtcttgagcacggggagaggccagcaggggtgggggtgaggtggcgaactcggcgggccgggagcagcggccgggcaggctgccacccgtcttgatgcccagcgtctctcccgggctcccgactggaagtttggggcaaggactctgcgcacagcgagtgtcccggtgactgttgcccctggcctgggctccccactacctccctccctccgccgaccgctccggaacccccaccccacgagactaatcctcacgtcgcccaggaactggagtttgagtagggaagtccaagagaggcggcctcgaccccaagactgagcctttataggggcagagagcgtgggggcgtctctaccgatcagctgactgcggtccggacacgtcgtcggggcaaccgagaaagcctcggtgtgaggccagtgatcggacttgtggcagcggtggtggcgctggcgattagagggctttggaacggggcctccatgcaccctgctggctcctgccacgccccgctcggcctgtaggtgtccttcctgtgtgtacccccttcccatccaggagtggttttgtgcccttccaagtaaccaaaggagccaccgccactgagcactgcgctggattatttctgagctggagattgagtttcttgaaagtttggggtgataggaggtgacttgggctaagtaagctcagggggtagtccctgtgcacagaccatacccgctggaacccagtcaagtggccactgaaggagacctcggaggaagaggccatctctcaggaagaccccttcgggctgccccattgctctgggcccctccttgccaccactgcccaaaaatactaccccgggaccacctgaaggctctgaccatggacgtgtggacttcctcatggaggtaccctttgcttcttgaaaaaattgcgattgggctggggactggacatttttgcactcagttctgatccaaggaccactgaccccctccaaggggatgggggtgaaggtgcaccagacaaaccagcaggtgacacctggtgggaccttagaggaccctgagatatcacccaaggcaagtaaggtgcctaaaggggaaagccgagggtcagggaggagaggccaacatgcagcccccataaagatggcattcagggaggagctccctcagggaaggaacaagatatgacaaagacagaacaagagaacagatgcaaggacccaaacctagcccaagggccagggcagcctgagcagggtgggcagggcttcccgccacacttcctgcttcctggggaaggggccccacgtgagtgggaatatgggaggcaagtgctgtgtgcatggagctggggtcctcacacacctattccaaggtcacattgagagggagatgcagggaaccaaccagcacccagccagcaggcaggtgggacccagggcctgctccaggtgacctctggtaagccaaagccccactggggtgcaggagaggctcgaagcacaggtggtgtggtgtggggcgggggggccgtggggcggggctcggcaactgcccagtgttgggtgttggccacagaggcaatcgctccgtaagtggccaacaaaaccggactgtgttcaaggccatagccccacgtggccaagggccttgatacaggcaccatgtgcaaaggggcagggacacaaaggacatgtgcacacccctccccctcccagtcctgctgctgcctcaaagaggccaccaaagggcccctgtccctgctgcactccgggcccaggagtcttttttactccctgaggcttgaagatacctgaggaagatctctttattccttccccttcccactccccatcaaccaggtccccctgcagcacccttccttgtgaaatcacagctgctatgacagtgaccagctccaaaccaccctgtgtcactgaaccttgggtgctgggtgacacatgggcaggaaaggcaggaagagcagggatctgagggcctgggggctgggcaagcctcaggggtggggtgggtgctgatcaatgccaggtgatcaatgccaggtgattggacccactgagtaccaggacaaacctggagtcacgcaactggcctacatcagttgccttggcaacacactgcccttgaccttacccggaaaagatttatttcagccggtagccctggtaacttgagtggctccccagggacaggaagtggcagaacctcaactctgcctctcctgacctgaggggttcacttttcatccctgtcagggacggggcactgcgttctcagcccctatggaagaatgttatgggtttgggggaatccacggggaggagactaggctgttccagcgtgcccctccttcctcagcctgaggccttgctcctctgtggaaggcaacacagggacagagccacacattcagcccctaccctcagccctgctcccatcccctggcccacaggtctgacccgcaagctccgatgtggagacacttggtggctgactcctgcttcctcacacatggggatggcccacaggtgaccgactggctgaatgctggggccatgctagaggactgctgtctgcagagcatggtccctgcattggccagaagttggtgtgagcccaggtgagtcactctagccccgtggtgtgtgtggtgggtttgaatctgcagctaccaggcaatgttttctccatttcctctcaagccaggcctttctccattctttgctactctccaggagaggcggctcactggagggctggagcctgagctgctggagctgtccccggccaaggagagcagctcctagtgtcagcctgtgcccagggaaccctggggcccgaggctgacctggcgttaacttcttactgctcatccagctctcaccagccagcaggctggagtccttgtgggctggaggggagggagtctgcagggaggacccgggcctggacccagatagtgaggagatgccgggagacagcacagggtgacagaagcaggagaaagcccttcggtttagcctcagttccaaacctcggcgctcctggcattaagggaagggtgatggaagctggggggaaataacagaaaggctcctccccctaatacaccataacagattccagcttccctccctccggctctaagcagaaaggaaagaactggtaagagaattaggtagagggacacagagataatctagggtggcgaagaggggagaaagagaagagatggaacatgcaaaggccaggagcgaagcgggagaccacccaggagacagaaggagggcagaggctgggagaagaacaggaacagacaggatggggtcctgattgttggaaaagacagggaggccaatcccagccttgcaaatagcagcagctagaggttatttccagaaaaatctgcaaagtaaatacactgatcacccaactcccatatctctttgctgctctctgtggaagactcagacaaaccccaagaatgaatggccacggggccagggcaatggtggaaagggaggggcctcacctggccttgggccaaacagcaaggtggcctctgcccagccaggtgaggtgtttgccacccaccccctgaccaggtctgtcttgtcaccacacaaatagcccagacaccacagctggatgttgtcacaacatccccaggtggaaagagcctggggcagagaatgttccagacccaggaggggtctacttccagcaccacattggcaccaacctcctttgcccaccctggccccagtgggcattcccctcacatccaacaaactccagtccccggcagtggtggctcctctcccgccacgcttcttctcattgctaatgcgggactcttgttcagacagggacgggctctgccctgtctctggccaatggcagcattatcactggcccaggcagtccagcccagcagagccaggtcaaggatcagtcatgttgactgacctgcaacccctcaaagtggcctgaagcaaaaccacaggcgccgttttctctttcgttcaaatgcagttcttttccaacattgcctgcaatgagctttggtgcagagatttggggacagggaggcacatggagaaaaaaaaaaaaaaaaaagaccaggcaattgcacaaagcctttccctggaaaacccaggctctggggatggtgggggtcaggacacatggctgccccccctccagccctggagctccggctttgatggtcgaggcacagatggggattcatcccattccccacatacgagagcagtctgggagcgggagatcggctgggtgtgtgtatatatgtatgtatgtgcatatagatagatctatttatatataataggctatattagaaaatcctctctatgtataaatataaaacactggtatccaaacatgacaccaacagctaactaaagtgcttgacaggagccgggcccgggtaagctcgatggtaaaccgctcatcctgggcgctggggaagcaaaacaatgggggaccccttcagcagggggtgctgcaggaggaaagtgtgtgctggccaagctgggccaccaagagcacttgggccacctgggccttctgggtctcaggactgtctggtcactgccccatcaacactgtgcctcatctttcccctaccttccccactgcgctcccgtccatgaggagcacagcgctggcgagctaggcccagggaagagctgttccacaggggactgatcatttgaaaaaaatccctccccctcaaccatcactcctccaggtcaggccctgcccgcactcctcctgggcttcctgcctgggtgggggtgggacgagggaggggagagaggctttgtggaatctgagggcagccacctttcacctgtaggccccaagcaaagcattagcacctccaccatccccaaggcccatagaaatgcccacaggcaagtggtcaccagagctctagggagcagaggggccccagaaggcagggaagaggccccccaaaaacacagtgctacaagaaggggttggtggttggaggtttggaggcgaatgggcttgatgagggtccagtctggaaagaaagaacaatacattttccagttaggggagaggaactggaagcttagaagaaaggcagccaggagtcctttctcctgaaaaatcgctatgctgagggcagtgggaaagtgagggagaaaaggccaggcacggtagctcatgcctgtaatcccagccctttggcaggccaaggtgggctgatcacctgaggtcaggagttcaagaccagcctggccaacacgggaaaaccctatctctactaaaaatacaaaaattagccatgtgcggtggtgcacacctgtagtccctgctacttgggaggctgaggcaggagaattgcttgaactcaggaggtagaggttgcggtgagctgagattgggcctgggagacagagtgaggctgtctcaaaaaaaaaaaaaaaaggaaagtgagggagaagggagccaagggcagggctggaacagcatgggagatgccagtgcccagaagagctgaggcccaagctcagccctggcttggacaacgcagaccttcacgaggaaggggcacaggggccacctcacatcagcctcttctggaaggattgtcccagagggaaagcccacgagccctaccacagcacccctgctggcacactcaccatgaaggggttggtggagatcccagctggctggctcagtggcctctgccccaacttggctgatcctaagtccccgaaggaagagcctagggggcgagagcagtcactcagctgacaccagcctgccttcctgcaggcggacagcaaggggggccctcctaaactgggggagtaagggaacagagcagtggaagtacccgggcgggtctggtgcttccctggtcccccctgctggtcagaaagggcactgcatgggctctgatgaggtcggaggaacaactaactgatctctatgcagagatgggatggggtgaaagggtttgtccatctacagctcttaccattctgctgctgaacaagcggggtctgcggggggaacagcggtgctgggaaggagctggcaaaggccccagtgggtggcactgcctgggggaagccaggcccagcactgctcatcccaaagccgggccctatggagtgaaagacgggaggctcaggtgaacttctggaaggtgggctggagaactgtttttcctaagtccctccaagatgggaaaatgggatatagttttttcctgacatgaggaacgagggacccagccatggaactcttctgcttctcacaccaccaaacaaccctgccctctccctgcccgggggtacgtggcagggagggcatggtagttccaggcacgggcgcggtgcaggactgggctagcctcccactaaactgcaaaaacagcacaaacttctaacgctgtctgtgcttcagttctcatctctaaaatggggacagtccgtctcatagggctactgtgaagatcaaatcagggccacgaagccctcagcactgggcccaccacacagctcttctgtgtttgctcttattcctctctccccagcctcaaggcttcagccagcatgagtctgaggggagagcagcagaggctggggagggccagggtgagagaagacaacaggcctggagttgatggaagcagggaacagcgtgagtgtttcaggtggcttaagcttcgggacacagaagggactggggctgggtgcccaaagggacactgctgagggctggagacaggagaatcgctgccactgtcagtcaactctaaaacagtcttcagtgcggtctccggtaagtagccacctgtgtgcttctaattctaaaatctggctctgtgacctgggtgctaggtggcctggcaccgtgtgggcaggggaagaaccaggctgtctgcttctcctgacagcgtgagacaaagggttaagggagaggctgcagggtaatgtgtgccttggaagtctcagatggtcaggacaagggaccatgctggaggcttacctggcgccaagccattgggctggaacgggttggtggaaggcagcggggactgggcggcgggagctgtgaaagggttagtgaaggctgcccaggtggaatggggagcggcaggaaagagagagatggttactttttttctcacgtgcttcatcctgtgatgcctgagcattcctctcaatctctccccttcccaccctgtccagagtccttagactcctcctggcctcaggtcccctcccctgggtctccacaggcaggactcacctccaaaggccagccctgtgctgctgccgccgccgccgcccatcgtgacagactggagcggggggacctggccagccatcccgaagaggctacaacacggggagagagaagtcatacacagctgccagggccaatcaaacctgagcaaggggccaggagatgccaaccctgctctccagggtgagtaagggagaggaggggaggggagaactgccaggagatgccgatggggctgggaggaacatggccaggcttcgggcggctctcctgccctacagcagactgcccactgtctgtacctacctgctaggaacacctgcagcgggcaccccgggtcccaggaagctgcccacgtctgcgaggctgtttggctgactggcgggtgccaggggagtggcaccaaatggagtcccctggctgctccctgggcagttgtggaaaatacaacagggagagctgaggtaagacagggcgggaggggcaggagagcagatggaggtggtggtggtgatggattggagtcatggcatgacaggtgcctgctgggttctctgaggcagcccattttctcagggaccacccagttcaggaggtcttgtctcccaccaagagttctgggcaaggtgacagcccagcccttctccgtgtcccctgcgctcaaagctgcgctgcggagaggaaagcagctcgtccccaggtcaggctgtcctcctcctgctccagtttggctttcatgtcccacttttccctcaagagatggaaaagcctgtcctttcctcaagcccgcatttccatttatcagaacatggcagggaggggcaggcagaggcaccatggaggacagcaagtcccatcacactcaggaggctcctggcctgtgcagcctccagctatcagcactgtcccttccccatttagccgctgcttctcgggaggccgccccagtgccctgagcctggaggcactgttcatggggccagccccgctgcggggttctcctgccctgcctcttcttcagagccaaaaagaaaaagcacagagggcaaggcccacatggaaatcttacaaaacagctgagggccaagagtcctggaaattccaagcaatcttgtctcaggggaagaggctgagtccctgtcattttaagaaagcctcctgtctgcacatcaaagtctcgtctctatcttgggaccctatcgaccacactgggctgctgtgaatgtaaaaggagggtccagatggaaagaggctttattgacaggacgcggcagttcatgcctgtaatcccaatactttcagaggccaaggcgagcagattacttgaggtcaggagttcgagaccacccttgccaacatggtgaaaccctgtctctactaaaaatacaaaaattagccaggcatggtggcaggtgcttgtaatcccagctacttcggaggctgaagcaggagaatcacttgaacccgggaagtggaggttgcagtgagctaggatcacaccattgcactccagcctgggcaataagagcgaaactccgtctcaaaaaaaaaaaaaaaagggagatctggccaggtgtggtggctcatgcctgtaatcctagcactttgggaggccgaggagggcggatcacgaggtcaggagatcaagaccaacctggctgacacggtgaaaccccgtctctactaaaaatacaaaaaaaaaaaaaattagccaggcatggtggcgggtgcctgtagttccaactactcaggaggctgaggcaggagaatggcgtgaacccgggaggtggagtttgcagtgagccgagatcatatcactgcactccagcctgggcgacagagtgagactccgtctcaaaaaaaaaaaaaaaaaaaaagggagatcttccacatgccaggcactatgcataaataacagcgacccgggccctaaatgggtgaagctgagaatctagtagggaagacgaagtgcccagtgcctacctgctgccaggtcctgaagccccgctccctctcactgagtgtcggcacttgtaagacagtgctctcctttgccacctccttcctaaatgcctgggctttctagatgaatgagtgctggctgccagcttcctcctgggcaaggctacaatgccactgtgcttacttggtcatcaatcctttctaatccacaggatgcaagacaggctagaaagccacctgggtggggccaggcccagtggctcacacctgtaatcccagcactttgggaggctgaggcaagcagatcgcttgaggtcaggagtttaagacaagcctggccaacatggcaaaaccctgtctctactaaaagcacaaaaataagctgggcgtggtggtgcatacctgtaatcccaactacacgggaggctgaggcaccagaatcacttgaacctggaagaggaagattgcagtgagccaagattgagccactgcactccagcctgggcgacagggcaagactgtttccaaaaaaaaaaaaaagccagcagcatggtgttggatcctctactgactctcccagccgaggcctttccctgcctgcctgcctccaagtacagtatgtggaatttccacgcaagcacggctccctttcctcggatggctgactctttgtgctgctgtggtcctgcatgttccaggagcttcacccagtgaggaccaggctgggagagaggctgcaggccatgctgtgcctccctgtggacactagggggcagaaccatccctagcccaggcagggttggccctttgcacagagggtgcattctcacaaaggaggcggtggcccaagaaacacctgcactcctgtttgcttttcatttcatgcactttttttttttttttttgagacagggtctcattccaattgcccaggctggagtgcagtggcatgatctcagctcactgcagcctcgaccttcagggctcagctgattctcccaccttagcctcctgagtagctgggactacaggcacgcaccactatggccagctaattatttgtatttttggtagaaatgaagttttgccatgttgcccaggctggtctcaaactcctgagctcaggtgatctgcccacctcagcctccccaagtgatgggattacaggcatgagccaccacacccggccttcatgcgcttcttataccacgcagctagatttctaccctgccttatcacagtttgagggagagaagcagttttgaaaacccctctctccatactccccctcagaaatataaaaataaaagcaggtttgtcagaagagacacccacctctcaaaatctcctctctcagttcacacccaacagctaagtcacactcacgggaacacctgcatgatcatggtgtagtgggaagcggttctgccaattatcagcattagatctgggccaagttgagccagtttcctgcaaagggaagctctttccttcctcatggacataatgcatgaaggcacccaacaatggcaggatcctcggaaatgttccttggctctgggtttggctgtagattgactgtttttgttttgtttgagacagagtcttgctctgtcacccagagtgcagtggcgcaatctcagctcactgctacctcagcctcccgggttcaagcaatcttcctgcctcagcctccccagtagctgggactacagtcacgcaccaccatgcctggctaatttttgtattttggtagagaggggtttcaccatgtaggccaggctggtttcaaacttctgacctcaaatgatgcaccccactcagcctcccaaagtgccgggattacaggtatgagccactgcgcccagtgactgactgctttttgagacagccagatagtggacaaaaggtttaatgcttgggacatccgtggagctgagcccttccttctctctgagtctgccccaaaaactgtctttacggtgaaaccctgtctctactaaaaatacaaaaaattagccaggtgtggtggcgggtgcctgtggccccagctactcaggaggctgaggcaggagaatagcgtgaacccgagaggcggagtttgcagtgagccgagattgtgccactacaccccagcctgggtgacagagtgagactccgtctaaaaaaaaaaaaaaacaaaaacaaaaacaaaaaaaactctgtctttagagcaatcaattgtactgggaaggcatttcaaaagggacgcatctataacaactttatataggctgttccctcgagtgctcccattcctaggagcacacctttcttactaaaaccgaatattcttgcaccaaggtgcaattctgcaaactgcgcacaagaaggtcatttttcccccgacatataatcccagaactttgggaggccaaggcaggcggatcacttgaggtcaggagattgagaccggcctagccaacatggtgaaaccccgtctctactaaaaatacaaaaattagccgggcatggtggcatgcgcctgtaatcctgctactcaggaggctgaggcaggagaatcgcttgaatgagatcacgccattgcactccagcctgggcagcagagtaagactctgtctcaaaaaacacacaaacaacaaaacaacaacaaaaaccaaaatgtgacctatgtgatttgtctttgttagaatttatggagattttgtttcctatagtttatttcttacttgtctattagtcatgtgggaaagcatattatagtctcctagtcctttggcttattaaattctgattgtgtctaatagtttttgcttcgtgaatctcatgggtatgcggtcagttattttaagtacatgattttgagaacctctttgtgaattttaacttttttttttttttttgagacaagagtcttactctgtcactcaggctggagtgcagtggcaggatctcggctcgctgcagcctctgtctcccaggttcaagtgattctcctgcctcagtcccctgagtagctgggattacaggtgcctgccaccatgcccagctaatttttgtattttgagtagagacggtgtttcaccatgttggccaggcttatgtcaaactcctgacctcaggtgatctgcccacctgggcctcccaaagtgctggcatcacagatgtgagccaccacgcccagccaacttttatcaatataaaatgtttcttcttatagccctccaaaacgataaaataaaaacaaaagcagctaatcagctcacagtggcacagtgagaaggctgtgggcagagcatgagtcaagaagtctgggctctggtctcagcttggtcgctctgtggcctgcatgactagggaaattgcttaactgccttatctgtcaaatggccaaattttaagggttccttccagccctcaaaactctatgatcagaggcacttgggtaggctctggggtggggataataacttaccaaagctgtaactttcagttagcatccgactggctggcagtgagggtggagaagagaagggtgggtagaggaagggagaaagaaagagtgtatgtcactggcttttccccagacatctgagcctgacggcgagcactgcagctgccctcccatgtgtccaggatgtccaatggcagaaggcacccaaaggctatgaagactcaatgtgtagagcttaggaaggagcagaatgctttaagaaggcctgaagagtctcttgcaatggctaaataacatagtttatttggttttgtttgttcgttcgtttgttttgagatggggtctcactctgtcacccagactggagtgcaatggcacaataatcactcactacagcctcaaactcctgggctcaagcgatcctcccacctcggcctcccaaagtgttaggattgcaggcgtgagccattgtggctggcagcaacatagagtttacaggcctttggtcttagagggatggatgaggacttctggagactaccttgacccttgaccctttgggacagcgtactatgcagacaagagcaccttagagaaaaagtcacgtccattttcaatttttctaggactcaggtcttccatacttcctagtgaaaagtttcctagtgtataacccacacagctcctgctgcaatcttagtcattttcctttcatgaaaaagcagaacagtagagccccctctccctgacaagaatgtgtcagacacgctcatcctctcctggagctgcttctctttgtgctttgctgctttgagcagttctttaggatagtgaggatatgaatggtgatttatagacatgaacaaatggacacggttggaagagaaaggaagccagtggggcagagtttacctgcaggagttggctgggcctggaacgaggcttgaccagctggagggaggcttccaaacacagaagagctggggccactgctaaaggcatcaaagttggcaaagcctccttgggaaggtgtctggcctgtaggtggaagaaacataaaggttatatagaaaattgtcgggtgtggtagctcacgcctgtaattccagcactttgggaggccgaggtgggcagatcacttgaggtcagaagttcaagaccagcctggtcaacatggtgaaatctgtctctactaaaaatataaaaattagctgggccttggtggtacatgcctgtaatcccagctaccttggaggctgaggcatgagaattgcttaaacctgggaggtggagctagcagtagccaaactcatccactctactctagcctgggtgacagaatgagactctgactcaaaaaaaaaaaaaaaaaaaaaaaaaaacccgctctcacacaacaaaaaaaaaaaaaaaaatgtatatgcctatccatgtaatatagctactaattctaaaggccaaaggccactcttatgggacatctgcctttccacagggttctcttcagaaggaaatgggtggggcctggggccaagagccatacccacacaggggaacaggggcacccagggcctccaggttcactccctgccctcttctgtccttactccatgaggcattaacatttttgtcagggcctagtttggagcatgaaaattttttttcatggaggaaggagcttgaattttttttttttttttttttttttttgagacggagtctcactctgtcacctaggctggagtccagtgatgcaattgtgattcactgcaacctccacctcctaggttcaagcaattctcctgccttagcctcccaagtagctgggactacaggcacatgccaccacacttggctaattttttttttctttttagtagagatgaggtttcaccatgttggccagactggtcttgaactcctgacctcaggtgatctgcccacctcagcctctcaaatgctaggattacaggtgtgagccactgtgtctggcttgaaaatttttaaaaagggaaaacagattctatgctgctgaaccctctactggctattgctgatttgggggaagaataatctttggtgaactggaacacatgataatccccctcctcccattttaacagagacagaaaataataaaaaaggctatttccagtgttctaaaaggaagtgctaggagccctcaactataatgttttaggatcaaacccccaaacataatcctggctgtacttatttgaccccagtcctcccagcctcactgcttcagagtgaccctcacatttgtttgcatgagaagatctagagccatggttacctccagggactggatctctcatgttgtaagcatatacgctgtagggagggtcccatcccaaaacccacttacccccaaaggcagggaatgcagcaaaagctggtgccatctggggtgcagcaaaggggtctccaccgatgtcagccagcaggtcagtactggcttttttgacagaggagtggggaggtggctgagtgctccgggcatgggatgtccgagcgtgagactgactgacgggcttggaggagaaggaatgcatacagcccttagaatcccagacatgccccaggcctctctggctctcgagttgcctcagataggcaggtagagagagaagacagtgagtaactgccctgaacatagaagattcctgggcaggagctgctttagcccttctcagagctcatatcatcctcatcttctcagtacacgtgctccaagaaccacacattttacagcacatgagccaaggtaaccctgagatatacaggaatactgcccaatactgcccccagggctgttactcctcaaccttcccaggtattggacaccatattccagccccttctgtgtttctttgatggaatgctcaggtttggagctgatattctgactttcctaaataccacttcgtgttaggttctgacttccaaaagatatgaggtccagaagtgacaaatacaagatacaggttaacagcagagccgagacccaactcacagctcctgcactgttgtctgctaagtccggggaatctgattcaggaaactgacactcctgtctcccaaatctcaaaagaaacatgacgagcagatctgagagttacctggctcgaggtggaggcagcaactgagagagacggtgcaggatcacccagaagtgtccgaaggggcttcccttctgggatggagccctgcacaggggtggaggcactgcctttggtataagtgggccccttgacttggtctggggggacatacctttgagaaagaatagttaggctgtaaagagagggataaaactttggaccacgctcagctgagatgtttgggaagacacaggagtcaaaatctatgctcatttttctctactgattcccttttttgaagggaaccgagcaacttagcaaagttctgcctatcttgagcatccccttgaacatcttttggtttttttgagacagggtctcgctgttgcccagggtggagtgcagtggggcaatgttggctcaacacagccttaactacctaggctcaagtgattctcctgcctcagcctcccaagtagctgggaccacaaacaagtacatgctaccatgcctggctaattttttaattatttgtagagaagaggtctcactatgttgcccagggtggtctcaacctcttggcctcaggtgatcctcctgccttagcctccaaagttctgggattacaggcatgagccaccacacctggcaaaggtccccctcttttatttcctgggtgtttcttcagactccttcttctcagctccatagaaaagctgcctgccgcctcatcctctaggtgctcacaatccacacttccatcctgccagctcctgccgggacaattcccttccactacagtgtatgtggcccctactctgtaagtgtcagcttaatcctgaggacatccctaggagggactccacagtgtggtcttatccacatcaatctctttgttctctgcattctcttctctacctcacagttacctcccaacatgtacacaccccagagatcccacaagaagtgataccaggggagaggaaaggtaagggagaatggagatgctgtttccttcatcaggaagacaaaatatagttgtcccatggtatcctcagggaactggttccaggatccccctgacaattccataatcagaggacgggacactcaagtctcttatataatatggtgaagtatttgcatcaaatatgtatatcctccaatatactttaaatcatctctaggttacttataatacctaatacaatgtaaatgccatgcaatagttgctatattgtattgctttttatttgtattattattttttttttgagacggagtttcactctgtcacccaggctagagtacagtggcacgatctcagctgactgcaaccactgcctcccgggttcaagcagttctctgcctcagcctcctgagtagctcggattacaggtgcccatgaccatgcctggctaattttttgtatttttagtagagacggggtttcaccatcttggccaggctagtcttgaactagtcctgaccctgtgatccacccgcctcggtctcccaaagtgctgggattacaggcatgagccaccacacctggccttatttgtattattttttattgttggattgttattttttgtgttccccacttttttttttttttttttttttttttgagacagtctctctctctttgcccaggctggagtacagtggcatgatctcagctcactgcaacctccgcctcctgggttcaagcaattttcctgcctcagcctccagagtagctgggattacaagtgtccacccccacacccagctaattttttttgtatttttagtagggacggggtttcaccatgttggccaggctagtctcgaactcctgacctcaagtggtctgcccacctcagcctcccaaagtgctgggattataggcgtgagccaccttgcctggcctattttcccaaatatttttgatgtgaggttgattggatcctggttggcggaatctacagatacagagggctggactgtacatataaatcatgaaacacgccggcacggtggctcacgcctgtatcccagcactttgtgaggccaaggcaggcagatcatttgagcccaggagtttcagacccgcctgggcaacgtggtgaaacctcatttctacaaaaaatataaaaattaaggccgggcgcagtggctcacgcctgtaatcccagcactttgggagccaaggtgggcggatcacgaggtcaggagatcgagaccatcctggctaacacggtgaaactctgtctctactaaaaatacaaaaaattagctgggtgtggtggcgggcgcctgtagtcccacctactcgggaggctgagacaggagaatggcgtgaacctgggaggtggaacttggagtgagccgagatcacgccactgcactcccgcctgggtgacagagcgagactctgtctcaaaaaaaaaaaaaaaaagaaatatatatatatatatatatatatatatatatatatatatatatatataaattagccaggcatggtggcacacacctgtagtcccagttactggggaggatgaggtaggaggatcacctgagctccaagaagctgagactgcagtaagctgtgactgtggcactgcactctagcctgggcaacagagtgagaccttgtctcaaaaaaaaaaaaaaatcataaaatgatgggttaaaggaataaaactataggatgtgtgcttccagccatctctccccatacataagatcagctgagctataaaaatgaacacccacaggcctacctcccgactccaatcagtctactatctctccaaaagagaggacataaaatctgcagggttagtgactgagaacaagttgtcctttcatgtagatttattttagccgtaactgaatgtgagtggaacagaatcgacccaagtctagtcttttgtgagaaggccaaattcaactctagaaactggactgtcagatgaagaatgtcttgaacacgtttccatagcaacctctttcctactccttaccatctcttcttctcatatttttcctggagaaactccttcactttctgaggatccctggaatctggtactaaagatgtccgagcatcaaacagacccaaccaaatcttccggcaaacctaaaagaatgaaggtgtcagaggagtgggagcagaaagcaggaaatacaaaaaataccacttccttttttttttttttttttttttttgagacggagtctcgctctgtcgccgggctggagtgcagtggcacgatctcagctcactgcaacctccacctccggggttcaagcaattctcctgcctcagtctcccaagtagctgagactataggcatgcgccaccacgcccagctaatttttgtacttttaatagagatgaggtttcaccatgttggccaggatggcctcgatctcttgacctcgttatctgcccacctcagctacccaaactgctgggattacaggcatgagccaccgcgcccagccaccacttcctatttattcatcagtaaatacatattggctggatgtggtggctcacacctgtaatctcagcactttgaaaggccgaggtgggtggatcacttgagtacgggagttcaagagcagtctgggcaacacagcgaaacccactctctaaaaaaatacaaaaattagtggagcatggtggcatgtgcctatagttcgagctacttgggaggctgaggtgggaggatcgtttgagcccaggaggttgaggttgcagtgagccaagattgcaccattaagctccagcctgggtgacagagcaagcaagagcttgtctctgataaataaataaataaataaataaataaacaaatattgagcatggacacagtgctaggatctgggtctacctacaaaccagatatgattcctgtcctcgcagagtttataatccaatggggcagtcatatcttagataaataaaactaaagttataatcacattttgtgacatgtattgaaaaaggaaaatagagggccatgagaattatggagaattaaatttcactaagggtagggtccaggacaattttcagagctctggcttccaggacacctccagaggcccttgaggataccctctaagtaaaccaatcacccataagctggggtactgctaacgccaaggatagcaacttctgatcggcagatttagctagggaaggggtttaagtcactttccagtacaagatatgcacttaaatccaggttgtcgaggctgaaggcagcagagctggctccaggaaagcttcctcagaggggctggcccagtcaactctgaatgctcacgctctggagctctggtcattctacccctccattgctcaggtgccacatcctacaacgatattgctacttcccctgactcctgaaaaggaggcctagacaaaccatgatttgtataacagaataaagattctgtaaatatacctaaggaaagaaatcatacatatgaaaaaattaagagaaactcaaccaaaaataaaaccgtaaggtttccctacaatcttgaggcaaagccccacctgcagataggtgaccttctcaccactccatcggtggcagctcacctcatttccacgggattgcaggaatactacttcaggctcagtgaaagttgtcatggagattgacttgacacgatgaggggggttcagccctctcctatgggagagaaacaggaagaaagagaagtataatgcagttagcatggcaggctgttcatgggaggaggaggaggagggagaaagggtgaaagaatagcatataaactaagctcagatagaacccccccatctgaagctacttcctaattccaggaaagaagggaaatatttggaatattttggagatattagaagtctccaaagagaggccaggcacagtgactcacacctgtaatcccagcactttagaaggccgaggcaggcagctcacttgaggccaggagttcgagaccagcctggccaatatggtgaaaacctgtctctactaaaaatacaaaaattagccgggcatggtagtgcacgcctgtaatctcagctactcaggaggctaaggcacaagtatcgcttgaacctgggaggcagaggctacagtgagccaaaatcaccccactgcactccatcctgggcaacagcaagactctgtccccactcccaccacccccctccaacccccaaaaaaaagaatctccaaagagacagggaagagagagtcaggaacatcctgtgatcccagtagttctggagaggaaaggtagagcctgcccatccagaagcctcctctagcctggctcagatcccagtagtttcagtgttcagcctgtaggccgaggggggtacttctgggaactcagacacgtgaccacttcccacttcctactttatcattgttttagacctacagcccatcccaaggtccagggcccacaaaaacacaaatccttcaagcatgagggaaggcaaaaatgaaggcccactactattcttgataacactaacaaaaacaggatatggtgacaaaaaacagtctctagccagctggtctccttgtgtctacaaagaaggtggagtggtggtgggatggacaggtcctctctttcagaagcctctctagaaaagaatatttgatttcttatttctgtatctctcaataaagcaggaagaagtcaagttcaaccatgagctataaggctggcatgggcgaggaatatgtaacctgtggcaatgcttttgtgcctcctctgtatgttctgttaactccctgggaatccagttctgcctccaggaaccctgtggagattataagagaagagaaggcttccttgtccccactcaactggtctcaggagtgttctaatacaggaaacttggggctaagccaggcagggcttcataggttcccctgtccttgcaccttaagtattattctggtctaggtctactaccctcactggattaaacaaaactgcccaaaccaaaacaagctagatcctgggacaggagggaagcagtctcagcagatgaggcctcttcagacttttactctcatggaaaaaaaaaaaatggccaaatcgagttgctcaaataaaaatccagaatagggtcctggctgacatcctcaggaagcgcaaagggggaaaaagagacaaaaatatttaacagatgaaaatcctgaaaattcacaaagaaggtggggaaaacatacattcacactaacaggtgcacacacagaatccaagtgctcctgccaagtctgggagaacagcagcgaggtgtaagcaaaagcagcggtggtgggggtggggggcagggagtgggcggactcagtacagagtgaacagtaagggcggccaccctgcggatgataaattactcattatgggattttaacaaaggacaggacactggaggctccagttgacgctgtttgcagcaattctgctgctagacctttaggtataaagggtctcaaaaatgctcttataaaagacaagcaatatcaaagaggactgatgcccccaaggaaagataagctcagggaaaaacgaaagcaaggctttgttactacatatcaaacaatagctcttaagcttggtctgccccgaagactgtcttccgatc

SEQ ID NO: 60136 - DNA, 466 bp, Homo Sapiens
  misc_feature (134)..(134): n is a, c, g, or t
  misc_feature (329)..(329): n is a, c, g, or t
  misc_feature (375)..(375): n is a, c, g, or t
  misc_feature (454)..(454): n is a, c, g, or t
  misc_feature (464)..(464): n is a, c, g, or t
cggcacgaggtctgtcagtaaactctttaagcttggtgccgcaaagagtctttaaatgggggctgatttcaagtaacctaaaagactgtgttatcagaggaagaggtcccaaatttggagtaaagatgggaganaataaatatgtgctatttccttggcgagttgggggaatttgccaccttacagagtttgtatcactgaattagctgcttttgtttttcttttttttttttttttgccagggctatggagtgggggttgtttgtcaaactgattttcaataattggatttaattttttttaacattgaaaagtgcctgaaaaatggnaaatccttaaatgtgtgtgagattgtcagaatcaacaaaactaggntggtttaaacatatctctgggtacatcaaggggcattgatacaaaccagttttaaagactgtttataaaggggagagcnggggactttntt

SEQ ID NO: 60137 - DNA, 310 bp, Homo Sapiens
ggggggtccctgagactctcctgtgcagcctctggattcacctttagtagcaattggatgagctgggtccgccaggctccagggaaggggctggagtgggtggccaacataaagcaagatgaaagtgagaaatactatgtagactctgtgaagggccgattcaccatctccagagacaacgccaagaactcactgtatctgcaaatgaacagcctgagagtcgaggacacggctgtgtattactgtgcgagagccgaccccgggtatagcagtgcctggggccagggaaccctggtcaccgtctccttag

SEQ ID NO: 60138 - DNA, 725 bp, Homo Sapiens
tttttttttttttttttttttttgagatagggttagctttgtagcccaggctggaatgcgggggcaggatcgcagctcactgcaaccacgacctctcaggctcaagcgattctcccaccttagcctcctgagtagctgggactacaggcacttgccacacccggctaatttttgtgatttttgtagagatggggttttgccgtgttgcccaggctggtctccaactcctgaggtcaagtgatccacccgccttgggtggatcccaaagtgttgtgccaggccccagatcttcattactgatcatatgatcactgcaaagcctggagtaggggcatacccccaacctccgaggcaagagacaatcaatggtttcccttttttttttttccttttcaggctagattggcacaatgatggaatggttttcaagaggccaagtaggaccagctgtgggtttatcccattttacctaaggattttacacaatacattgagtgcaggaatggcacgcaatgattgcactcagtaatataccaaaccactcctggctttgtttagaccctagacttgggccctcaaccttctcgtagacctcttgcgaggattttccccttttacagattcacactcagtcccgaacagaaacacttgagcacctacaatttcacagtcaactccctgccaacgtccagtgactcacagttaagagagcttcagcagcagct

SEQ ID NO: 60139 - DNA, 370 bp, Homo Sapiens
  misc_feature (313)..(313): n is a, c, g, or t
agtatcagacatataatttatttataaagtgcttgaagatattttcattacatccacaaaagggaaggctcttacttgggcagaaatgtattacttattgtgcctattttcttttttttttttgagacggagtctcactctgtcacccaggctggagtgcagtggcacgatcttggctcactgcaagctccacctcccaggttcacgccattctcctgcctctgcctcccgagtagctgggactacaggtgcctgccaccatgcctggctagtttttttttgtttttttttttgtatttttagtagagacggngtttcaccgtgttagccaggatggtcttgatctccctacctcgtgatccgcccacct

SEQ ID NO: 60140 - DNA, 518 bp, Homo Sapiens
aattctctgttaggtaaaaaagttatgaggggaggagactgagctgtcatgggcaaggccgggccgctcgcctagcctcacaacactccccacattcttcactatcacagcaaagtggtgtctacagtcctgcagaaaggcctcagagctttatattgctagaacaatatatcccactcttctggcaatctgggggaagggcagagactatgccttgtatttacaaaggaagaaaccaagaaacacaaaaaggcaagagagattctccttactgcggagtctgccccaagatggcagtgagacagtacttgcttgggttacagaacacaggggccaactctctccctactccacagctacattccagagaatggcattttcggagcacaagtggtttccagggccaggcaacaaaggacttatcagactaactggaagagagaagctgatgtccccaaacccactccaaactccaaactccaaagtctccattctatgccccaggcacatttactctt

SEQ ID NO: 60141 - DNA, 150024 bp, Homo Sapiens
gatcataggggtggtccttcgtgaatggcttagcacaatcccctcagtgctgttctcatgataggtactaagtgagttactatgagatctgtttgtttaaagtgtatagactgcacctccccactgtctcttcctcctactctggccaggtgaagtatttgctctccctttgccctccaccatgatcataagtttcctgaggcctccccaaaagctgatgtcaccatacctgtacggaatcatgggcctatggaaccgtgagccagttagcctcttttctttataaattacccagtctcaggtatttcctcatagcagtgtgagaacaaactagtaaacagtgtaaatgctttgtaaatagttgttagttaaactgtactgttttgggaataatgacaaagaaaagagtctgtatgtattcagtacagaggcagccatccattttttaaaaatatctttaatccacagatgcagaacccatgagtgtagagggctggactgtatacatgaatacatattgacatctttatttctatatctatatatccaaatatattttgaaaatcatgagtttacactgatacctctagtttgaatccgataacacaggttcattctagtttactcccttttcatatttatacctttcttctctgacagtgagaaatcaggcttcctttatcctcagtatattcacttactggctaatttcccctccccattgcctataaactactcatctcccattggtgctgccaccacaatccctcaatctcatatgcatatgggtgacctcctcactccacttggtctctgacatcctgtgtgagctccctgtcactgccctcccccccatatgggtgctcttctcacccctctttggcttaaaaacccaattctgggttgctactgatacacccaaacccagacacagatgccctcctcactccactggggctgcaatccctcagactgggctgctgccactcctgcccaagacctacctcactctgcccttcttaatgactttgaactgaactaatcaaggaggaaggaaggaaggcacgaatcaactaaaatatctttgagacaatttggaacataagtaaatctattttatagctctttagaacagctaaaatgttcttcatgatctcacctggtctacttatggtggagtcaggtgagtgcgctggaatagtgtgctcttaatgtacaagcatatgctttcaatttacaagaggaagccttcactgaaaattccactgtcaagcagcactgatacatggccttgtaaaaagaaagctctgtttattggagtcaacacaattattgtatccagggtaaagactttttttaaatgaaatctcctaaaatgatctttgagttcgagtcatagtaaggaattgatgagtcgtgccaaggaggcctataatgttatagaagacaagctgggtagaaagtatttctctctcagaatgaattgatacctgtagcaacaccacatctaatagaaaaacaatgttaaagcatctcaaagcactactgaaaaatgaaaaacattactatagtgaaaaaatattgaaagaataattagaaatacaagcaccagcacatataactacttctaaataatgtatataacaatttttggtaatggtggccagtctacttatgtgtagactgagaaagaaatataaatatatgtatctatgtacatccttcaaaatatatagaaactgtgactattttaactatttgtgtcctaaaactaaaaggtacagcattaaaaatatagaatttttttctatcaaagtgacatataatcactataataaatatgatacaggagaaagagaaaaatgcaatcatgtattgcattttttaattaaattaaacttctgccacccaggtttaactctatctaatattttggtatatttcctttcaatcatattgtctgttttcagaaatgggatcatgctatacatactgcttatgttttgaattttttcccaatgacacatcataaacattttcccatcaccttggatatttgataacataattttaatggctatgtagtattttgttgtatagacacaccataatttatttaaccaattttctattgtcgggtatttaagtggtttctaattttggacattacaaatgatgtggggggggggttgggttattttattttatttttttctgagacagggtcttgctccatcactcaggcctgagtgcagtggtgtgatctaggctcactgcaacctccacctcccaggctcaagcaatctccaagtagctgggactacaggcacatgccaccattcccagatacatttttcaaaatatttttagtagagataggatttcaccacgtgcctaggctggtctcaaactcctgggctcaagcaatccacctgcctcagcctcccaaagtgctgggattacaggcatgggtcaccacgcttggtcaaaaatgttttaataaacaactgtatataaatctttgcttgcatctatgattatttcttcagaataaacgtttagtagcagaaattgagttgctagagcaaatagtgttgtgcaaaattatgttaacagatcaataggatatgcagaagagtaatatactttcctaaagtatgtgacagttgttgataaatataattaatttgaattgtcagtgttttggttgaattgtgtgcttaacaatctctaggaaaactaaagaacaaactgtctgccaaaagtctcagagaaacaggattattactttgatgctggttccaagggcctcccttagctttcctggtaataaattattgtctcatatcacactggcagagaaaacagtaaaatatttattttggaatatctgctttctatctggcagggatttgacattttaaaaccttttcaaaatattttagaaccacaaaatacagtaagctttgaattaagaattaattagggttttctttatccctactgtttgatcaatttttcaaaagccaaaaaaaaaaaagtgctacacagaatacaattaactgttagttttcagtaattttaaagtgtgctgttgcttagaaggcagactggatcagatgacctcttgggatcctttcgagctcagtaattctaacttttatattcaatgagttttatcttgcacttatcacccattgctcaacctggccctttcctctttaccacatattttctttatgtcttaattttccttttatactcacagagggtgtctaaccctttattggtataattatggaaatgtttttatgtgaacattaatctaacaatgaaggagacaagagcagaatgccaggttcagtaatgcttatgcagtcatgagcatgaaacactcttagaacattttattttatttatttacttttttaagacagggtcttactcttttgcccaagctggagtgtagtagcgcaatctcggctcactgcaaaaccccctccccggctcaagggatcctcccaagtcagcttcctgaggagctgggattagcatgtgttaccacacctggctaatttttgtatttttagtagagctggggtttcatcatattggccaggctggtctcaaactcctgacctcaagtgatccatccatctcggactcccaaagtgctaggattataggcataagccaccatgcctcttagaacattttaaaaaattaagtcttggcttgaaatctgatgtagtgtgactatacttgagaataataggaaatttcccaaatgctaaagacttaaagtacaagagaaagtcagtgttcttttttcatacataactttctacaggaaagataaaagaaaaactatcacaatattatgtattatttatcctcgctagtttatcaaacaacagttttgtaatttaatgaaattcctgttttctatatgagtatattgctctaacatatgctgtatatgattaatgtttcatttgtttggctagttactgctcattgctctgtgtgtgtgtgtgtgtgtgtgtgtgcgagacagagagagaccatgttaaacacagtattattcacctgttgttcgcctgttggttaacgctctggtatccatgtcccacttaacctttcccaacagtctacacttctattggaaatttattgttactctacccccaactatcccattatttcagggataaaatgaatgacatgtactgcgcccaagaaagtcttattgccctcattgcagtgattagatcagtcatgggtctgtggtctaagtcaagtgcgaatttcaggatttttgctgacaattctggaacacatgtttctttctttctgtgtagtgtgggatgtggatgtgaagggagaactgctatcctcactttgccaccatatagtatgttcacctcagaatgaatcgaacacattttctctgactttacaatacaaaaaaatgtttttgaagaattgccaggcactgtggctcatgcctctaatctcaacactttgggagaccaaggcagggagattactaaaggccaggagttcaagaccagactggccaacatggcaaaatcccatctctactaaaaatacaaaaaaattagccaggcgtgttggtgtatgcctgcagtgccagttacttaggaggctgaggcatgagaattgcctgaacctgggagatggaggttgtagtgagccaagatcatgccactgcactccagcctgggtgacagagcaagaccttgtctcaaaagaaaaaagaaaaagcaaacaaaaaagaagaaattgggcaggcccagtggctcacacctgtaatcccagcactttgggaggctgaggcaggcaaatcacctgaggtcagaagtttgagacaagcctagtcaacatggtaaaaccctgtatctactaaaaatacaaaaattagtcgggcgtggtggtgcacacctgtaatctcagctacttgggaggctgaggcaggagaatcacttgatccccggaggcagaggttacagtgagctgcgactgcaccactgcacactagcctgggtgacaaagcaagacttgtctaaaaaaataaataaataaataaatccaacacacaagaggcaaaattaaagagaaatttaaccctgattgatctgtacctaaaagaataatttccctctattgtataaggaagtttgaattaagcttttggttacttgcaactgaaaataaaactactgcaggatctcagacgtggatatggccttggaagcacagaagaagacaaatggttctggccttctccagaaacaataccttgtaagaacttcttggtttaggaagagactaaggaaagtataagaagaggagatcttttactttcattcattgttactgactttttgcttagttgttctgttcattattgagaagtatgtttaagtttccaacaatgattgtggatttgtctatttctgtctttagttctgtcagatgtttgcttcacacattttgaagctctgttaattaggcacatatacgtttataattgctccattttactgatgtatttgacttttttattagtatgaagtatttgtctttgtctctagtaatacttctttattgaagtctattttgtttaatcttaataaaatcactccagttttctccagttttccatgctacatatttttctatccttttacttttaatctatttgtgtctttgcatttaaaatgcatctcttgtagacaccttataattggttcttgatttttttttaattcagtcttacaataatctctgccttttggttgtttagttcatttacatgtaatgcagcaaaggccaggcatggtggctcacacctgcaaacccaacactttgggaggctgaggcaggcagatcgcttgagcccaggaattttagaccagcatgggcaacatggtgaaaccccatctctactacaaatacaaaaattagctgggcatggtaggatgcacctgtagtcctagctacccagaaggctgagatgggagaatcacctgagcctgggcagcagaggttgcggtgagccaagatcatgtcactgcactccagcctgggccacagagtgagaccctgtctcacaaacaaacaaacaaacaaaaacaaacaatatttaatgctacaaagaaagttaacacagcagattatttttatttacttcttgcttatttctgtagctataacagtgactcttggtctaatgctaagaactaaagtactgtaatgtttacctcgtactaggtaatgatgtcattctatacacccaatccagtaggtcaatatgaaccaggtggtcagcagatttaaagtaaacatgaagattcatgatgtgcacctggtacctgctttggggtatgcacaatggctactgatgtggcagttatgtattaatgtgacacgctctcttcaagaatcttggactccaagccccaaatgggctttcctgaatatggaaatcttgtatatgtctttacaatttgaagctggagagaggattacaccagtgtgataatcttagaaagggaggactcaggaacctgcacatgatctctctagcctttgcctaggtatatatttttcctgctgttcctgctctgttatcttgtgctatgataaacttcagctatccggtttaacttcatgctaagttgtggtgagtcctccagtgaatcacccaactagtgggtgattatgggacccctgagacagatataattattgagatggtggtatttatttatttttttatctttacttttatctttgagacagactcttgctctgtcacccaggctggagtgcagtggtgtgatcttggctcactgcaacctccacctcgtgggttcaagcaattctcttgtctcagcctcctgagtagctgggactataggtgcatgccactatgcctggctaattgttgtatttttagtagagatggggtttcaccatattggtcaggctggtctcgaactcctgacctcaggtgatccacctgcctcaacctcccaaagtgaaagttctgggattacaggtatgagccaccgtgcctggctgagatggctgtatttagatctgccattctgctatttattgattacttgctcagttattttttgtttctcttttcatgctttggtttgtgttaatcaattattattttattttagtgtttaatttgttcttttctaataatttctattattcttttgagatttcctatctgtttactacctttcatattttcctataattcttacaatatattttcttttaatcttttgacaattttaataatagctactttgaagtctttttatgttaaattcaacgtctgggtccactttcagtcaatttctattgattgtctttttgcctatatatggatcacactttcttgttttttcagatgtctaatacattttggttgaaaagtggacattatagataacatgtagtagctttagaatctattgtgttctgaagattattagtcatttgttgtattaggcagttggaagttaactcacctggaatcaaattgcaaactttgtcttccctactattcaaatgctaatatctttgcctgtttttatagtctccagctgctgcttttttttttttttttttttttttttttgagacggagtctcgctctgtctcccaggctggagtgcagtggcgcgatctcggctcactgcaagctccgcctcctgggttcacgccattctcctgcctcagcctcctgagtagctgggactacaggcgccagccaccacgcccggctaatttttttgtgtttttagtagagactgggtttcaccgtgttagccaggatggtctcgatctcctgacctcgtgatccgcccgcctcggcctcccaaagtgctgcgattacaggcgtgagccaccgcgcccagcccagctgctgcttttttaaaaaaccctggccatttgggaggtttcctcttttcctgcataatttattagtcaaccaaatatttggacagagaatatactcagactttatggcttctctgtgacttacttgcttctaaggatgcctcctcaattctaacttctttgccaaccttggactctgttctcttacccatcaagcctgcaaggctttagctttctgctacctgagctgcacattcttggagaataaatacactcagctgaaaagcagaaaactcattgatcttactctgggtcattctattttttgaaagtaaatttctctctggtttctgcctgcttttatactatgttctttaggtctcccacatgcatgctcagtatagcaggtgaattgatccaatgagtttttaatttcagatattgtatttttctcttctagaatgtctagttggttctttggttatgaattcaaattttcttttaacacacatcttattcttttttatcaactttcatacatttttgacatatcaatcatggttagtttcaaatcattgtctgctaaatccaacatgatgtgtctacttctattttctgttttgatttttaaatcaccttttcctgtgtttttgcatatctagcaattttgactgtattctgtaggatatatataaatgaatcatagaggctccagatggcatcttactccaccatgagtttctcttttcttctgtagatagggtgagagattgattacctcaatccaaccaggggtttagctggattgggaccacattgtaatttcagtaagctaggtcttctctggttcacccctattccttagacatgttcctccaaggctgtcgattgagaccctagaagtctttgtctctttagtcctgaaagagtacagcacattctattctgctctttgaagattccaagcttcaaatgtggcagattgtcttgaggtagaatccagttatgtgcttgaagcaggccccttctctctagtaggattttgtctcctaaagaatgcagaattattgatttcgttctacttcttcaaacacagcctcttagcttctttctaataaccccagaattcaactaatgtttcacagggacactaaccacatttgctgctctccaaatttccaatctgtcataccagccttgcacagttttattggtttctcttttctccggcagagtcccactgcatagctaagcctgatgctccctcagtgcttagattcagcaaagggctcaatgaagaaaacagcaggtaattatcaacttactccagaaggacttcccattctctctggaatttcaattcatctagtctgtgttgctctcacagctctttgatgtctaaaaaatgtgatttttgtaatttatccagttttctgattgttgtacaggagcactatgcagctatgacctacttccacaagtggaaagccacttatgggcaacataatcaaattggtgtctattggctgggcactgtggctcacgcctgtaatcccagcactttgggaggccaaagcgggtggatcacttgaggacagaagttgaagacaagcctggccaacatggtgaatccctgtctctactaaaaatgcaaaacttaaccaagcgtggtggcacatgcctgtaatcccagctacttgggaggctgaggcacaagaatcgcttgagcctaggaggcacaggttgcaccactgcactccagcctgggtgacagagtgaggctctgtctcaaaagaaaaaaaaaaaaaagcccaaattggtgttattgcagccaggcatggtggctcatgcctgtaatcccagcactttggaaggccagggaaggcagattgcctgcctgggcaatatggcaaaacccgatctctacaaaaaaatagaaaaattagcccagcatggtggtatctgcctatagtctcagctactcaggagatttaggtgggaggattgcttgagcccaggaggtggaggttacactgagtcgagatattgccactgctctccagcctgggtgacagagccagatcctgtctccaaaaaaaaaaaaaaaaaatatttttttaaaggaaaaaaattggtgtttattgcagtgacacaaaaactgatcttgatattagatcatactagctatttgactctagataattcacttaatatctcttagggataatagtggctacttctctgggttcttatataggtcaggtgaaataatatttatataaagcactttcaagatgcaaagtgctttacataaaaagcagtcctttcattcattcaaagtcacttattgaatacttaatatatgctagacactttactaggaggtgggtgggagaaatgaataagattggaaaacatggtctcacaagaagctcgtaactctagcagggaagaataatacataattaaataacagcattatatttttactattgtagatgtaggtataaggtaaaatggcaccatagagaaaggagtaactcagtatactctgatagcgaagagaaattataggacacttcccagagaaagtgaggatttagccaaatcttagggacttccaagtgaaaattaattcattgttgtagagactacctgttgtctacctgaatccattctctatctgttccatagaagacagtcatagttggttaaatagctatgcagctagagaatataatctcatcctgccttgtacctaggtatgatatggccatatcaaagttctcacttagatgaaaataagtaaactttgccatgtatggatcctggccttaaaactatatatatatatgtatattatagttttaagttttaaactatatatatatatgtatattatagttttaagttttaaactatgtaaatacacacatacacacacacacacacacacacacacacacacacacacacattctccatgctgcttctctctttaagagctagagtacaggcagtcttattcttaacttcgccatgcagacaaggatagcaacctaggagacagctgagcagcaagatgaaagaaactccagtccctaaaaggtcatatgcgtcagagacatcctactaactctgactgctcacctctaaactgtttcaagagagaaaagtaactcctgttttatttaagccactctattttggtaactttttgttacagtatctcatctgtacctaattgccctaaataaatacttacaaaaaacaatcagaaaaaagatgaacaactcaaatggaaaatgggtgaaggccatgaacaatttatgtagatggccaataaacatatggaaacaaatgttcaaacttacgattaaagaagtacaaatgaaaataagatgtctttttacctatcaaatgattatatgtacataatacaacctagcaattcacttcaaagggtatttattttagaatatgggaatatgtttagagttactataatttatataagtcagaattcagaaataacttatattctcaataccaggttactgagttaaataaattattgtatagtggaatgatattccatcattaaaaaataatttggtataggcccaaataagagtaatcccagctgactggacagtcatgtttgaatgactatatttgtagacccagattctagatacagaaatacactttaagagattgggcccaatgcaaggatcaaaaaaataattgtcattcttttccaaaatcttattagagggaaaaaacatccctagaagttatgactgtaacctggcaactaaaaaattacatgatttgtgcaggcccctgcctgagaaattattccatgaactgaagtttaactgaagtggttatgattcatcacagaggacccataataaaaacatagtgagtatttttctgaggcttttcataaccatgaatcaatgacacaagttctggaatttaactttgaatgtggcttcaaattctagaggacaagaagtgtaagtgaactttgtagcgcccttggtgttgtgttggtttgttttctcatgctcatcaataatccacagaaagaaaaataacaaatctcactttgctgttgtgttgagttgttgcctcttataaagtcattacccaaaagtaaatggagaatataagataattggtctaaatttattttaaactgttattttttataaggccaaaccaaatgtgatgaaaatgataagattttaaaacaattaaatgaaatatggaaatgggaagaccatcttacttcggtttcagaacatcctagtaaaatggctaagtatgtagaggcatgtttattgtggtttcattgaaaggctttgcctactaaagagtgtttgattattcaaaatatctcaaaatatatagtttacagaaagattcggagaactatgaactgtggagggaataaaaccttttttttaaagccacataatgaaaccaccaatgaaacaacaatctacttcacagcaaagtggaaaaacatctgaaagaacattttcaaactcaatggggtgacagtgcactgtgaaaaattcctccaatgaaatttctaacattgtttaagaatgctttgtgttggccaagcatggtggcttatgactgtaatcccagtagtttgggaggccaaggcgggaggatcatttgagaccaggagttcaagaccagcctaggcaacatagtgaaaccctgtctctaatagctgggtgtggtggcatgcacctatagtctcagctacgtgggaggctgaggtgggaggatcacttcaccccaggaggtagaggctgcagtgagccccatgattgtgccactgcacaccaatttgggtggcagagtgagaccctgtctcaaaaaaaaaacccacaaaaaacagaatactatgccttcatattgcacaataacataatttatacttccagaaagacagcatttattattaaaaacagcaaatgacaatcatcattaatttgttttactattattttataagaaaatatttaaatatgtatagctattttcttatgttgaaaaatatttaaaatatttttaatagcaaataatcaacattaatatttgttctcagttcatactgagatattatgtaagaaaaatactaatggcattgattacgatattattaataagctaatatatgctattagataaataactattaaaaattaaaaccattatgcttctgacaagataaagtacatctatgaaatattggggttttatattcatatagaatgttgctgttgaaactagcttcacagagtttatgaactcaagaatattttttatttctctgatttttgccagaatcaacatgacatgaacgtgtacattgtatctctgtgaaagaaaagaggtgcatattactttgcagatacttaagttgaaatgtttatggaattagctaatttagattcaccttttttactgcatgcagatttctaatatctctagttctatgtctttcaagttttatttgagtaaattcattctttctagtttttgcttttaaaaattattttatggaagttcatttatctacattagaggatcttcacagtatattaaggggaaatggcaggctatgagcttattttgtgcaaatatgatataaggatagaaaaaagtctatagcggatactggttgcacagtaaggaccacttgaggagcttttttttttatttttgagatggagtctcactctgtcacccaggctggagtgcagtggcacgatcttagctcactgcaacctctgcctcccgggttcaagcgattctcctgcctcagcctcccgagtagctgcaactacaggtgcgtgccaccacgcctggctaattttttgtatttttagtagagacagggtttcaccatgttagccaggatggtctcaatctcctgaccttgtgatccacccgcctcggctaaacatccaatgaccaaaccctacctcagcctgattaagtcagaatctctgagtgggtgtcctagacatctgcttcaatagctccccaggtcagctaaggctgagaactactgatttagaagcacgcacacagcctccctgaacacacacacagagtacatctacctgtaatgtggatcacaggaagttttatattcttcttttggcttatctgctttgtctacaataaacatgtacattttcctaaaatacacatgtacttgaatgcacgtagatggaagggagggagagaaggtgaaaggaaagatttttaaattaattttaaaaaattttttgtagagacaggagtctcactatgttgcccaggatggtctgagactcctggccttggaaaatgcttccacctcagcatcccaaactgctgggattacagatatgagcccctgcacctggccaattaaaaaaaaaactgttttaaacaaatgaaccccacgtcaacacagcaaggatgcaagacaacagtgggggaaacacacatggtgtctttctgccgtcctcacaggtggctgaaaaaagcttcaggagcagaagagtgagtcagaaggagctcacatctgctgagtttctgtcatgtgtcattgcttaatttttcactgcctttaattcccacacctacctcgcagggttgatagatgatttttctcttatagatggggaaatgggctctcagacagatgaagtcacttgctgagtcgcatggcaagcactctgacatacgaacactgtctgagccaaagtcactacctgactcctaaaactcaccttctgtggtgaggaggagtggtggttggcaccagggctctttccttttgtgtaactaacagaaagctgttaatctttcttgttttttttttcactttcctggaaaattgatacttcattaaagctttctagatgccacttattctacccaagaccaccttctgctgcttatttttagatgactacagattcttcattcactatggaagcttcacaaatcactttgtcagacaaattgtttgaccttccactggagagcagttgttaccactttctaataatggcccataaacatattttttaaaaccacccggattcctttgaaaacatggccaggacaaagtcttgtcacttgtgtctaaatgcacggtaattttgctgtcagtcagcatgatttgacagctgacagcagttgatgataaacaacaaaagaaaaggagggtctaagtggcaaaagctacagaagccagacagaatcaagcaagaagaagatatattttagaaacaacagctctaataactctaataagtaaattaaccatttaaaatagtatgtcaatcaagttttttaaataaatgaagctgtggagtccagccttctttttcacatgcttttttttttttttttttttttaaagaaaaccagttttgctctgtcacccaggctgtagtgtagtggtgtgattacagctcacggcagcttcgacctcccaggctcaagtattcctcctgcctcagcctcccaagcagctgggactacaggtgtgcaccactacacctgcctaattttaaaaattttatatagaaatggattcttgctctgttgcccaggctggtcttgaactcctggcctcaagtgatcctcccactttggcctccccaagtgctgggattaccagcatgagctaccacgtccagcttcacatgtttattaatgccgatgctgtatatctacatttcagtaatatatatttttgattaaaggaaacattttaagttaaaaggatcagcctgagcaatatagcgagattccactaaaatatatatatatataaactagccaggtgtggtgtctgtggtcccagatactcaggaggctgagttgggaggatcacttgagccccgagtttgaggctgcagtgagctatgactgtgtcactgcactccagcctgggcaacagagcaaaaccctgtctcaaataaagggagtgggggaagcattctgatttcttcctgaccttgttctttatcgcctccctcaagttcacattatttattggttggtggtcccaaataactttagaacagcatagtggaaccccaaataacttcaaaggcagactggcttatttgttcacagaatttcaaatatctaagatggtgcccttgaccaattgcttttccctctgatcacatttgacctctgtcttctcagacacttttattgcacatgatggtataaaaaagagaacataagctctggagttgggctgttctggatttgaatcctggcgatgcaagttattggttatgggagcttgacaataattgttttatttctctaagccttagtttctacattgtcaaagttgaaagaaaactttttccatgcactccttagaaaaatgtcagactaaacacgccaagtgcctagcccagtgcttggtacagggtaggcacttaaaaaatgttagtttacatcccacgcctgattaactttaatgttgctcccatcctacttccatcttcagcatattatcattaagacagtggttctctctgaatgttatgctacatcctccaagagactacatgctcgttggaaatgaagacaatgcccagtcttttataaagatcttgtaagccctggctccaatgatggacagtaactgatatgcatggctaacccaaacttgtagcccagtgtaatctgggtgtatgcctaggctagcgcttgtcatatcaactagctattaatatactctgttcagaaaacctggcaatggctgttacattttttagttctagcaagatattttccgatatccagtaaaaacatagattttttaaaaactattcaaatcaatacacactaggcaggatcatttgaaagtgtgctctctgcaaagtcagcaagtcaatattttaaggagggtattgattttttatttgtaaacacatgagcccaggctactctacaggaccatgctgtgggcctgttcagagatgagaccacatcattaaaaaaacgaaacaacaaccaaaaagctttgatgcgctcttggacaggatccacggcaaatacaccttcaagtaaattgccccgagtctcaaagtgttccagatgcaacatgttattttacagtcttggacagtttccaaactatctatcaactgaaaatgattcactgatctatgatataaagttctgtgtgccttgagggaaaagatcaggactttttgaaatctcatctacctttgtagatcagagcatatagtaccatgaattaagtaggtgttaaataactgtgggttggattgaacttattgatcaggggtgatatgtttgttggcagaaataattagtgaaatactttatttttatattttaatttaaaaagtgatgctcacaatcttactgcagctgagatttttcaaggctggggtactttccataagttatagagcttgctaattatgtttggaggtttgaatatagttgcacatatttagagtcaaattccttctattaataaatattcttgcctgtgagtatttctccttcaaattctgtcttcttcagtttcaaacagtttaaaacataaacgggcttaaatcaagctacaaaatgtgacttctaagccaacagttgagaaagaccatcttttctatttctacaaaaaaataatgagatgattgaacatcattccaaatgggagtcatcacctgtcctaaagattgctttaaataaacatctcattcagtgaactgataaagtggtaaattagatacattgctaattactatgttgtcctgtagctgtaagtaaaagccaagaggctgggtgcaaagtggctcacacctgtaaattctagcactttgggagaccaaggcaggaggatcgcttgagcccaggagttcaacctagagtgagggaccaattacttcctattgaaaaggcaaacatgtattataaaaagctttgatatttggccaggcacagtggttcatgcctgtaatcctagcactttggtaggccaaggtgggtggatcacctgaggtcaggagtttgagaccagcctggccaacataacaaaaccctatctctactaaaaatacaaaaaagtagccagacatggtggcaggcacctgcaatcacagctactcaggaggctgaggcatgagaatcgcttgaacccaggagtcggagattgcagtgagccgagatggtgccactgcactccagcctgggggatagagcgagactctgaaaaaaaaaaaaaaaaaaaaagctgtgatattcaatgccaacgaagcttcagtaagaccggtgctctgaggcactgctgacggcaacagaaaaagatactttcctggaaagaatttaggaagccacaaaaaagttcctagcctctgatccaacttctgggatttcatcctaagaaatttgtccaaagaggaataaaagccatgtgcatgaacatgtccattgcagcacaatttatactgacaggaaatgagaagcaacaatatggcaatgtttaaggaagttacagtgtatctactcgatggaattttaatttcaagaacaattatcggcccctgtaatcccagcactttgggaggccaaggggggtggatcatttgaggtcaggagttcgagaccaccctggccaacatgatggaactctgtctctactaaaagtacaaaaattaggtgggcgtggttgtgctcacctgtggtccaagctactcaggaggctgaggtaggaggattgcttgaacccaggaggcagaggttgcaatgagctgagatcatgccactacgctccagcctgtgtgacagagcaagactctgtttcaaaaagaaaaagaacaattatcaaatcaattgcaatataaaaacatgcttggaaaatgtcaaactaacaaatgaaaattgttaaatacaaaggtatgtgttgtgttatagcaacagctatgtaatcaatgaatataattcagaaagattagccaaggatacaccagaagtgatggcagttgctttgttagaaatatagcagtataggagtataggtaatttaaaagtatttctatttcccaaatataccctactatgattatatttaataagtttaaaatactacataaggccttcagagaaggaaattaaatatcttttcctatttatttttccagtgagcaataaacttaactttcagtgaagtcttccttaaacacaacttgcatttctcccgctttggcttaagtatattttatcttgctctgttgtaaggataaacatttccatcctctctatttgttattttggctaaggacaccacatttccatgttagaatttcttcagtttttttctattgccttgagattgcatgcaggtatgttgagaactgaggattttaattataaatatacatagatttaacctaataaaggactttctttttggaggcatgtttgacaattggctggttaatgtacaattggctggttaataatgcaatctgatggtgtacttataactctaaaattctatggtagtttctaggctgttcttgaaaggcttatcattttaagtaagaaatcacacaaataggccaggtgcagtggctcacacctgtaatctcagcacttcgggaggccaagatggaaagatcacttgaggccagaagttcaagaccagcctgggcaacatagtgagatctcatcgctacaaaaattaagcaaagttagctgggtgtggagggacacacccgtggtcccagctactcaggaggctgaggtgggaggatcatttgagccctggagttcaaggctgaagtgagctcagattgcaccactgcactctagcctgggcatcagagtgagatcctgtttcaaaaaaaagaagaaagaaagaaagaagaagaaaaaagaagaaatcatgaccgggcacagtggctgacgcctgtaatcccagcactttgggaggctgaggcgggcagatcacctgaggtcaggagtttgagactagcctggccaacatggtgaaaccctgtctctactaaaaatacaaaaattagccaggcgtggtggtgtgcacctgtagtcccagctacttgggaggctgaggcaggagaatcacttgaacccaggaagtgaaggttgcagtgggccgagatcataccactgcagcccagcccaggcagcagagcaaaactccgtctaaaaaaaaaaaaatcacacagatatatcatttaagattaaggcagggatgtgggctttcttgtacgtgagagctcttctcaccctcaaactaagtaaattggtattattcagctttcctcatgtgattaaaaaaaaatcaaactttatggttgtacactgaaacttctccaggttccctcttttcttttgagttgtggaaacttgaactgtatttatgcaaaaataaaatatccaagatcgtattcttttggggccaattctgatggtggtatttgctattgctgtctttggatatctctttagttctgcagaaaacttacctactaataatggttaataatgtgtgcctcagcagcaacagatgcaataagattatagttaagaacctgggttcaagtactagctctttcatttactagttgtgttcccattgttgaacaaataaataaaacaataaacttatatttcctattacttgttaataaaagtgaatcagaaagcctaatgagaataaatgttttaaaagatgatgagggagctttaaaaaaataaattttgctgcactctaagatgtaaaatatatgtaattatatgtgcatgttagtgtgcggatatccaggacattgacactaaggtgatggttatgcaattgattgacactgaaatatgttggttcagtgccactaaggagccagcctcagatcttaaacatctcaacaattactatgagtccatgggggccatacaagttgtaggctccttatcacatttgtcttaaatagtattttttaaattacaagaacccttagcccagataatccatgttgtcatacagtgaatagatatcagatgtgttgacatgttggttctctcagcccacagggcagccaggcagggcctggggatgtgctcgatcccctgggaagacctccttcagttgagagctaccttatctgtttatgctgatgtgctgaacaaatataatcattttctatgtgtgcatgtgatagactctggtctcactgcagatcacgtctacattcaagtaatatacttcgatttgtcttgacttttcacactagttctcattctagctcttcctattttgtttaaattatttatgcttttctcacagccagtgctgctttttcaaatgtgggatgtccaaggactggagcatctgttagtgagcagcaaggttcctggcaatgtctgtatgtgcttggaggcatcattaaaatgtccccggaactgtgacttagagctggataagacaagagggatatgtggaatctaaccaggtctcagttaggagacatgaaaagaatttcagaaaaaaaaaattaatcttaaattattttaatataatcaaataataaaacaatctagaatgagttgccgaattaatccagccttgacacttacgtaacatgttacttggttacatggagggcgtgggcttggaaacttccacatgcccgtcatggctgagagggaaattgtcttagatgcctcagcttaagctccttaccaaaatctctggtatgatagtgggaagactgaattgtttttttcttgaaagtgaattagtcctaaaaagagctagaatttagtacaggaatgcttttttaaaagcaaaaaattagttctaatatttcaggtttatgtttgtggataaactgtgactaatgtggtagctttaagtaatgtaatgtttaagaaattctgaatatattaattattcaatagattagccaaatggccctgaatttaaaatttgaaacatcaccattgatccagacttctcttaggttgaaagccttaagacaattttatgtaatttataagggttcagcataaatacaagattattaggtttattatgcttatttaaataaccaggaaggtttctttgtaagtcagaaaactaaagaacttaaaaaatttgaaaataataaatgtataagttacttaaaatatttaacaaagtttgcaaatcggactaagcaataatcaaaggtcaccttaaaaatgaattttataatattaccttatttataaattgaatttttaaatatataaaataaacttaaatgtaaggggaaactgggcttttgcatttgttacttaaatcaatcaaatgttaattttaaaaaccaaagtgagccctgaataatttggaagagggtttagagatgccaaaaattcctgttgatcaaaagatatcacatcgaaagggtgattaaaacatttattccgaaaggaaaatgtgtggtatccattttgttaaaaatgataaattataatgttttatacaaaataaatgaatcttatcattgcctccttatgacgaaattagtgtttttgtcattaaaaatgaatttgttaggtttgcagtctcattgatctctcaggatttagaaataattattttttgctgaattaaagatagctctattttttaattgttattagcttcaaaaagagtagcaaattcacaggagggaaagtttaagctcatttcggataaaaattgggatcttaagtttaagcatgaaggacatccactctcccttgcttatttcagtctctctctcagacacatttagaagcagaagagttatgtatagttaagttcagcctcccctgttttcagtgagaaaaccaaggctaagaaatgttacataatttaagtaaaaatatgtggtgagaggtacaatatggtgtggttgatagttgacaggatttggtgtcataaaccctgttgggttttttgtttgtttaagatttttgttgttgttgttgttgttgttgttgttgttgttgttgctgggcgcagtggctcacacctgtaatcctagaacttcgggaggccaaggtgggcagatcacctgatgtcaggagttcaagaccagcctgaccaacatggtgaaaccccgtctctactaaaaatacatacattagctgggcatggtggcgtgcaactgtagtcccagctacttgggaggctgagccacgagaatcgcttgaacccaggagaattccttgaacccaggaggcggaggttgtggtgagccgagattgtgccactgcactccagcctgggcaacagaatgagactctggctcaaaaattaccatatgtttgtttcctaataataaacatttattgaattctttaaatatttcaatatgctttatatgtatttatttcccttaaacaccagagcaacctagtgaactaagtgatatccccattttatagatgggaaaactgagactcaaagcgattaagataatgagaggatcacgtgagcccaggagtttgaggctgcagggagttgtgacagtgccactgtactccagcctaggtgagagtgagacccttctaaaaaaaatttttttttttaatattcagaagatctgattttaaaacttgccttcattacgtgtttgttgccttgtgactctgggatgtcttcctaccaagaccttaccctaggttagctcagcaggtttttgtgacgagcaaacataaacaagtataggaaaacactgtctaaaagtaatatattattcattcacaatggggtgaagcctagaacccatttattctgactcaatttaatgttattttgctgactaattcttaatcaagtgttctttaccttcaaataattttattttccatctgtgcccgcttttgcctatagtgatgaatatttattgagtatgcatcttgttcttggcaccacgtaagtatcacacacgtcaaggtatatgaaaacttggcttatgttatcaagagacttcatgggatgatgagaaatgcagaaaaaaactgaaatcctgatcttctcttttttccatcacttctctgcacctcatattttccatctataaaataagtgataataccaccacatgaaaaatcatagaaagaatttagcaacgtaactagtaaaagtgaatacatacaaaccatatgtgatagaatggatgaatcctactaagaacagttaccaggtaactgaagctaaacaactctcagaggactgagggatgttacatttctgaccaagtagagtagaaacaccttgctaaatacttatgtattcactaaaggccccagaaaagctgcacctttggagcaaagctaaaatagggtactccacaccgaccctaacaaagattaacaacaacctttaagccggtcatggtgatgcatgtctgtagtcccagctactcaggaggctgaagcaggaggactacttgagcccaagagttgagcccagccttggcaatatagcagatccagttttttataaaacaaacaaacaaacaaatcatttgaaagaatcagtaagcctgctagaaaaaaactcaaaataatattgttatgtttaaaggaagattacaaagtctagacactaaatgatacaaccttcaccatgtccatcatctaatccaagattctaacgcagagaagcaagaaaatgtgacccaaaaacaaaaccagccttttggccagaaccgtcatcttccagtaatttgccaaaatgatgaatacaaaggcaaaaaggaaaggcactggatatatgttctctaggcctttacaaaaacatggagttgttcctttggccacatatatgctaatctataagaaaggtgatattgcagacatcaagggaaggggtactgttcaaaaaggaatgccccacaggtgttaccatggcaaaactggaagagtctacaattttacccagcatgcttttggcattgttttaaacaaacaagttaagggcaagattcttgccaagagaattaatgtgcatattgagcacattaaacactctaagagccgaggtagcttcctgaaatgcgtgaaggaaaatgatcagaaaaagaaggaagccaaagagaaaagtacctgggttcaactgaagcaccagcctgctccacccagagaagcacactgtgtgagaaccaacgggaaagagcttgagctgctggaatctattccctatgaattcatgcataataggtgttaaagaaataaaataaaagacctctggactatttaaaaaaaaaaaaaaaaaaaggccaggcgcggtggctcgcgcctgtaatcccagcactttgggaggccagggcgggcagatcacaatgtcaggagatcaagaccatcctggctaacacagtgaaaccccatctctactaaaaatacaaaaaattagccaggcgtggtggcaggtgcctgtagtctcagctacttgggaggctgaggcaggagaatggcgtgaacccgggaggcggagcttgcagtgagccaagatagcgccactgcactccagcttgggtgacagagcgagacaccgtctcaaaacaaacaaacaaacaacaacaaaaaaaattaaaccatgtaaccaatagagatgtgtgtgtgtgtgtgtgtgtgtgtgtgtgtgtgtgtggtgttgtgtgtggttaggcaagcaaaaacaacaaaaagcaagcaaacaataaatctaacatttaggatcaaaatattatttgagggagatgcaatgggatgagacaagaaaggcacatgtagataaatataggttacttattctgattgttgggttggatgtttattatattattgaatggtattgtgaatggatcaaggatgatggcatataaacacccaaagtttatggttaacacaattctgtgcatctgaagtgcaggagaacaaggtgggaagtaaaaaagaagagtagaaaagaacacagcattatgaagtctgtggcagaaaacaatataactttctagagcataaaaaaaaggccaatgtgagcacggctggaactggaggacgttatgttaagtgaaataagccaggaacagaaagttaaacaccacatgttctcacacatatgtggaagctaaaaaaaaaaaaaatgttgagctcatagaagtaaaaagtaggacagaggataccagaggctggggagggtcatgggaagggtgggtcgggggcaggatagggagagatttgttaaaggacaaaattacaggtagataggaggaataagttctattgttctataccactgtaggtaatacatagtttcgaatagctagaggaggaggaggatacagaatgttcccaacccaagaaatgaccattgtttcagatgatggatatgctaattaccctgatctaatcaccatacattatgtttcaaaacaatactatatacccccatgaatatgtacaattattatttgtcagtttaaaggtttttaaaagattaaaattaaaaaaaaaaagaaaaaaacccggccgggcgccgtggctcacgcctgtaatcccaacactttgggaggccgaggcgggcggatcatgaggtcccgagatccagaccatcctggctactttcgtgtctactaaaaatacaaacagggcctgtagtcccagctacttgggaggctgaggcaggagaatggcatgaacgcaggaggtggagcttgcagtgagctgagatcgggccactgcactccagcctgggcgagaaaaaaaaaaaaaaaagaaaggaaagaagaaagaaagaaagaaagagagagagagagagagagagagagagagagagaaagaaagaaagaaagaaagaaagaaagaaagaaagaaagaaagaaagaaagaaagaaagaaaaaaggccgcccggtgcggtggctcatgcctgtaatccgagcactttggaagaccgaggcgggcggatcacgaggtcaggaattcaagaccagcctgatcaacacagtgaaaccccatctctactaaaaacacacaaaaaattagccaggtgtggtggctggtgcctgtggtcccagctacttgagaggctgaggcaggagaattgcttgaacccaagaggcggagattgcagtgaaccaagatagtgccaccccactccagcctgagcaacacagtgagactctgtctcagaaaaaaaagaaaaaaaaacattttctgtgtgcctgacacatagaaaatcagcaagatgtatctctcagggcagactctcactgactcatcccatagaggctgtcattcaagcatttattaaatcatgatgtgaaatgcaacagtcataaattctggaatgtttaacccatttagcacgggggagggtagaaaagtcacatagtagcactcaataaatgttagttcacatcccctttataactgtaaagttctgcaaaggcaatactagtgtttattttcgtatggagaaataaaatagaacaagcatgatatcatgaaaacaacacttaaaatgagagttctagctttgccaataactagctgtatgatattaggaaaattattctcactggactccatctgtagtaactggagtttggtatattggaaatttccaagtgagttccacaaaacactaatgtcttttaggatgttaataggagctaaatgagaaagaatctgtgatcaagtcctatttgtaagtggactgaatgtttgtgtcccccccagattcatattttgaagtcttcacctcctgtatggctgtatttggagatggggcctctaaggaagtatttaaggttgaattaggtcataagggtgcagaactgatccaattggattagtgtcattaatagaagagacataagaagagcacctctcactctctccaatatcatcctccaagaaaagaccctgtgaagacaaaacaagaaggcaggtatgtgtaagccaggaagagagccttcactggaaacctaacaagtcagcaccttgatcttgaacttccagcctccagactgtaagaaaattaatttttcttgtttaagaccctagcccatgatatttttttatggcagcccaagctgccaaatacggttttatgtataacccttctcaaagatttctaatactcggagaagttctttttttttttttttttttttttttttttgagacggagtctcactgtcgcccaggctggagtgcagtggcgcaatctcggctcactgcaagctccgcctcccaggttcacgccattctcctgcctcaatactctaagaagttctacagtgaaaaaaaaaaaaaaaagaaagaaagaaaacaagggaaatttatctaatgtactgcttctgaaacttatttgtctattaaacacttttttaaaatcaccatcttttgaaacagggcttgggaaacactagccaggatttttcagttctgtcagttctgaaactaggattccttctaaaacctatacgatgtaactgataaagttagatttaaacatgagtgagactccacttataaactaggttataacaaggaaattcaaaggagattgtaaatgcagaggcagcacagtgaatgaagtaaacacttgaaaaacagcatcatatgtcatgcgtggtggctcatgcctgtaatcccaacattttgggaggctgagttgggcggatcacctgaggtcaggagttcgagaccagcctgcccaacatggtgaaaccccgtctctattaaaaatacaaaacttagccaggtgtggtggcagacacctgtaattccagctactcgggaggctgagacagaagaattgcttgaacccaggaggtggaggttgcaatgagccgagatcgcaccacttcactccagcctgggaaacagagctccatctcaagaaaaaaagaaggaaggaaggaaggaaggaaggaaggaaggaaggagagagagagagagagagagagagagagagagagaaagaaagaaagaaagaaagaaagaaagaaagaaagaaagaaaagaaagaaaggaaagaaagaaagaaagaaagaaagaaagaaagaaagaaagaaagaaagaaagaaagaaagaaagaaagaccatcactgctttgtgtggagacagcttctgtgttctttcaggacaacttgagaagttttaccaacaaaaactctcctgggatctccatttgttcattccataaatattgagtgcttacggtgtgtcagggactgttctaaacactagcatgatagatggcatcatgagacaccaacgtgtgtcagaagagagctctcattgcaaacactaatttgtacagatttttaattgcagcatgagcaaaagtagctagcaactctgctagttaccagcagatggcagtagcagtcacttctttactggcattttagattgggaatgtgtagaagcaccacaacctatcatcagaactactctgtggtgtcaatgtgtgacttagggacagttatctaacccgtctggagtgaagcttccctatttaaatactagagataataaaagcacctacctcttaagttgtctcgagagttacatgagataaaacacttgaagtgctttatcttcaacatgaaggaagggttaataaatgctagttattacttagtatggttgatactgtttttttgccatttgacaaaatgtcaattatccaaaagaggaagagaagcagatggctaaaagttgtattgcttcatagagcaataacaatatcagcaataaaggaaaagaaaatctaaatatctaaaaatataacaaagggtgcaatacaatcttaaggtaatcgctagaaagaaagcaaaaatctgagcaggtttttaaattagtacttttccaacaggtcacttttaaagtattttgactgtctgataactccctacctgcgctgactcaacataattgtgaattatttgtaaatttcctattcatcaaagatgcagcagatttgcgaacagagtttctagctagatagccaagggaatcatggggctattagacagctaactttttttcttaagcttattgtttattggaaccaaagataagttgtttcaaggctaggacctccggaatgactcagttaaaatgagccagaattcagaatttagaagcctcagagccagcttacctcacttcttaaaaatatttggaggaaaacactagggaactgagttgtaatggggaggtgggtaagaggagtaaaaccctcttatatacccttgagagctgtttgaacagcaaagattcccaaaacagggacaaactatttctagggataatctatatatgcaaatataactgtttattgaatgaattcgtccatatgggaacgattatgatgcttcaggacatggatgatttcactacaatctcaagagttcagttaaagaggaaaactttccatctgcaatccaaaacatcccacacttttctctagtaacaaatagggaggtctcaaaagacaagttatcctttttaggagatctccacagcctgaactaatgagcaactgaacaataataatctcatttttatgacaattcatgtgacgacattgaacaatgggaaaataggagataagcaatgctgatgaaatgtgtcagtggcttagcatcattgatggctattattatttttacttcttatgtggccagattttttaaacagaaaatttggaaagatttctcagactgctattttctctttttaggttgacttatttattgcccccacttcagaaattactttttgaaattgccccagatatcaggttccagaggacagaagcaaacaacaaaggttaatcctgagtatacagatattaataaaaatagaaaagaaatgtgaaaaataagtacattcactaataaaagtagtttagtattctttttgtgattgatcaatatgctaaaaatacaacacacacacacatacacaacaaagttagtaaaactaaacaaaaacacgtatcgcccatcattcagcattcacaatacaatgatttgctgaaatttctcttaattttttctatgttttatgccaactttattgtggtagcagattgtggtatattccctcccctagagcatggaagggacctgtaaatatgatgggatctttcattattaggttgtgttatatgtagtacagatgactttaagaaagagggactagggtgaggaggaaagggagggagagaattaacctaatgcatgcagggcttaaagcctagatgacaagttgatgggtacagaaaacaaccatggcacttgtatacctatgtaacaaatctgcacgttctgcacatgtatcccagtacttaaagttaaataaataaataaataaataaataaataaagagagagagagagagagagagagagagagagactagccaggtgcagtgagtggctcacgcctgcaatcccgcactctgggaagccaaggcaggcagattgcttgagtccaggagtttgagaccagcctgagcaatgtagtgaaaccctgtctctactaaaaatacaaaaatgttagccacgcatggtggtgtgcacctgtaatcccagctactcaggaggctgagacaggagaatcacttgagcctgggaggttgaggctgcagtgagccaatattgtgccaccgcactccagcctgggcaaccacagtgagaccctgtctcaaaaaaaaaaaaaaaaaaaaaaagagagagagagagaaagagagactatacttggtggtcctgacctgtccaggtgagtccttaaaaaggacaagtctctttctggtgaaagaggttagaagcatgagaggagtttgatgcaagagagattctagctttgctcactttgaaaatggaaaggggccacatgccaaggaaagtaagctggccctcggagctgagaatgggccctgagtgacagccagcaaggaaacagagatttcagttccataatcacaaggaactaaattctgtcaacatcctgaatgaggtacaaagcagattcttcccaataacctacagaaataaacatttctagtaatatatatatcattctgagagttattttatcttttctgatttccaaaaatagaatccccatggaatctgaggttagacaactgtatgcctcctgttaccacaagtacacactcttttgtgtctagatttctttttcttagcataatgtttttgagattcatccatattgccatatataatattagttcatttcgttttattgctgagtgtttctctctctttattttattttatttatttttttgagacaagatctcactctgtcacccaggcaggagtacagtggtgggatcatggctcactgtagtctcgaccttctggactcaggtgagtcttccatcttagcttcccaggtagctaggactacaggcacacaccaccatgcccagcaaatttttttttttttttttttgagacggagtcttgctctgtagcccaggctggagtgcagtggtgccatcttggctcactgcaagctctgcctcccaggttcacaccattctcctgcctcagcctcccgagtagctgggactacaggtacccaccaccacacctggctaattttttgtatttttagtagagacggggtttcaccgtgttagccaggatggtctccatctcctgacctcgtgatccgccctcctcggcctcccaaagttccgggattacaggcgtgagccaccatgcctggcctgcttaggattttctatgtatacagtcatgccatcttcaaataagacaggcttttcttcctttctgcccattatgtctttcatttcttattcttgccttattagtattgctaagacttctagcataatattgagtataaataggaagagtagatactcttgtcttggttctgatttaaggagggaagcataagggggactaaatgcttccaccagtaaatataacattacttataggttttccatagattcaatttattaatttgaggaaattctcctctatcctagttaatgagagtttttattttgaatggatgttgaattttgccttatggttgtttgtgtgtgtaaagagataattgatgtgactgtttttccttttctttatgggatggtttttattttgaaattcaaatgtctttcgtagatttagggcttttcagattttttctatttcttcttgagtcacttttgacatttttatctttcaagggatgtgtaggtttcatttaacctgtaaaatttattggcataatgttcttcataatatctccaatattatcccttttaatatttgtaatcatgtccccctctcattcctaatattggtcatttgtgtcttctatctttttgtcttgatcagtccaccaagtgttgcataaaatttaataaatttttttgcaaagacccagattaagttttactaattttaaaaagttatgggtccaatttcaatttcattgatttctgctatgacctgtattattttctttcttctatttactttggattttattttctcttcttttcccagcttctcaaagtctccaccagatgcccaaaatgagaacagatgacttcccacttggactggtcagaactcaaatatctctctgccctgtgtgagctctagaagtagttcaccttacaattctccagtggtttttgcctgcccttgtggagtttcaccttattcctgtctggccacatacacagcaaagactcaaagagacccctatgcagatttttggagctcttttcagcacagctccctcatctctagaactctacctcgtaacattcagcccccttggcctctctgatccctacatctgcttgactcaatagactctgtttaggatccccctctttgcatctacagtctggttatttccaggaagatatcaggggcaatcatagtgatcaccttgtttgtttcaacttcttttagtgattaaatcttgtcctacctgatgtccaatgtttgaaaaataaaagctttttacgttctgcatatttttctgggtttttgtgggagagaatgtccaatccttgctattccattgcagccagaggcagaatttctctcactacagatttttgaagttttcttttacttccatgctcttctatgtcccttgttggggtttgtttgttttggtctctggctttcatggtagaggctttcctcaaatgtcagtgtgcctttgatgtctgtatttacagtgaggcataacaaagctgatctgaagctttacatgaatgggcaggctttgtcaaatggtgggtctcaattgagggggacaggtggggacttgacctattcactggccagtccctgtaggtcagtatctcataggtttttcatttaaagatgattaataacataggagaggaattctccaattctctgactggaattataagccttgctgctagacttctgataactaaacagagaatgaatttttgaggggcttatatttaggaatatttccctttccatatggtatggcttctcactttcaccctctgctgttccaagactaggtcttttttggtttaacctctccaaagagttaacttcccatctgaggcagctgtgcagggggtgcatagactggctgtgtgaggtaggggagggaatctatggagtgtctagagcttttaaaatctgtaccaatcctccttcattctgtacttccgcatttagagataacttatgtatctagttcctgagatttttcttggattctgctatagaaattaacttgctttttattcactctctccccggagggttagagtttatctttcactagtctgctaagtcagctaccatgcatctattagctttctcagatccaaaatgttgaattttcttgtttgttactatctcctattttctttgtccttgtggctttatgcttttttttttttttttttttttgagatggagtctccctctgtcacccaggctggagtgcagtggcatgatctcagctcactgaaatctctgtctcccgggttcaagcaattctctgcctcagcctccagagtagctgggattacaggtgcccaccaccatgcccagctaattttttttttttgtatttttagtagagagggggtttcaccatcttggccaggcaggtcttgaactcctgaccttgtgatccacctgcctctgcctcccaaagtgctgggattacaggcataagccactgcacccagctgctctatgcatttttatataaattattaggcttcttttttttgaaaagttaaaaactctttaattctttattcctggtaccactatcacaatttacagggccatacacctgatgtaacgaaaagaaaaaaaaaagttacaacagataaaagacttcaggaatgtacatctaattgacactacattgcattaatcaatagctgtattttttgcaaactgtggttatgacagtcctgaacaagaagggtttcctatttaagctgcagtaacttttctaactatggataattgttccttttatggcagatttttccagttcctctaatgcatttgagacgactgtctcaaagtaacctgctgctttcctggtaactcctcactttaactcctgctaggaactgaagcccttttttgctgctttttagaaccttctgttattatatccaccacttttaccaccagatccataatcaccaccatagggactgcccgagcttcttccacccagaaagcctcctttcatgggtccataatttgattgctgttgtccactataatttccaaaatcactatacttcccaccaccatcatagttaccactgtcaaaatttcctccttcattgcaaccatcacatcctccaccattgccaccatatccaccaccttggttttcatgtcctggtccaccaccaccatagccccttattttactataaccaagaccaccaccatagttgccaccatcacttccaaatccattatattcaccatcacctcctctgcaactatctctgcttccagcacctccatcatagcctcctcttccaccaaagttttcaccacagccaaaattacctccaccgcctccaaattttgctctgtgacaattacaactttatcaactgtattatgatcctaaaaagttatggcaaagccaggtgcagtggctcatgcctcccaagcactttaggggccaaggtgggaggatcgcttgatccagggagtttgagaccagcctgagccacataaggagaccccatctctacaaaaaatttaaaaatcagctgggtgtaatggcacatgtctttgctcccagctacttgggaggctgaggtgggatgattgcttgagcccatgaggttgagtgagctatgatcaggccactgcactccagcctgggtgataaagtgagatcctgtctcgaaataaaaaataaataaaagtaaattttaaaaaagcaaatcccctcttttttccactctgcctgccttccataacatctatggtttaaatagtgccatacttttctttcctctctctctctctttccttcttttctttttttgagacagggtctctctctgtcacccaggctggaatgtagtcgtgcaatcttggctcactgcaccctctacctcccaggctcaagtaatcctcccatctcagcctcccaagtagctgggaccacaggcacgtgccactatgcgcggctaatttttgcatttttttgtagagacggggtttcactatgttgcccagtctggtctgtcccaaactcctgggctcaagcaatccacccacttcggcctcccaaagcatttggaattacaaacgtgagccactgcacctggccttgccatgctcttcaaattacattcttctctatcttccttgatatcacaaacaaagattttcttcatggttagatgggcaccaggccttatagaatcctctctagaaacagctctctttggttccagtacacacctgtcagccttgtgtgtccacctctttaacacgagagtaagtcacaaaaccaaagcctctggaatgtgttgtttgggagtctctcattatcacacagcctgtgagtatgtgccatttctcaaactatcgtctgtattttcaaagctgtgaacacagtaaacagttttctcaagtgctctggttcctttggatcatgtgcctccattttgagcccggactcgccttttccaaattgagttcaatttgggactgagaggaagagcagtcttcttttttaagaatagttttaggtctacagaaaaatcgagcagaaagcacagagagtttccatatgcttcctaccccagcggtgtcccctatcattgttttgcatcagtgtggtacatttgttgcaagtaatgggctagtaataatattgatacaacattattaaagtctataatctacattagagacttgatgctgttttattcttctcctctcattggaaagtggcagaaataaatgtaagtattaaatcttcgagggttaacagaaagtcttctatgtaggcctttggctacttctctcctttttgtcaccctcaaaattctagagtcatatgtattccctttttcccttcatcttttccatctcttcattatgcttcaacccattgtactttatcttctctgtcattttactaaaatatatctttccacagaaaacaatacctcctttattactaagttcaagtatgcattattattccttatcaaatttaactttgtagcagcacaggacactgttaaccctttctcccttcttgaattattttttacttaacttcccaacttggtatcttaccttcctgattcccagctactctaatcattgatcctttactttctctacattagccccattctctctctctctctctctctctctctctctgctttagccagtctctaagatggtcctcaatgattcccaactcttggtattcacattcttgtgtgtcaccttcctccattgacctgggttgatccatgtgaccagtaaaatagaacagaagtgatggtatgtcatttccaagattaagttataaaagatgttgcattttttttttgtcttggtcttgctctctttctcctctagactgctccatgagggctgcatgaagcagccacataatttaccattacaacctctggcaaatagtaagtgctcaactcatatttgctgagtcaatttatataagaacctttccacattttattgcttcctctctccccctcctacgaatttctatagcacttactgaacgcattttgacatctagcacattttgtatttattattttataaaagggcttggctcagttgagccttctgaaggaatgttccctcacctactatgtggctggcactgggctagttgcaggtcaatcgaagctcatcttgatcatcctcctagagaaggagctccttgtaggtgagtggggccaagccctggtcacctgtatgcttcccagggaacctagcctaggagcctgtagagtagcataaaaacgatattaaaatgggttgggtgtcgtggctcacacctgtaatcccagcactttgggaggccgaggctggcggatcacttgaggtcaggagtttgagaccagcctggccaacatggtgaaactccatctctactaaaaatacaaaaattagccccatgtggtggcacacacctatagtcccagctactctccttgggaggctgaggcaagagaatcacttgaacccaggaggcggaggttggagtgagccaagatcgcgcgccactgcactccagcctgggtgaccaagcaagaccctgtctcaaaacaacaacaacaacaacaactatagtaaaatgaacatttacctggaaatctcaaattctgagttcaatctttgacccttaaggctgtgactctgggcaagtcactccacaaatgtgaacttatttcctcattgtgataaagatatagtaattatactttttacccaaggagtcactgggtagctcagatatgtcaaacccttatttcctcacttgtcataggtcacttattgtcagatgaatcatggatttcataatatattttgcatttgtgttgggaatggggtgtgaagagcatgattttaaccatctatatcaattataaaacattcagatttcagtaactttaacataagaaaatgtttctttgaatcaagacaacacgttatctattgaagtgttcaagtgttctgaagttggaaaaccattgtaaaactgggagctctaattatgtcacattcaaacagatgtgttctgaattaatgactgagttgattttcctcttttttgttcagtcatgtgttaaggattcgttctgttttattattgttatgaaacattgcaaacacatacaaaagtgaaagcaatgccttcccatggatctgatatccagctgcaacaaaaatcaacacaaggtcactctgatttcatctatatctctactcaatactctccaccccccaccatccctatgggctattttcaagcaaatctcaggtctcatataatttcatttgtaaatactttaaaggagtattgtttaatagccatttaccttccaccgtcttctagtcagagataaactaagttttcttagaggtgtttgcaagcttagttcacattgcctaccctcctgaaagatctttattaaccaagttgaaaaatacaccttcttaagaaggccccttccccaatggttactgggggtggaaggtaatcttaaaatcattacttggggagtaaaatgctggtggttcccacatttctgaatacctttccattttaaaaccagttcttaatgcagtagacgagatcagaaactgacctacgtaagtttgtgatttttttttttgttagagtgctgatttcttcttaacttttttgtttgctttatctccatgggtttaatcattacatgatatggttctaatgatagcatgttgtgtcattttagggacactattttctgcaaacttttttactcagagtgttttctgaccataatgcattacaaaatgtactatatagatgtgaatatatgcttagaattaaaaataaaaatccatggataagttttcaaaataatgttgccactcactgtatgtttcaaaagagatggggtttcactatgttgctcagtctggtctgtcccaaactcctgggctcaagcaatccacccacttcggcatcccaaagcatttggaattacaaatgtgagccactgcacctggccttgccatgcttttcaaattacactcttctccatcttccttttcaaaataatgttgccactcactatatgttaaatgttaaacattttacagattcaaatgcagtagggattctctgaaaaagttttatcttactaacagctttcagattatcagtactagttgtatggcttaaacacagccacatgtaaatacttacttagatgaagctatggctaatcacatatgtaacacaatcagtttcatgtagtggtttgatcactcgtgtattcaagactatataaacagggatgaatttgaggaagttggagtgatggagtgagaaaagtttgtttttgcagcagtagcagtagaaggggcaggccgattcagtaaacaagcacacatttcagaatgcaaactgcattctccaagctggcaccatggttttacggtgctagggatgtttactgcttgttgggtttgcagctttataaacagtgctccttggagttctctgcttgctattctgaaacatatttgagttttgcaaccgagaagtaaatgactttgatttccaaaatcagtcagtcatttttcagtgttgtgataggagattcatttgaattcacttcttcagagatgcaggagccaatcaggatcctgttgcagtgaaaatgattcttttattgaaaccccagcttcctttaaaagaagccaaagagtactgaattacagaactgccatacagccttccctttattctttccatcacccaggccacaggaaaaaaaaaaaaaagacaaacttttgttcttattttcacaagttatcacatggtttggaaacttcagggcatttctgaaacttcattggtatgtgccagaaaagtcctctttaacacaccaggttgaatgaaagacagtttgagatgttaatttccatttactgcagaaaaaatatatttaatgcattaaggaaatgtctagcttaaagaaattgcccacttttgaaacaaatggttggaggcctgaggtccaaagctctaaaatcagttaacaaatgtttattgaacacctattttgaactaggctgttgaagaagttcaaaagtctaagataaattcccactttcaactcacctacagtctagttgggcagaaaaaatccaaactcaggggacaatgcaagagttagatagtaaaaccagacaaatacacaagcaatgaaacacgacaccatatggttgggtttagaaaagtgtttcaggcaatacatattgtagaggcttagggatcacagtaatctgaaaatccctggaaaatattcacaaagaaggtagaccattgggatgggtttgaaaacatagataagaatcagataaccttaagaggaaggaggaagcaaacagtgagtctggttgtaatagagaagggagtgggagaggttaaggagggtgggaaggggccaggttggcaaatccttagtggtaaggcctggctgtggggctgaagatgattctaaggggtccaaggtcaacagcagtgtttaaaattagattgccaagtgcatggattccctttcctttcctccttttctgtcctttaaaagcagaacctgattagacagtctgggacattcccagccctaggctaaaaagcagcgattgaggcacaaagtattcttggccctgaagttgaacctctggggatggagctcagggaagtcatagggagtttgggcccaggtaggatcagacctatccgcaggcttacataggctccagtgattaaagctcagcttcctgaatatgccccgaggataaaagagacttttccgagtgaaaggcattttccaaggcgctctcaacgggaatgtctgagatagcgaactgcggctgcagagcaccagctgaacgcacacacacaagtgtcttctcacggtatgattagtgttcacaggtttcgtctagctcatcagaaatgaagaatagcgatgatgaagtgacatgtcaccgggagggttgaaaaagaaaaagtgcgtaagagggtcccaaaaagaaccagcttccgtgtagacgggtctgcagaatctgccgtctcccgtcttctgggtcccctggcccgcccggagtggggacaaggaaatggaaagcccggctcacccggctctcctccctcgcagccagcagatggctcccgggctctctcgcgagcccgctcgccccctctccagacgcagggcttttgcggtttgggagggaggctgcgaggaggggcgcggtgcccgccgccgccaccgcagcaccgcacagcgtctctcctgggggtgcgacctacgccggggacccagcgctcgggcaccggaggccggcctcgcaccggtgcggaggccggctctcgcgaggtgaggaggaaacgcaggaggaagaggagaaggagaaggaggagaaggaggagggccggagctgcccccgcccagccggagcccggcaggagcgcgaggaaaacctactccccccgccccgcgccgctctccccgccctctcccacgccttccgctttcacctagggctgtaggtgcggcgcggaggctgggcgggagctacgccggcccaagccccgccggggaccagcgagccgggaggaggagcaggcgccacagccgccccgcgccccgcgcccgcttgtaatccggtccgctccttattcagccgccgggaactgcgaggaggcgtcatgtagcagcagcagcaaatccgcctcgcatttgcaactcttttttttttttttggtggggcggggggcgcgcggcaaaattctgtctccgcccccccttttcttgcccacttccatttgcaagctgcatctgcctctctaaaaaaattgaggagttcggggaagggcagggggccataaatcagagttggacctgcaataacccccacacctacagggcaaccatgaccgaggagagctctgacgttcccagggagttgataggtaagattcacgcggttgttggttttccaccttcctctgcgtactcctcacctctctctcccttcccacctctgctttcccgcaggtctcgagaagtcttggcgccccttagggcagagtggtgttgggcagggtcactgggggtgccgggaagtttgttcccatccgaccgcctgtagagccaagtgcagagagggaaggcttcggggaggaatcgggagtcctcgggaggtgggtgggaggagggtctcgactgtgagccctgggcacctcctcttgcccggaagcggggatccaggttggcgaaagaagggggcgggccatcttagacttgggagttctgcaagcgaggggagccctttacagctcccagcccactgccccaaactcgggaaagtccgggaaagcctattggaaggacaggtggcgagcgcacagtaggtcgtctccggcacgtgtcaggcgctttcctgaaaatgccccgcgggaggtgatcttctgacacgcagacttgggggagtgggcgctagtctggtaaaatgactgggcttggcaaggtgtggcttggtgtagccagctgggagcgaaagggttacagggctgacgcagactcaggccaggaaatagagggttaatgataaaagccttattttaataatgattaacctaccgattctccctataggggatctcttagggaacccgtgtgtgttacgctgtgcaaggtgacccattgtttgagtaccttgaggtttttttttttttggtggtggtgggggcggggctggttaagtcttggggtttaacttaattatctggagggttaaaatggcagagctgaaataggatgggagagtgttctgaaaacctagcgtttaagcatgtatatgtgtgtagcatgttatactgtaacaaggtatgtgcgtctgtgtacagatgtgttttgagccctagtgacctatattccctcctgtaccattcttggcacactacacagcctacagctcacaaagatgatgtttaatcggcgctgacaacaagaggaagttctgagcacccgttgatctccatgtgtggaatttgcccctctgttgtttcttttagctaataatactttggaggaatttgtgtatgcccttccgttggtgactgttaactcagcaggtaaaacttgatgtagagaggctgttgctaggtttgtatggaagcccctacttctgctgaattacagacaaacctgatcttttaccagaatttacagtatgaaattattcacagacgcacgcgcgtgtgcgcgcgcgcacacacacacacacacacacacacacacacacgcacctctcatcatgatcccagcagatcctcttctctctccccaaccctgtggagtctgcatcttttgctggagtgagtgacacatccggttctgggaggctgcgacctttccaacaccccaagcaaacgccagaggctctgaagacgcctccagaggtcctgagaatgagtgtagggcagggcttgcctggctggtcaggggataaggatggctaaagtgggtggcagatttttactttatataaggagttgtccttaagtctggaaatggaaagtgtaggtaattacttaggcccaagagaaagagtgaagggtagagtggaaataaggtgtctgggtttctattcatggttctcaaaaggaatagtttgtatattttaaaagttgagtttgacctttatcttgaaatggaatttttgtttttattaagtattgcctatctctttcaagagagtgacatattatgcccgatatgatttttctgggcctttcagtggtcaagttaggctgggatagaataaatacctgcacctgctttcctctaaattcaagtgctcacaagagttctgctctgatcaattcaaaatggcgaccgaccacatgaaaacctctatatattcccttaagattccctcaagatatttaaaaagtgttacagacttggctgagcgtggtggctcacccctgtaatcctagcactttgggaggccgaggcaggtggatcacctgaggtcgggagttggagaccagcctgaccaacatgaagaaacccggtctctactaaaaatacaaaaattagctgggcgtgggggcacgtggctgtaatcccagctactcgggaggctgaggcaggagaatcacttgaacccgggaggcggaggttgccgtaagccgagatcaagccatttcattccagcctgggcaataagagtgaaactccatctcaaaaaaaaaaaaaaaaaaaaaaagtgttatagactttatgtagaaacaatttaaatgtagagaagaataagaagactatatgtcactcctgttaccacttagaggtagttattttaaagggtatatgattttccagtctgtttccatgtgtatatgttcttaagtcaatttcagatgcccatttcccgcaattcttttttaggggagggaggagtggcctgtgcttgtttctcgagttctgataagataggagctttgtgaagaactcatagtgcagtgagctcttctacatgttcccttgccccaaacattccacctccttgctgttccttgaacaggctgtgctttctcagatttccatgctgttctttatgcgtacactgtctttttctccccgttttcactctttatctcagcagctctaaactttcatggcggtatttccaagaagaaaattttgattaccccttattaaacatatatttgttaaactacatgctccatttagtgtgtataatctaaaacacaaactgaaacacacattgtaagtagaaatgaaaattctattttcttctttcatctcaatggattatattgtacactctactttggaaaccagtgatcttatttcctatgccttcaagattcagctcagggatcctctcctccctgaaacctttgcgtgcttccgaatccatgatcttatgcattgtgtgtgaatttcttttatgacatctctcagtgacctccactagattgcaaactcctgtgaaatgcaaagaccatctctatctagcacctagtagagtacctgacatacaagaggtactcctatgtacatttatttgttgaacatgtgaatagaccaaaatgattataatacagaatacagaggtatgggagcatagaggaggggactgtattttggaggataagtagaatataaccaggaggacaatagggaaagggcatcccaggaaagagaataatagatacacaatcctaggggtgtaaaagatgaagatattaggaataattggatgtttaggtatgtgctgagaagtcacactgaaaataaatgtgaaagaccttgaatggcatgccatgagttttgggtttattcaaaaatgactgcaactcgtagactgggagggacgtgatgaatctcacagttttggaagagtcactgtggttatggaggtgacagtgggctgatgggttagaggccatggacttagtcttggtgagagattctgaggcccttactgcagtcatgcctaggtagtcaggagccgtggaggaggtagattttaggagactgactttctgtctgagagaaaggagttggacataagcattttccagcaacattagtgtccagagtaggagataatgagtttgatttcagacgtattcattttgaggtactcatgggagccctaggaagacttttccaccaccatctgaaatgtgaagtctccagatttctccttctattgcctttgaccacttcttgggggtattgtgctgtcatgattttggaaggacagatggctgggagtgcctttgtttgagtaaatcatctggtatagttctggcttatttttatttttttgagacagagtctcactgtgtcactcaggctggaatgcagtggcacgatctcagctccactgcaacctccacctctcggtttcaagcaattctcgtgcttcagcccctggactaactgagattacaggcacgcaccaccacacctggctaatttttttttgtatttttagtagaggcagggtttatccatgttggccaggctggtcttgaactcctggcctcaagcgatccaccttcctcagcctcccaaagtgctgggattacagacgtgagccaacgtgcccagcccggttctgttctgttttgttttgccgtattccccaaacatcatgtcaagacttactcatagagaatgctaatatttgtatgacactatggtgaacccagaggctgctgggcaccagaggtaaccagccaggggcagagggaatttatgaattcctgttgtgttctgcatgcaacgtagtgtttcatcatactgcccaacttcactgtttgctgttctttgttttttcttttatatgtatcttattttccaaacaagattatgtcatgccttgcatgggctggtattatgtcgtgcttttgtgtttgcctcagcatatcaatatacagtacgaggtacaaagtaggtgtttattaaatacttgatgggtgataaccatccaacttgttaaaacaagtaaaaaaagacaaacggtcgggcacggtggctcatgcctgtaatcccggcactttgggaggccaaggcaggcggatcacttgaggtcaggagttcaagaccagcctgaccaacatggtaaaaccccatctctactaaatacaaaaaattagccggacctggtggtgtgcgcctgtagtctcagctgttcgggaagctgaggcaggagaatcacttgaacccaggaggcggaggttgcagtgagccaagatctcaccactgcactccagcctgggtgacagagtaagactctgtctcaaaagacaacaacagtaaaaacaaccaaatatactcctccaaatgcttactcctcctcagtgctttttttcttattaataacataattccttttttttttcagaaagcataaaggatgttattggcagaaagataaaaatttcagtgaagaagaaagtaaagttggaagttaagggagacaaagttgaaaacaaagtgctggtaagtattgctgtttatttttattaaatgtttggaaatgaaagtgtgttttcattgtttagattgcttaattttcatgcagcattacttctgtgttttatatattgttcaaaagttctgatgaccattttgtcttaggttaattggaatatttctttgtcaaaagttaaaaatagggtaatttgaattttaaagatcaaaggcttttagattgtatttctcaaagttgtaattgctgcctatatttaggtaatctcttagagcctgttttcataatattcagagtttgatgttaaatggaacttttttatttggtgtgtggtgggtgatcctatgactttattcataaagtcttatggaggagtttaaaaagttcatctcatgttggtttaattacttaattagattttctcagatgttatatatgagtccatctaaggggtgatgagctaacaaaacattgtcattttacttagggtgttggtgctttggagggaaactcctgctgaaggcagtatctgctagtgttgcgactggacttggggttccttctagtttgtgagaggagatgctgagggattgggccctgctgcagaaaacttcttagagaggtgtcagtgacagagttgtacctttagagaggtgaaaacattttgtgatattttaatggtttctaggttgagattgtggcaaatctaaatttaagcttaggtggaaagaatattttgatggagagaatactgtttaactttttatcatggatattttcaaacatatgcaaaaagcagataatagtatatcgaactctgtgtacctgtccttcccagcttcaaccattttcagcattgtactaatattaaatatcttccccatggtgtttgtttgttgttgctgttttttttttcctctggagaattttaaaacaaatcccaggtatgttattgaaagagtataatttcttaattttttaaagtctttttgagacaggatttcagtctgttgcccaggctggagtgcaatggtgtgatcttggctcattgtagcctcaacctcccaggctcaagcgatcctcccacctcagcctcctgagtagctgggactacaggtgtgagccatcatgcccagctaattttgtttattttttgtagagacagggtctccctgtattcccgaggctggtctcaaactcctggactcaagcgatctgcctgcctcggcctcccgaagtgctgggattacaggcatgagccactgtgcgtggcctgaaaaagaatatttttaatattccattgcttcagttaaagttgccaaagaatttgaagtgtctttctgatcacatctgtcttgagaatcttctaaaatatctaactccaggatatgtgattgtcttttcttgttagtaaggattatgcttgtgatggatgacttctgtttctatgttgtctatatatacaagtcgggatggtaaaggcattgaatgggaaaacttgaatggcttttgcccagcaacaaaatgtgcttatgtaaactgcatgattaagttatcagtagaagaaatgattggtgccattgttctgttgtatttaacttcagtaaaggtgagatttccttaagttatgtttttcttgatgttgttcaacaatgattgtgctattttttggaagtggtagtgtagagaagaaatattgtttctgtcatttgcttttttacaaatttaaagtaagtttttaataatgtagtaactttataagatgaatcaacttctctacaacttaaatataaggtagtggttgctatgacagtctaaaaaattggggcttggtattatttgatatggaaattattattatgctaagaacaaacccacatcatgagtgcaatttaccatgttaaaatttcaaagacaaatttaaatgtccagtataaaattagcactatttaaacatgcttatgattagtacttaattgtaagtttttttggcctcatctaacagctggaattgattaaagttgtaaccaaattaaaaatgtatttgagtttaagcatttatctccccaaatatggaatctaagcagtttctagaagcatggccggaactcattgtggctgttacttacttgcatgggcaggaattattaatagaaatactcaaggtctggctttctttgacaggcttcaagttagaacaagaagatgtatgaagtaacctcaaagttgtggatttctgagtttctgagtttagagaaatttaattgcttaatccattgttagcctactaaaatggttcataaatgagttggctgaatatctacagtacgctttttgagttgtgcttttgttacttcccccattgcccaccattcactccttttcttcttataaaagtaggagtgtgctgtattttacgtggttctttcttcttacacttgagactttatactatttctagcttatcttttgtagagggcttatcttcatcttcctataatcataatagctaatatttctaaaaatctgtttttgaagtctagtcaagtgaagcaatgggattggaggaagagcaaagaaatctataatgagttgtgatcaattagttgtaaacacccctacactcagaccagccatgatcataatagctaatatttattaaacactggccaagtgccagagactgtgctgagtacttaattacgcattgccttgttatatccccactacaacgctatgaggtaggcactttttacatctccattttacagatgaggaaattgagatttggcgaggccaaagtaaattgcttcacatcatttggctagttaataacagctgggattcgaacccagctctgcctcactcagagcctatctgctttgcctttgtggtcaaaaagaaggcagctgttactttgttccatggttgctgacttcaaacaatgataggggagatttggactttagagtctctctgtctttgattgattgatttatacactagttttatatttattgagaacctgctgtgtcccaggcacatggtgtatacaaaatagtcctagtctttgacttcatgggactcgaagcttacagtctagttggggaggtaaacatgtagccaggcagtggtttcagatgtgctatgagtggatgaatcggggcttcaggagcacggagaggaactcccaactcaggcctgagaatcagggaagacttcagaaggaagataagcttaagctggcgttcactggatgagtaggagttagccaagcgaagagagtggagacatgttctggacaaagggaacagaatacgtctggaagcctgagagagcttatgttagagaaacatactaaggtacagctggggtaaggcatatacagggtagagaatgggcaggtgtaaagcctgagtcctgtccttgcagttgggatgtcaggtgaaagttaggactggttaaacaggtctcttcttgccacctgtgtataatgaaatattaaggctcagtggttaagggcccagattttgggttcacactgttgctcagtaactttgtgacaatgttaagaatcaggttttttttttttttttttccgtatggaaaaaatcttatgttataacagtatctattggtatgtggttgctttgcatatcaagtggaatttatttaaatactgcatagcacagtggctgcatgcagcaaacacccaaaaaatgataaggcaagaggaacaaaggggtcctgcattctgttttctccgtggtgcggaaagtgccattccttctgaagcccaagtatctgctgcctccattgacaggttgaggtcagttcaccataaggccaagagggtttattcacagtttgtggcaccttattagcaggatagagggcaacaagctggatctaaaattcctaaggtatgctctcctcaagtgaaatcagaaatgctagatgttctggggcaggagtgttctattctcaaataaatttggcagagtgttaaagataaatcagtttctttactgcatgagttttcagagccattaatacagccctgtgcattgtaaatttctaagaattggataaagtatgctgttttttccaaacttatttagccagagaccctaatgaccatgggctaagaaggaacaggccagagatgatgcctcttgggacagttaagaaaagatagaacaggcttgaataggctctccatcattaggagtgttctcctgaggaatggtcctttagccatgttttttaaaatctacattgtgagtagttccactctgggctacgttggcttgacatgtcatatgttgttgaaatacctttctctgttgtctttaggggatgtcattagaaagtgattctatgtttatttgactctaattcccttctcccatttgctaaatgaatcttcacccaatttttatagtacttggagtgtaaaaaatgtattttaacttatgtattttttaaaattaaactttttcatttttaaataattgtagatttgtctgcagttatatcagataattcagagaggttatcttatgccctttatttagttttccctttttgcaaaattacagtataatgtcacaaccaggatactgacattgattgacactgtaaaatgcagatttccatcaccacaaggacccctaacattgcctttttatagccatacctagcattccccacttctctgatccctggtagccactaatctgttctccatttctataaatttgtcattttaagaacattatataaatgtactcatacagtatcccctttttgggattggttgttcttgctcagcataattccctggaccttcatccaagttgtatcaatttagctaaggagtacttcatggtatggatgtaccacgtttggtttagccattggctagttgatggacatctgagttgttttcagtttttgtctattaggaataaaactggtgtaaacatttgtgtacagatttttgagtgaacatacttttccttgctctgtgataaatgccaaggagtgcaattgctggtttgcatgggaattgcgtgtttacttttataagaaactggcaaactgtttcccagagtggctgtaccattatatggttttaccagcaatgtatgagtggtctagtttctctaaatccttggcagcatttgtcattgtctggacttcttttttttctgagacagggtctcactttatcacccaagctggagcacagtgacatgaacacagctccctgcagcctcaatctcccaggcttaagtgatcctcccacctcagcctcccaagtagctgggactacaggcgtgtgccaccacacccggctaatttttgtactttttgtagagatgggtttcaccacgttgtccagctgcttcttgaactcctgggttcaagcaagctttctgccttggcctcccaaagtgctgggattctttttttttttttttttttttttgagaactaagttgaaggaaaaacaatgtctggcaggagcaagagccctgatgacctcttgtttcccacagttctgctgttgcctgtttgggggagaggaatgtggcactcctctctccaggatggtggccttaaagtgtatgaaaagtcattcctagtctccactttggtttcttctgtttgatttggaatttgggttacatcatctttgccaaccccttcttcttccacaccctttgtaaaatgggtcagaagcaggacttcttttcttcttaaactgagcaagtaggggaagtggcatacaaatcgaactattctgttttgtttacctattctctttaaaactgcccatctgttgtccatttgttttcttttgaaaagttaatctgaaatccacccccccggcccctgaacgacagggtctcactgtgttgcacaagctggagtgcagtggcactatcacaatcacgagccttgctcaagtgattgcctcttgcaatcacttgaactgagccttgcccagttcagcctcttgagtagctgggactacaggcacatgccaccatgcctgcctaattaaatttttttattaattaattttttttagagacagtctcattattttgcccaggctggtcttgaacttctggactcaagcgattctcccacgtcggcctcccaaagtgctgggattataggcatgagccaatgcaccaggcctgaaatccctttaacatatttttttccccttggctatttatttatggcttttgaacatcttaattagactggattggagtaactataagttaacttaaaaaaatgtcgaaaggcataggggtattattttgggtaacgtatccctaaaatattttggtggcagtgctgtatttcattaacataaagtataaactctattccacctgctttttttttaagaggacatgaaaaaagaaatatctctcatatagaagttttggaagtatttgacccacttagtcacaaattatcttcaactcagatattctgcaatatggaaactattgttcttttgcagtaggccatactcattttgcatgaccagtctgtttaatgcttttctagtttgccagtctctagtacctaacttgattcagcagtatgacctgtgccatagtcacttttcagacggatattcatgctgaaatttgtgttcagcttcttaaggcaacatcagccttggccagtggttttcagacttagtgcctgtttaaaacaattttttttttcatggaacccataatgtagtaatgttttgggattgtattttgggagttcatagttaaacctataatagtgtaaacctaatcactgatttcagtgaggctgttttgatgaacacaaattagaaatagtaggggagatttggtttttgctctggttgcatggaatagagagactcccgattcaccagttaagcagtacacatatcacagtttttaaaataactagtcttgcaatctcaggatgctttccaagtaaatagagacggtaggggaagctttattctgagatctgcacaaaagtgggttatcctggcagcacagtgtacctcgtagttgttctctgatgtgtaaaacttggtgtaacacatctgagtgtgtgtgttggtgttttattccagtagttaaaatagacataagacaaattcatataaaatgtttgtagactgcaatgtcttctgaagaatgctgtcagaaaatcattattctaggtccccaggtttacatccctctgtgagacgctcttgtaccagttgttgggtaatttgaacagttgcctttgtggtaccattaggagtctcaacttttaaggatcacttacagttctgtgcataggtgattttcaaagcacctgggtgaagttacatggctctagaaaattgagctttagaaaacagcaataacactgaaacaatctttgggagtgagttatcagagaacgtgcattgttgccaaggatgctggcataaattctgggaacctcaaaataaaagaatccatatttaagcacttcacaatttacctgaaccgaacactggagtcagttcctacctgtttccactaatctctgggtaggggctgggggcaggctctggccctgggtgtgcgttttcaggaggcagttctggctgacttgaacttgttacctgagctgcatttacattctactctctcctcatctgcaactgccccagtttcttctgtagttaggataggcgagtcaaatgaccttaggcaaagaagctgttgaacatacaccaggctcggtgtaacttttcattgttctaaaaagatactctttttccagtctctgggatttagccacccttggaccagggcaattaggtatataccctggagaggggaggaaggtaagtgatgggggggagtaggagagtagcatgaaagggacattgtggacattaagaagccaggaaatctaatcaaaatatggaatgaatagggagaactcttctttttttcatagttataaaatagttacagagaaaaataaagactttagtaaaaggttactgtaaaaactttaggtttcatttcattggaaacgctgttaatatctttgttaaaatagatgaaaaatgtagctacaatctgaaggataaaagatttttgttccctctcttatcccctctgctttctaaaatgctttttttttttaatagaatataagaatttggattggtatatatggggtatatcattgtctaaatctttacgttactgtgttttatttatttttttccctcttgatagaccactttccccagctctttgaggaaagaggggcaaagaggggaaagaaggatgcttggtgtgtgtgtgtgtgtgtgtgtgtgtgtgtgtgtgtgtgttttgtagcagtagtagtagtggcagtaggtaaaagagtgttcactgggttattttcctcatcttgtttcttaggagaaggtttttcttatttatttttgagacagtgtcttgctctgtcatccaagctggagtgcagtggttcaaacacagctcaccgcagcctcgatatcctgggctcaagagatcctcctgtgtcagcctctcgggagctgggactacaatcacatgccaccatgccgaatttttttttttcctagagatggggtctcactttgttgcctaggccagtcttaaactcctgggctcaagcagttcttccaccttagcctccccaagtagtggggttacatatgcgagctggtcttcccttcccttcctctcctttcccttcctttcccccttcccttccctcttcccttcccccttcctcttcccttttgacagggcctcactttgtcaggctgatgtgcagtggcatgatctcaactcattgcaacctgtgccacccaggctcaagtgatcctcccacctcagcctcccaagtggctaagactacaggcatgggctgccccacctggctaatttctgtattttttgtagagatggggtttcaccatgttgcccaggctggtcttgaactcctgagctcaagtcatccacctgccttggcctcccaaagtgctggaattatgggtgtgaaccactgtgcccaacccaaggtttttctttttttgaaagcattatcacttggtgaacattggccagcaagtgtcttggtttctttagatatgtgtagatgcacaggacgtcctcttagaggtaggaagcaggcatgtacacatgtcctgagctgtacttacagcctcaccagcctttggcaagggtttgagacagatgtgcttagttcctgctaagaaggcaaatgtgtctatttctgctgatccctgggccctggagtctcaggagacatttatggacattgactgggattagtaggtatatccaccagacaggatctggtgtagacagattgactcaaacagactctggggaaatttattgagaccttgccctcattgattgctgcctagaggatcttggggctggaggactcttggcagccatctaaccatgtgtcctaacctaggagaagtttcttctgtagcacctccgacagctaggtatctactttttgcttcactattcccagtgatgagaaaagcaaaagcccccaaaagccctgtcttcttttgaactgggatctgcttctcactctccatttcttcttgcatagtctactggaatatcacagaacaatttttctccctcctatccatgagtgcagttcaagtatttgaagaaggttatcatacttttctttggtcttatagtcctcaggctaaataggctcacatcctggagtctcagtccttggaagatgttgttttcagacttatcactattctgatcaccttgctttggaatcaccctactttgtccatgaaccttttaaacaactgttggtgtttggggatcacacatgcttggcgaacacccttgaactgaattaaacagactttctcagtctttaatgggctcctgtggattgtgccttttgaagagggtatggagcctgtggcatcacagcatctgtgttcctccaggcagggtggggaacatcaagctaagtgcaacctgcctggtgaagaatgctacctatgcattgcttggacaaaaggttttgttattgttgttttttaaattttggaagtatccctgatatttgcattactaaaacaataataaaacataggaaagaaaaagcgaacatcacctaatcctatcaatttagatataatcattggaaaaaaaatcagtatttttcatatttttctgtgctaacttacataaaatatatgatatattttaaaaaatggaatcatgaatactattttgtggtatacttttaaaatttaatttttgaggtcaaagctttctagggcagtagaaagcatgatactccatttacccactgtagaggagtactgtagtttatctaaccatgtcccttattgtcagataatttaggttatttccaatattttgccttataactgtccatgtcctcatatttatttctcttggataaattcgtggaagtggaatcattgccatcattgcctaataggcattttgaaggatgctttttttttcacctgattgttatttaggaagtctcaatagagaataaatcctccaccttgtcaatttcattgtcttaaacaagagtctacttggcagaatggcttgttctctttgcttggatccgtgtatttcttagaccagtgctccttggaccctagctcctgaggcaaacctttttcatgcaatttagggttctttcagatctccctgtgtggaagtgttgtcttctactacagtatgtttgctggaatgagaaagtcctgtgacttcacttgtggtttcagagtcacagcttccaagtatcattgtcttggcagaatcagccatagctttttccttggctgaatcctaggtaggtgtgagcctgtattatatgattcagatctttgcccttgtcgtgggactttcttaccttgggcctttgaatgctctcataaatggtagttgagtagattcacaaatgataaggcacatggcactttcattagatgaaatgtaattaacaagaaccataagctaatatgcatgtagaactagtccaatgtcttagaagataatttagtatcataatgaaaggagacattgtttttcttcccagacagttctgaaggcagttgattttatctgtatagccaacaacaatttcttaagtctcatggtccttccccactccactagaagctgcagagtagtccttctcattctcatttactgtcccaatttcctgaccctttcactatctccctgtcctgggagaggggtgtccaggtgatgaggacctatggcctcttttctgccatgaggagctccttgtggagccctgtcctccttgctgaggccctcaagagtgcagcctgcttttctgtgtcctttcaaagctaccattgtgtactatgttgcttgtggctgtcttttctttcaagcctggcagataggatgatattcctcagggacctccttatttgctgtctcagaaaacaagcacagaggactttcttagttaccctgtagaacagacaaagaaaatcaagacgcccagatgcggggaagtgactgagaaccttgcaaggttcttttaaggcaatctctctgctctttgatgcctaaccttatggggcacagccacactcacttgcagaatctgagctaaggtgtggccaggagaagtccaggccagtgaatgttatcagtggtcatttcttggtttcctgaatccatctgtcttaaatcagctgtcactagcaaccaaaaaaagatcttatcatctgtcataggcatgacctgaagagaagcagctgtgctttgttttttgctaagtcttgggcagttcagtttggcacttagagtattccagctccttttcttataagaatatctatctttatctatctatctatctatctatctatctatctatctatctttaactaactaactaactaactaactaactaaagcattttaaaacgtggcatctcgctttgttgctcaggctggtctccaactgttggactcaagcactcctcctatcttggcctcctgagtgtctgagactacaggcacaggccaccatgcccagcctcagctccttttcttttaaatctcttggtccaatttatattctttgccagcatccttgggacagcacaaatgttgaagtttggggaaacattttgtacaactttgttcactgaatcacagtcactgcttgtgctgttgataatcaaaactaggctgcacagagtgacgtagtcacatatttggcttgggtgtacagatgtttcccttcaagcatcttggatgtcttgctccttatcagaattttatctcccccaaattcattgtttgtgaattaactgtaaagttctgggagcgatttccttttcaacagtttgcctttctagaaaaaaacttttggagtttaaatagcacttaaccctctatcattttactctctctgaagtggtctctgtggagaacatgttgggtcttctctgttcaatatctctctctctctttcttggcaaagcctggatgcgagaagttggtccaatctttcctgtccagggttgcttgttaatacagcatctggagcaaaggaaaggctattagcaccttgtcacttggagtttcttaagcattgttccatttatgtgttctttctgcagagatttaatgaaagtggcatctgtctttacacctgacatatgcaggttgtccgcagaactgaacaagtggtgtcagcaacactgtatatgcaggaaggcttcatgctcacgtcgttttttctgtgttctctgggagtagccaacttctttattcatcagagtagggctttacattttaatattctagagagagatgcttgtggtgatatatttagccttaaattcaggaatggcttcttttttcaatgtctttacattttacgcctcccattttctgtgttaataggtaagtgtgcctacatttaaattctgaaatggcatttgctaacatttaatcttggccaagttatttaacttctctgtgccttactttcttcatctgtaaaatgggtgtaataacaaaaaactacattgtagctttgttttgaaaattaagtgggatattacatataaaatatttcataatagtgcctggcacatagtaagtcatgagtaagtcttagctgttattgttaggggtagtgtcgtgataatgctaaatgctttgattaaaagaatctaattgtatatttgagtcacagattattcagatatattttatataaatatttcaaaagaaatacctcaactttgcatgtcttcctggccctgtacaaggtacatgttgttatgttttctctgctcagagctattttaagccagtacagactgtctacagaaatgggtttagaatgttttttcactctgctgttcttaaagagggtacactgcttttgagaaatcttttttaaagaaagggttcaagttcagtgttgagaaatttgtctctgaggacaacgctgtgcatttccaatacgtatctgtttttcatcttgctttcattgcagatctgcatgtatttagatatatgctcaagtccctctttcacttcccagttacttagagtgaaaaaaagaaaacatcagtagttggtgcctgttcattcacttagggctttcttggtcctttcagggcactgctgtctgttgctgttgcctcactcagtttgcttcctcttggatttcagttatgattgcttttttttttttttttgagacggagttttgctcttgttgcctgggctggagtgcaatggcgcgatctcggctcaccgcaacctccgcctcctgggttcaagcgattctcctgcttcaaattcccgagtagctagtattacaggtgtgtgccaccatgcccagcttattttgtatttttagtggagacagggtttctccatgtttcagggtggtctcgaactcctgacctcaggtgatctgcccgcctcagcctcccaaagtgctgggattacaggtgtgagccactgcgcttggccgattgcttttattttatagccggtccttgatcgggggtgcagggtgcattatctgagttcattggtgtgtgtggctctgtgtctccatagtcagaaggattcctgggcatgctggattcttttttttttttttttttgggaaagagtctcactctgttgtccaggctggagtgcagtggtgcaatcttagctcactgcaacttctgcctcccgggctcaagggattctcctgcctcagcctcctgaatagctgggattacaggtgcctgccaccatacccagctaattttttgtatttttagtagagacggggttttaccatgttggccaggctggtctcaaagtcctgacctcaggtgatctgcccgcctcggcctcccaaagtgctgggattacaggcctaagtcacagcacccggcccatgctgggttcttaatctccaggctgtgctggactctcaccttctaaccaaccttgaggtatttcagtcccagcactattgacattttggtcaaaacaattgttgtgggggctgtcctgtgcatgataggatgtttaccagcatctgtggcccctccccactagatcctggcaccatcacccactcttcccacagttgggataattaaaaatgtctccagaggctgggcacggtggctcatgcctgtaattccagcactttgggaggccgaggcgagcggatcacctgaggtcaggagtttttgagaccagcctggccaacatggcgaaaacccatctctactaaaaatagaaaaattagctgggtgtggtggcgggtgcctgtaatcctagctacttgggaggctgaggcatgagaattgcttgaaactgggaggtagaggttgcagtgagctgagattgtgccactgcactccagcctggggcgacagagtgagactccacctcaaaaaaaaaaaaaaaaaagtttccaaacattgtcacatgtcctttggattgtagaattggcccccccactgagaatcattggtttagatcagtgggtttcaaatgtcagagagcaggtgtgtattttatcatatttagcttctagagttatgtctaagtctcgaaatttacagttttatgatatagccattgttgatttatctaaaagtctatatgcatttaaaatgcttatttttgaaatatttagataaccaaatctgtatgtaacaaaaataacaaatcccaccacatagcaatttgtcttgttttaagatacctaaaagatcagaccagtggttctcaatatttggtcctgagaaacagcaacattaacatcacctgataacttatcaaaaatgcaaaagcaggccaagcgtggtggctcatgcctgtaatcccagcagtttggaaggccaaggagggaggatcacttgaggccaggagttcgagaccagcctggccaacatggcaaactcctgtctctgctaaaatatggaggcacacacttgtaatcccagctatttgggaggctaaggcatgagagtcacttgaactcgggaggtagaggttgcagtgggctgagatcgtgctactgcactccagcctgggtgacagagtgaaacttttcctcaaaaccaaacaaaacaaaaaagcaaaatcaaagcataggagacctatctagacctactaaatcagaaactctggcagtggagccctgcgatctgttttaacaagcccttcaggtcattttgatgcacactgaagtttgagaaacacttggttagttacttaggtaactaggtaactaagtatattactaagttacttagataattaagttagctccagttagagacccatagaataaaccttattgagaaataagtataacctgctatatacagaactttgaaatctgcttaggaaaatgacttttaccagacagatcatgctaagtgtgtgctggtcatattggcttccctgcaagagcctgccatgtccacagctttctttacaggatttccttttgttagtatccccaagcttggtgcatgcaacttcacagtttggtggccatagctgcttgaactaggtatgcttatgcctgactcccaaggtacgcatcgataggctaaccagcagcatgtattgggaagagattgatcctcttgggagtttgagacagagacaaagaaatgggaagacagcaaaaggcatgaggaataaaagcccttagttaagcagaaaccatgaggagatgaagaggctcttaatgagccagtggtaacaagaacaataggaggtggaattgggtgacagagcacaggatggctgctttggaaagggtgacttttagaatcgaagttgagtcaatgtacttaaactaatatgtgcacagtatgttttagttttctagaaggcccaactgggcagctgctcataggggttcctgttttgtacttccctattttgcttgcttctctagggagcctcatgttaaatcatcattaactgaggcaatttcataatatgtctattccttgttgcctggatgaacccattgaatatataactatattagaagaccaagtggtttcagatgggttgcaggtgggtttcatggcatgctgcttcgttgaagcagtgactctcagcctggctgtgcctcagaaacacctgggtagcctctgcctctttatttaaaaactttctgtatgtgagattctcacgggcagttgaagtctgtattacaggagagaatgggagatagaagctgttactttcagcttgttgatgggttgactttcccaaaataaagctgcatagggcgtacttcagaaaacttcaggccttacttcattcatttccttagatcagaccaaataagccagctcaccatatttattccagagatgtgttgctttgcctccaataacattttccttaacatttcctgttagagcctctgggtactatttcttttgagggagatgctaagagtttgaaaagccttaaaaaaatcattaaaaatacatggaatagagtgttgaaatcagcattgtaaatcattttctgaaaattcagtaagtctaaagaagtttttctgttttgaatgatcggcactgaccctatccagttggtcagtgcctcccttatcctgctagtcacctcttcctcctgtctttcctattagaaccaaggaaagtatacaagtacctccatgcagcaaatccactggattctctgacacaaatcaatccagaggggaatgagtgaagatacagaatactttacattgttgctcagatggttggctgagttccattagggtaatatattctgggaatgtggtccagtgcttggtttcaaggccagcttaaaagatttggggcctgaccaagagcataatcaggattctcttattctccaacctagtatccttgaggagattgtaaactactcgagagtccaggactgtttacctattgtacttttatgttaagtacctctacccctaaaagcaatctctttgtgatatacacagaatatttgcccagtaagtcactcagccttgagtacaaattttaagcccgagctgctttcctcaggggcccagccagtctctttactcagcagccttatctgacatagcccatctttaatttagctttgttcacgatgcagggatcaataacagcgatgctgggagggagggagaatggccaactgcaaacagccgcccatctcagcacttgaactgaactctactttggtcaggatgattagtgcagtctggagagccattaagtgctctctgactagttcatctgagttctgcttcccactacactcaatgactaacccaggagattacagatgcttgaggagaaagagtgtcgtgtctccctgtgtggtactgagtagtgtttgtaccactgtctcaggaatgtgaattacagtgcaaatgagctgcctctcttgtttccttttctgcacgtcattttagagagagtgatttattttctgtttgcgaaggcttggtctcatcatttagatgagagagaaattgcatgtactttcaacttttggctggttataggcatctcctttttttttttttccattgtgagagttgtttatgctgattgaatgaaaagattcgttttcttaggctttcagtgatgacactccatttcttccatgtgataaaattataatgcgtgattttattttattattttttaaaagtaaaactgtcacctaacatttcctctacagttgggtaaaaaactaagaaaagcatctcatttcctattggttccatgagcaaccctttttagcatacagatcagaagccttgtgtggctctaagcctatttcctcaattggggaagtaacagactctgttcccaagatatgaataggtgtgctgggtgagaagtgctctgtgctcaaggactttgacccttcattttccaaacttaaacaagtttctccatttctctgttcttagaacctttggtattcatatacttaacatgtacatttcttgaagcgccaattatcatctcacaggacactggtgttccagggaacttggagaaaagctgacaagttattttagtgtgttatcttttacacaaagggactctgttttagaatttgccatatctgctttaacgctgtacaaattagccaactggagaaatatatgttaaataacgggtgaacaacacataatcacccaacctacttttaggaagattactaaaacattccatttaacaatcattcagcactatctgtttgtaaaggacacgtaagttttaaaggaagaagctggtgacttgggaatggactggaataaagtcagagaagtcctttgtccagggaacttcatcattgggtttgacttgagaagaacaaatcagataagattagtctcctcattataaatgtttaaggtaatttcagatcactctgctttaaaagtcttgtgaaatggggttgggaaagtttccttaaatcatttacacttgttgattgtgtgcagtttatattatgagcctgctgcccccacaggtgctgagctgtgctcacacatgggaggggacatcacagaaaagaagacgtagatttattacctatggttctgaactgggacaattgataaaaattacaggtgctgaggattggcttgaaacgcagaataatcttcctaacagagctgtccactcatagaatgtgcttattgtgagggtggggatagaggatggggaattgaattccttgcagctgggtaagttcaagtatagattgcttgccctcttaactaggatgtcctatagaacagccgtccccaacctttttggtaccagggagtagttttgtggaagacaatttttccacagaccgagtgggtagggggatggttttgggataaactgttccacctcagatcatcaggcattagattctcataaggagtgtgcagcctgcttccctcgcatgtgcagttcacagtagggttcacgctcctatgagaatcaaatgccttggctgatctgacaggaggcagaactcaggtggtaatgtttggtcacctgccgctcacctcctgctgtgcggtctggttcctaacaggccacagactggtactggtccacagcccaggggttggggacacctgctatagaacattcaagtaggaaaatacttcctttggtctaagattctgaaatttacaatgttccctgctcatatatcaaatgatgtattagctagagcttattgaatgtcacagttttactgtcaagaacttaaaacttctattatgaggcagagcatttggtaaggatagttgagtccctcagtgactgtttggattggttctatgtcctaggattgagtacatgatatcattttgatgaggttaaaatccaattaggaggtctgtccctttggctgctggctgggtttgttactttttagttccagtagagatatgtgaagcttttctgaacatgtttagcaaggtttgattttggcatttctgaatataactgtgagaagaattatcttcctgctgtcctggtggcagaagacattggactttgtttgcttgtctctttgggggcagatacacgggcatttaaagagccattctaattttaggaacttgagaatcaggagtcctgagggttagtgctaatactttaaaaggttcttaggtctgcaattttagttaatagtgtggggctgaaaaagcctttttccaggaatattgtgagagtaagtgggaagtagagcttttagaattttaggagaaaagggcatggctatttcagttaataatacatgaagagttttctcctttcagagtcctcctttctttgggtttcaaaaggtaagacaatccacgggttttttagtttgtctttcaggtgaattgtaaagttttcctgtaaatactgtcattgcactgacatggatattgctgagcagataaaacaaatagcaagttgaggaggcagttaattcacactcttccttctctaatatggtctgcggctctaagaattgttgtctcatccatggcttttagacccttaaattttagtgagtttcatcacacggaaactattgataatttcttcttctgaagttttttgtaagtggtccctgctagctaatggtgcacaaaatgaagcaatacaacatttctcttatggggactgggagagaactgacatcctttataaatatgtagctgatatataggttaccagcctaagggctgcctggtggggaaagtgaggcctgtgcctgtctctaccactgaagacatgttcatcaagccaatatatgcctcagacattaaaaatatcctttttttcattttaaaataattgccattaagtatacataacataaaatttaccattttaaccactattaataaatatatgttcagcggcatgaagtatattctcaatgttatgcaacgtatccatttccagaactttttcatcccaaacagaaactgtatcaaacactgagtcctcattccacctccccatcgcccctgacaatcactaatctactttctgtttccatagaaacagaaaatatccctatttggcatgttttatataaatcaattatataatacgtggccttttgtgtctggcttgtgtcatttagcagaagggtccccaaccccagggctgcggataggtactgttccatgaccttttaggaacctgggtcacacagcaggaggtgagcggcaggtaagtgagcattaccgcctgagttctacctcctgtcagatcagcggtggcattagattctcatagttacgagaaccctgttgtgaactgtgcattcaagagatgtaggctgtgtgctccatatgagaatctagttgatgctcgatgatctgaggtggaactttttcatcctgaaaccatctctcctcccccccacttttattgaaaagttgtcttccaggaaaccagtccttggtgccaacaaggttggggactgctgacttagcatatgttttcaagtttcctctatgttgtagcatgtgctagaagttcattcctttttaatgctgaataatattctgttgtatgcatataccaatttttaaaaaagtcattcatacttcaatggacctttgaattgtttttattttttggctactgtgaatactattgtgaacattactgtatggctgaacattgctgtatctgagttccttctttcagttcttttgagtatatacctaggagtggaattactggatcatatggcagttctgtgtttaaccacctgtttcctgcagtgccttggctttttttttttttttttttgacgagtctcattcttgtcgcctgggctggaatgcactggcacgatctcggctcactgcaacctctgcctccccagttcaagtgattctcctgcctcagcctctggagtagcttggcttacaggcgcctgccaccacgcctggctaatttttttgtatttttagtagagacaggttttcaccatgttggccaggctggtctcgaactcctgacctcaggtgatccgcctgccttggtctcccaaagtgctgggattacagctgtgagccaccgcgcccggtcgccctggtccttttgaaactgggcagtaatacctgtgcttgtaagagtgtttacaaatatttatcagccttttggaactttaaattagaaaagtgaacagactgtatttgttagcactttatatacttacattatgtcatggaacttattattcgtgtttcctgaatgtctgttgtttggatacctgtgtgtgtttcctactctattagaaattccttgacctgatctgcagttctccatctttgtccaccttttttgtaccttgtactcaataaatgtttgttgataaattgattagatgtgcaacatattctaaagtattatttttaaaaaagagatccatttacaagaagcacattggaattatttccaggttttgttttgctaaagttaagatctgacattatttgttaatttctcttggttatggaatgaaaagtattcccactgttaaaaataaatgttagatgtaggaagtaaacagagatgtatttagacattggggaaaggcttccactgggatctgaaatattgtgggaagagaatcgctattgttagagtagttctgtgccgtgttagtctttattttgtttagatactgcttttttgggggaccactctgcaggcatctaaatctgaagtgtaagcctcttttttgataaatgagggatagctaaaagatgggttattttggttattggttttgcttttaatagataaccagaatttttacctcttgggagagaatgttatctacttatttatagcaagcaagtgttgttacggcaggtggctgtggatgttggcattcaaatggcactgataagactttaaacaaggtagccatccagttatgcttaggctaaaaaatggctgtgtgcagattaggctacatatttcacatggatataaagttctacttttattaacaaacataacagtgcattgcttttgtgtttttagtttctcttagcccttatttcttgtctcttttggtggcttgctgttgtctatagctgagctgaaactttctgtgcaggaattaagcttaaaatatcagtttgtagtcagctgtggagtatgataaaactttgagcaacacagtttccaacaacacccctttgtcactgtgcctgagaaagctcttattaatagaatttcatgtgaggttccgtgagaaggactattgtacaaccattttttttttttttttttttttgagatggagtctccctttgtcacccagactggagtgcagtggcacgatctcggcttactgcaacctctgactcccagattcaagtgattctcctgcctcagcctcccgagtagcagggactacaggcgcgtgccaccacacctggttaattttttgtatttttcatagagatggggtttcaccttgttggccaggctggtctcgaactcctgaccttgtgatccacctgccttggcctcccaaagtgctgggattacaggcgtgagccactgttccggccatttttttttttaacagtgaaacagggaaacataatatttttcttactttaaaaaatccttcagtttataatcatcaggagtattggatatcttttaagtgaaggtggaagttcacttaataaaaaaggaagctcatttttccttctttgaatggttaacatgggagtaccccaaggtggaagctttacatgactgagaaagcccatccactcattgtcatagaatcaactattaattcaacaaatacttatggagcctttgccatgcctatgagccttgtgctagaagccagggataagtaaaataaattctgcacctgcctcctgcaacttagtccaatttccaggtctcccttagatttttctctgttttaatttttattttgaaaatggagacagggtctcactatgttgcccaggctggtcatgaactcctgggctcaagtgatcctcccgcctaggcctcttaaagtgctgagattacaggcatgagccatcacacctagcctctctcttaaaacaactttattaaagatgtaattcaggctgggtgtggtggctcacatctgtaatcccagcacttgaaaattacttgaagttgggaggtggaggttgcaatgagctcagatcatgccactgcactccagcttgggtaacagagcaagagtccctctcaaaaaaaaaaaaaaaaaaaaaagtaattcacataccatacatttcacctgtttaaagtgtacaattcagtggctattagtatattcacagagttgtgcatctattaccagaatcaattttgagcctttttttttttttaaccccaaaaagaaacctcttccctttaacacttatccccagtccacctatccttctcagcccttggcaacagctagtctactttctgtctctatggaccggcctagtctagatattttatataaatggaattatataatatgtggccttcatgtctggcttatgtcatttagcataatattttcaaagttcttccatgttgtagcatgggttagaacttcattcttcttttattatggttgaatgatattccactgtatgaatataccacatcttttttttttttttttttttggagacagaatcttgctctgttgcccaggctagaatgcaatggcacgatctcggctcactgcaagctccgtctcctgggttcaagggattctcctgtctcagcttctcgagtagttgggattacaggtgcacgccaccgcacccggctaatttttgtatttttagtagaggtggggcttcacctccttggccaggctggtcttaaactcctgacctcatgatccacccgcctctgcctcccaaagtgctgggattacaggagtgagccaccccgccgggccacatctttttttaatctattccttcactaatagattgtgggttgtttccaccttctcactatgtgagtaatgctcttatgagcgtgcatacaagtttttgtgtgggcatatgtgctcaagtctctgatcccctagatgtcttgcctatcctacagatccaggcctaccacaaaaaagtgtagaaggatcatataccatgagaacataaaggagggacatgtagacttaattagggagtcagggaaggctgcccctgaggccaccatatccaagctgcggcttgagagataggttgaatagaaaagtttttcaaactgcagctgatcacccattagtaggttgtgaattcagtttagtgaatcatggccagcattttttaggaggtgaactaaaatagaatagtagatgttagaggacattccatgtggtaagggtaagtattgttgcatgaaatttattttcagtagctatatgagcgcatctagcaaattgtgacgtaagaagtattctatattccgggttgcaatcagaaaaatatgaaagccactgctctagggattttttaaaaggagattatttattaatctggagctttaaatatggttccactagaagattggagagatacaggagagagaagaacctagaaagctgaagatcctttgaaagcttaaagttctgtgatttctacacttttaaaatgattcatttattcaacaaatattaaaatatttaccataggcctagattgcactaaattctgggagcatatgtaagatttgtgtgattttgttttttttgtgatctggcagagaagatgtacaagcaattaaaatgacttctataaaacatggtgggttgaggccgggtgcggtggccaaggtgggtggatcacctgaggtcaggaggttgagaccagcctggccaacatggtgaaattccatctctactaaaaatacaaaaaactggccgggtgtggtggtgggcgcctgtaataccagccactcgggaggctgaggccagagaattgcttgaacccaggaggcggaggttgcagtgagccaagatcgtgccactgcactccagcctgggtggcagagcaagactcttgtctcaaaacaaaacaaaacacaaaaaaaaccatgacgggttgaacgcataagtacctttagtttttccaaaatgtctctaaaatgaaataaaataaataatgaaataaaaaagacacaggcacctcaaaggtaggagaataggagaggagatcacagcagttaattgccatcaagatgtctttggaaggagtcactgactaagctgactggcttagtcactgactggctaagcagaggaagctggactctaaggatctcaaagaggatatcagtaagtgagccagttagctccataaaactccagaaaagttcaggatttggaagctctaggtcttgcataaggctgtaggatatatagagcgggggaaaaaaagagcattagatggagatctgtaaaagctgttaagccccagttcccacccccacccatcagatccaggtgcttgcccctcctctcaccctgaaggttctattgtgaaaagctgtaaatcattagccatccatccccccaacctgcaaaggtacacacctaatagatatgatacacacccatcagaaacaatggcacacttagtttagaagggaaaagtgggcatacccttgtgggtgtgtcatgatcttagagggccaggggataagtagtttgaaagtgatctccaaggtgattttgaagacacaattctcccatcccactctcgattactagccactgattttgtctcaggaggcattagccgcctgtcaaactgctgggacattatttttctcttagtcaataaaagtagtttgacatccatcacatatagcatttgctaggtcttgtgggaggcaacgattacaacaaaagggtaaaatattgtcctgtgctcatggaacttcaaatctagttattggtgattatatacattctaaattaaacactttcaaaataagacatcttgtcaaggtgaaggattaaaaacctttttgtcctatcctgtctatatttcctctcaccccctcccatctgggtgtgctcagataaactttagagcacccaaggtttatagaactcctgacagcgacctcaccaaaggctggacttcctatttgtcataaacttgttgaaattttgtttgactgctttagtacaggagtatattccccaagacaagagacctgagagcttttccctggttaagataccaaggatgatttccaaattttagacatccttccccttgttccaccaattttttttttcttctgggaaaatagccaggatgattgcaaaacataagcttgtaaaaaggcaaaactccatggatgtaagaaagtaaatttcttgagggccacacccatgataacgctggaattttcatttaattcctaactcattttttgttgtttttgtttttttaaactcaaatgtgtctctttaattgaggtcacttacttggttgggagattaatattctggtggggaaactttctttttagagtttatattgttttattccttcagtcactcagtattactaatggggtagcttttggaattttccatcccccccactttcagattacttttgtctttttttttttccctgagaaattagtgaaaacagtttgaagtcttgccacgttgtaaggagatttgcattatttaaggaaacagctggcagatctctataatgccccacctctgttctgccagtgcctaaaatttcctttgcatgactcagttaaaaaaaaaaaaaaaaaaaaaaaaaaccagaggaggggaacgagtggagagaagaaacccttgtttccctttctgagttgtaaaaagcttttatcaaggtttacatttagtcatgcttctgtcctctagtggatggcagcatgtgatgaactcagagaaactcttctcccaaattggccagtaagaactctgcaaaaactgtggatgagctgagcttacctcccataattttattttgaaaataaaaaattttccccacatagtaaacacagttatcttcacgagtgtgggaatgattaagaaaaaaaaaccaagcttagattttgcaagatgggtgacctgaagttttgcctagagggagagaagggtctcttcctcctttcactctgttcttgacagcgcctgcagcctgccctggaagaacgggtttcttcttcagatagaaaggaattgctggctcttctgccagccttgcccataggcctggctgtttccctgatgcaccttccctgctcaagttgctatccttatcattttatatttttgtgccagtatagatttggtcctataaggctgcagatacatagtgggcagaaagatggggggatgagagcactgagcctacaacctatttggagggactctgggcagcatgaggatgaggggcagggccagggccaccgctaactagttagcagtcaggcaaatagtcaaggacagagaccttgtatacattaatagtgccagcattttaaagatctttacccagggaaggctgtatatatacagttatttgggagaaaccagaaatggtgtatttaaaaaaattggatgccttaaacttccaaataaatgcgttttagagctcacttatctggaggttggcctataacattccctctctgatgtcttgcctttcaactgttttttttcacttctcagagtgggcatgagaaaccacaggatgtagaaacatggagtcagttttgctaaagcaggccctcatgagacttggaagggaagaggtgatgagtccaatgagagtttaaaattagatgttcagttattgattctatgttttctttgtagtcagtctttttctaattaaagtgggtaagacatttgaatatagggagataaatgtgctatgttaaaggatataaaaaaatcctggaggaagtctgaactctaaactctttggcaagtctttctgcctgaattttgaagcaaacttaaagattatatatgtggctgggcctagtggcttatgctgtggctcctgaccttgtgatccacccacccgcctcggcctccatcccagcactttgggaggccgaggcgggtggatcacgaggtcaggagcccaagaccatcctggccaacatggtgaaaccctgtctctactaaaaatacaaaaattagctgggtgtggtggcacgtgcctgtagtcccagctacttgggaggctgaggcaggagaattgcttgaacccgggaggcagaggttgcagtgagctgagatcacaccactgcactccagcctgggcgacagagcaagattctgtctcaaaaaaaaaaaaaattatatatatacacacccccacacacaatacatacatacacatatatacgtatacatacacatacatatatatgtatgtatacattcacacatgcacttatatattcacaatgatagttaagctagtttttgccctccttatcagtatgtcacatatccatgttgtttcctggtatatccagctgtttccttaatgagactgcctccatctttcagatatttaccaacagttgagtatatacttggctttattgcaggacctggctatgatacagatggatgtactctgtatagatgcccaaaataacttttatttttatgatggttagattttgcctgcatatttaaggttttgctgtatatactaatttgcttcagagtcagaaaaatagcagcaaactctgagaggggactgaaaaagtatcactgacttaggggttattatagtaggaatggaactacagagatagcctttgtcactgctttgtgagaaagcagtggagaaaaatacaatagctcctatttattaaaagcttcctatatgtcagtactatatgtattatctgttttaatcctcacagtaactgtgtgaagcgggtcctaattatcttccttttacagatgaagaaagtgaaggcagtctttaggtgtcctcccaaagttgcagaacatgagaggcagagtgtggatgaggctctatgtcttagattataaggacagtgctcatttccattgcattaaggaaaatatcctagtctatcctgtttaatcctaggaaccctgtggtgtggagaggttttctcttacataccaattctaagcctctgctttgatcctttgtcttggtaggcatcttctctcctcatttactgctcactgtgtgaggatgataggcactcctcagttataaacatcgcccttgcaaacatagcagcttggtcgctctctctgcggtctaccctaagggctccctaaatgcccacacatggcggcaggtgccagactggggcccgagcagggcactggctctccacagcctcctccataccgctgcctgctttttttctctcatctcttcccccacccgccattgtttttttgtgtttccttccaggcagattagttaattccacctcaggtaatctcttattctttctatgacaaaatgcattcttagtttcacactgttgtcatataaatgaaggaaccctttcacacaaattgggaattggcaggatttgattcatcaatattctaggctgttagttttccttttgctgtgctcacacagaaccagatacagcagaattaaagagtaataggcaccctctagtcccttgctactcaaattgtggtccatgaccagcgtcattgccaatacttggggcttgttagaactgcaaaatctcagcccctcccaggcctacagaaccaggtcctgtagtctaacaagatctgcaggagcttatttgcacattacacttgagaaacactgtaagcctaccctatttctgtccttttcttcctaagctaaatgttatgacttggtcacagctgaaagccttcagtgccattattagtaatgacgttggtgctgataaggtttgtagataacattaaactgaaaatgtttcttgacgttaaactgagaaatgcttctaatgaccaggaagacagaattgaaagtagccttaattaattgaagtgattactgtaaaacaggttaaaattgcatagggaacactgcctgcctggcgaagcattgcatggtgtgaggagtgggcacaggcgcagcactcaggtgttttgcgtttgtctagaaacactgtcctttcagtccttaagcctcatggacagctgtttctcggggactgtcagggtctcaattttgaattgtcttactgattttagatgagatagtttatattccagagggcttttttttttttttgagacggagtcccactctgtcgcccaggctggagtgtgatctccactcaccgcaacctccatctcgcgggttcaagcgattctcctgcctcagcctcccaagtagctggaattacaggcgcatgtcactgcgcctggctaatttttgtatttttagtagagacggggtttcatcatgttggtcaggctggtcttgaactcctgacctcaggtgatctgcctgcctcggcctccaaaagtgctggaattagacatgagccaccacgccgggccattattattataattttttttaaagactagtctagtgtaatagaagagggaaagagaagaacaagaagttctgtctgtaactgactgtggacaatcaatggagataattcacagcctgcagattagccagagggccaattgttaaatcctcattatgctgccactcttgagtcctgttaggttactagaaagcagtgcacctggagactcggtacttctgtctcagagctgtctttctaaagtaagatttagcattaggcccttagtttttaactgggaagttgagcagagagggaatgtttgaagactgttactacaattttaaaactaaaaggtgtcactgagggtactgagcgtgctgtttattctctaatgctcagttccatgggagaagtttctctcaaagttgagttagggtgtttttttcctaaatgctttctttctttttttgggatggggtctcagtctgttgcccaggctgaagtgctatggcttactgcagccttgaccttctgggctcaaacagtccttccatctcaacctcctgagtagctgggactataggtgtgcattactgtgcttagctaatgtatttttatttttattttttaaagatgaggtctccctatgttgcccagtcttgaactcctgggctcaagcaatccttctgccttgacctcccaaagtctcaaagtgttgggattacaggcatgagccactgcaccaccctaaatgcttttatttagtgagagccataacatcatattgtttccatattcttttcatcttccaggaaattcctaagcttttttttttttaaactatatgttggaagctttcctttacttaggacttttttttttttttttttaatagagatgggggatctcatcgtcacccaggttagaatgcagtgataccatcacagctcgctgcagcctccacctcctgggatcaacccctacctcattctcctgactaggactacaggcactcaccaccacactgggctaattaaaaaaaaaaattcttttttgtagagaagtggtcttgctatgtcacccaggttgatctagaactcctgacctcaagtcacccgtccgcattatcctcccaaagtgctgagattacagacgtgagccactgcacttggcctatttagggcttctaattcactttccttttccttcttgtctaattcttgtgtttttagaatctgcattttattttaagtcatctcaaattccttttggaagtagtgagggagtaaatgctaaccttgtgtagaaaccgtaaagcgtattcaatttgtttctgttttatgaacttgaccttgtgtgagcatcagccatatgcaggactattgggcttggaatgtgccagaccaagcagtctctaattttgttctcagttcagagttgaggggctgaggaagttttgggcaagagtgaggtctgcttgggaggattgccttgacagctgtgcgcacagtgggttggaaggggagcagcagggcatccgtttggcagctgccttggtggtctcagactaccgcatccatgctgaaattggaaaggagaaggtcgggaagggaaagactggggacaaagcggactgatttgggcaacgggtgaggtgcagagagtaaggaacagggacgaatatatgtgaccctggttatcaggccttgatgttgctttgaaaacagtcctctccagtttttgatattttttcttgtatatggggagcttgataaactaagccttggacctttgttgttttgatctgagctctttgtcatctgtcctactccgggaaatgtgaagtggctgcagaaggcacctaacctgttcttgttcccttttctctgcctcgtacctcaagttttctaccactagaggagaggcgggctgaacttccttagcaagatctctttcattttttgggagtcccattttctaatacaactccagacccatcagccacccgggagaccccacgtgggagctgcgttccctttgccagggagatgctcctgggagttgcattaggaaggcgagtcaggaacagatggctgtcctggggggtctggatgtcggcccagccccatctcctcaaagccattgtttgccctggtttgtgaggtgctcaacagcagggacagatgcaatcagagaaggatgaaatgctctttttctttggacctgaaatgggaccctatacttagtgcagccttactcagtgactaccaaaatttgaaaattgtgtttttctgaggctgggctcattgacttccgtgagctcttattagctgtttactcatgaattaggcaatttaatttgggtagaggagggcaaatcaaatgagaaggagctgccgtgtttaaaattactatgaggatagactgttcttaaaggatcctactcaagcctatagaagccttccttagcttacatgtcgagtaaattaattagacgaattgtgaattattctgatttattcagagaaatcctttgctctgcaggccgtactgggcatcatgtggctgacttcttgttctgactttctatgaatgtttgcaagtaataaaatatatttttatgattgagacttatttagtaataatatttaatattaatatttaataattttaggaaaataatttaggtaaggttttgctgtgtattgtagcatgcattcttctaagccatgccctttgatattaaaagttgtgctagtttcaaagggctcgatttccttaacaggaaggcacctataaatctggcagtaggtaatgaagggagaatggtggtcttttcagtaggggagggcagtgcacacagagagttatatgttttttagtctaactgccctaatctaatctcatgaaaggtacatacacatttaatacacatttttctggggcccatagcttttattacattttcaaaggagtagatgactcctagaagataggaacctctgcagaataacttcttgagtgagataacattgttgcgatttgagaaatactgaatctctacatttggtcactttttttttttttttttttttttaaacagagtctcgctctgtcacccaggctggagtgcagtggagagatctcagcttactgaacctccacctccggggttcaagcgattctcctgcatcagcctattttcacctctttaaagaaatatattgttatcgctccctgaaagtggattagttaagtactgtttaccctgcctatgaagaaaacttacttgcacatgttatgttcggacattagtcaatgaagattagtcaatgagaactagtcgatgaacatggtcaatcttgcttaaagactcaaaatatgctggagtatggtgttaattgtggtagtttatggcatttttctgaagagaaaaaacactccagcaaggtaggtaggatagtatattctctgtcttcttcctcctgcccacccctctgtctacattagaaacaggttttggaggagtagtgggaacattgggtgatttctagtggggttagagaaagcagtacctggttctttggccacatctaccaaagcaaagacctagacttgtagaggagagtattgtttgcttgtttgaggattgtatttcccaggtttgttcatttgcatgagtggctgaataatgtaacagagacttcagaagtaaggaaaatggttgtcaccaaaatatcttgttttacctttatttggactaaatggaaaacacatgtttaatagctaaggctattgagtgcttatcatttgccaggaactgtttctgagcctttcacatataacacctcattttatccaccctctacccctaacaaatggtgtggtttgagttggccttggtgaggtatgaaaaggaaacaaagcagtgacctcttcctgcaggctggtcagatgtttgggataacattccttagcattcttggtggaagtggtgatttcgttgaaagctgcttcccagttgctctggagtgcaggtgggaggggtggactttggcttttccaaaggatcccaggaatgggaaggaccttaaagatctagaccaggggtatccaatcttttggcttccctgggccacattgtaagaagaagaattatcttgggctacacgtaaaatacgctaacactaatgatagctaatgatcttaaaaaattgccaaaaaaatctcataatgtttaagaaagtgtatgaatttttgttgggctgcatttaaagccatcctggactgcatgtggcccatgggccatgaattggacaagctttatctagactgttctgaactactcatctgcctcccccagcccccacccccaccccacacatccagaattctccacccattggttgtctggcctctgcctgaatagctgagtacctgtcttttccaaaactaccccttgaggggagacttacagcaccctgtagcatagtatatgatatttggctagtaaaatgtgatcctttaatatttttcaatctttattgagcacccacccacggggttggaggaatttagggggttctgtggcaaaacaagaatagagtctttgcatttgacttctcagacttgtagggacatacaggtaagctggatgttctggtgagcgctgctagaggccacacaagatgcttccaaagcctagaggagggtctgatccagccttgaggagacaaggtggcatctgaattaatgagtgcattaatggtgaatgcatactgttattataaagctcagggatgttacagcctctgatactttacacaaatagaaaggttaaggtaattttctgtataaaataacaaaaataccatctaaaaatgataacgcaggaaatttgaatattcagtactgttttaaacctttcattcttttaattaattttatttatttcacttatttattaatttaatttaattttttttttttagctgaagtcttgctgttgcccaggctggagtgcagtggtgcgatctcagctcactgcaacctccgcctcctgggttcacaccattctcctgcctcagcctcccaagtaactgggactacaggcgcccgccaccacgcccggctaattttttgtatttttagtagggatggggtttcactgtgttagccaggatggtctcaatctcctgacctcatgatccgcctgccttggcctcccaaagtgctgggattacaggtgtgagccactgagcctggccctatttatttgttttttaaagagaccaggtcacgctgtgttgcctaggctgcgttagaactcctgggctcaagagatgctcctgcctcagcctccaaagtagccgcgatatagcacgtaccaccatgcctggctctctttcagttaactttaaagaaatctggtgtttttgtttttgttttttgagacagagtctcgctctgtcacccaggcaggagtgcagtggcactatctcagctcactgcaacctctgcctcctgggttcaaacaattcttgtgcctcagcgttctgattagctgggattacaggcgctctccaccatacccggctaatttttgtatttttagtagagacagggtttcgccatgttggccaggctagtctcaaactcctgacctcaagtgatccgcctgcctcagcctcccaaagtgttgggattacaggcctgagacactatgcccagccttcactgcttttatgcaaaggaataaatagagtgattattaaagtgctctggatcacacacatacaaacacacatatgcacatacatacacacacacaaaaatacacaaactttaggtaacataaatgtgtgtggctgtcagtgaatgctgcatttttctgagcttgtaaccttccctttactaactgtctccacattatgaccacctgaaaaatgctacactgcagtggtacattcttcagcccaactaggattggatcagaggagttactgggttgatagtcttggactgaagctctctaaagagcagaatttctgtgatgtgcaggtagcttactgttaccctgtaagctccattttttatatttctttgcccctccttctcaatattcacacagttttcacaggactgattcaagtgtgaagccaggatctcatcttttaacagagtggcattccgcacagtctgaggcatgatctctttgtgtctaggttgctccatttagcttcaaaggcagcatgatgatttatggtccatttgtattagggaagactcagaggagggctagaattgtgatggttggattaattcattttttccaggcgcaccctttcctccctattcttggttgttttgcagatatcccaagtaattccagattcatttggaaggtttctctctcagtagcctgctctctaggtagttctcaaattctaatagacgcacagacacaaaaatctgcttggtaggtggggtttttactttttagtgacttttatcttgtgtgcctgacctggtgcagcatctggaaaagtattggtagaaaagaatattctcagtgagaaggagaaggaacaagtaaaacaatgtgaactaaaggcctggcacagtggctcacgcctgtaatcccagcactttgggaggccaaggtaggagggtggcttgaaaccaggaattcgagaccagcctaggcaacagagcgagaccctgtctctacaaaaaaaaaaaaaaaaaaaaggcaaaaaaccccccagaattagccaggtgtggtggcacatgcctatagtcccagctactcgggaggctgaggcgggaggattgcttgagcccaggagtttgaggctgccatgagctatgatcacaccactgcactccagcataaaaagcttggttatttatcttagttaaagctgtccttaaagaatttataaatggttgcaaatatttctgaaaatcatagatgtatggtttctatggttcctggttactttatccagtaaagtaacatgacagcttattttatggatagtcactagattgtaaacctttggaagttgggactgttccattcatcatcttcacattccccactgtgcaaagcacagtttgctcatttgttttgtttcatttttttccctttcaactatagttttcacatgtaaaccatcaaattataagagattaaagataatttaggatttagggtgttttgattttctagctcataaaataaggatggaagagcagtgatcagttgtggtaattgactgttatggcagaaggcaaaaaggcacagagaaaagagatagaggacaagcctgttctggttggcatcccaagtctagatcctccatctgggagcccatggctcagataatactccaggtaatcatgaattgtgggagttaaccctgtttaatgccccacaaaggaacagacctgtaggaacaccttctcctgtctgctgctgccacagagggtagcaaatcccatgctaggcgtggagaggagacttgggcatgtccctggagggacactgctgcagtcacttcacttacagagctggggaggccctgaatggtgtcagagttcacagtgcaaagcagtaattatgttgaagaatgtgacatctcaagattcaacaagttttttttttttttttgccttaaacatgaatgcctattcatagagggattataggagcaaagctctcttagatattaaacaccctgatcagaagaaaaagagaagcaaattcctgatgtcaggaaatagcagcaaatttttacagaatgcttaagcctggcacagcaatcctaagaatgttgttcagtttcatggcttttcctctcatattgggctgaatgtaacttgtccttcatttatgtaacaaaatatttgagtgcttactgtgagctaagcactttctcagtgttgggagtaaagcaacaagcaaagcaaatccctaagctttggggagatggaaaataaatatctgataaagtatatggtagtcataagagctgggaggataggagatggagtagggtgatgggtgctgttggagataatatgtcagggaagggggggtgtttagtagagggctgaagtgagggagaaggtgttccaggtgagggcacaggtgtgaatgtagaccctaatgtggaagtgtgcttgggtgggtcaaggaagtgaaccctaagaggaccactgggcagaagtggaagagctaggatagggaggtggggctgagggtgaccaggggccaagccatgcagagcctcttaggtcctgagctttctcagtggtctccccttcatctgctttggagcttgctttcctatgtggcaacattagttctagtgtgatgaatattagtgggaaaatagaaagttctatataaaacttacttctggaaactaaaggattcttgcttagacctcagatgttgatgggtggtagattaaaggccgttttctcatttgttgagctgtgccctgagatgagttttctatattcgtgtggtagagaattcattgaaacttgaatacgtgccattatgtgaggcagaagtgtatattctatgaaagggtgttgacatattgtcacataccatgagctgcttaatctgggaatatttgtaaaagtgtcatctggtgtgaaggctgatatttaactatctttaaaaaatactggaaaagacaatttgcttgcagattttagggttttgctgtgggtctgtttttgtggaaatgatttgtgttcagtagcattttttcccctacagttttcatatggtactgttttgacttgtttggaagataatttgcttggcttaaagggaattattcgaacaatcttagaagtttaaaaaattatgttagctagaaatcagaagtttttgcctttactgaaaagttcattatttattcattaatttatccatccatttatacaacaaaaagtgattcagcatgtagcgtgtagcagacagtgtgctgaagatacagcagatgtaacagatatggcttgattagtcttgctaggcagcaagagacaaacatatgcatacacttccacactaattatggtaagggctaaaacttattgaaaacagtatagtgatagggaatttggagtggggtggggagctgtgtaggatagtcagatgagacttttttttttgagacagagtcttgctctgtcgccaggctttagtgcagtggcgcaatctcagctcactgcaatccccacctcctgggttcaagcaattcccctgcctcagcctccctagcagttgggactacaggcgcgcaccagctcgcccggctaattttttgtattttagtagagacggagtttcaccgtgttggccaggatggtgtcgatttcctgacctcgtgatccgcccacctcagcctcccaaaatgctgggattacaggcgtgagccactgcgctcggcctagatgagacatttttgagaaaataacatttaagatgaggcctgaaggaaaatagtgccagccatttgaagagtgagggaaaggggtttccaggcagattcaatatattgtgcaaaggccctgaggaagtgtgtggttttagtggagagctaaagaaccatgaggcaagagcatcgggatatccaagaagtcatgctggattacatatactggtcagtaaggagcttggatttgattttactggggaaataacataatctgatatgtttaaaatgattactgaggcttctaagtagagcattacactgttaacagtagtgggagtgagaggtcaggcttggtctagggcagtgcttctcaatgtgtggtctcaggatcagccctatcagaatgacctggaaacctgtaagaaatgcatacttcaagtcttattatggacttgctgattcagaacctggaggtgggactcagcaatctgctttaacaagtcctttggatgatctgatatacagaaaagtttgagaaccactggtctagggattgctggaggagatggtaagcagtagatggattctggtgtatgttttgaaggtagggatgataggacttttgtatatgggagctgaggaaaaaggagaaatcagaaatattattattattattaatgtttcaagacggaatcccactgtcacccaggctggagtgcagtggcatgatcttggctcactgcaacctgataaggaccttgtttattgtgatgagggagactggtgggggtagcaaaaggacataacttttgaacacattgcgtttggagtgttcatgaaatgtccaagtgaagatgttggctgttgatggcaaaatgagcgtacagtccagagggaagatgtagtttcaaatacagctcagcagaaagatacagtttccagaaaggaatttgggacttgccagtgtacagggagtatttaaagcaattgaaataggtgtgatatcaccaaggagagagatagcaaggagagagggtgcaagagcgggcaaaggaccaagctggaaggaactcttgacattcacaggagcaagagccagcaaaagaacagaaagaacggccagggagagaagagaagaaaaccaggaaactggtttcatggggaaatatttcaggaacagagtgatcaactgtgcttaatttgtatgatgaagcggagatttgtagcatagagatcactaggcattctatttggactgtcagtgaaattgaaataaaaagtcaagaatcaacttgatttccatcacaggttttagattagaagaaaccagagaaacacagccccaattttctatttgctagttttccaaacagtaagttttcattgatttcactggctcccctccggctactatttgctgtgcacaaacaaagtctgaatgagcattttgtagtcctgaaaaggagtagcatatgggcttcaacagccggtcatattttcttttattactatatttaaagcaacattcaagattaaaaaaaaattcctggcaactagcataacaagctgcaataaaatcattcctggctattgatatgggctactttgtgcctcatgtcatgttattgaatccaacttcttggaattgactgtcttaatctgtcacttagcaaatttatattggtgaggaagaacaaaaacagatttataacttgcatatctcttcaagcttctgttaatatgctcaatattagaatgttctacttttagcgttttgggtcataagctatagaacattggggcttggtgagaggatatgggcatggggagaggaatgaatatttggcattatttatgtttgaaccattgagctggggtctttaggtttattatttcatttaattcccactctgacgtaggtggtatttccctcattagtagataaggaaatgagctagtaaagaaaactatttaaatccagatctaaaatggatctttattctgtgccaagctcttgggggaagagtatgtgtggaggaggagttgtggggactcacagagcagtggcaaggcaagccagagatacagcaaagggatatcaaggactaatgaggtactttaaaggagatcgagtcatggtaaggcatttaaattagttttgttagcaagtactgcatggaacaggaagactctgtacatgctcagtgtagggcttggtccgtcaagactggctaggagttttctagatagagccttgaatcttgcattacagtcactacagagcatgagctctgtggacatttcatgaaaagcttcctttctacttggatatatttttttacttcttgtgtgcatacttgatttatttactgttccttatagagctgcaaggccttgtttcttttctatagaagttatatttctctgagttcagatgtcacatcttcgttaccttctctcaagttttgctatacaagcttaggaacgtcatctctttctcttccagagttatcttccatcatgtaggctttggagccactttcctcagagcctccatttgcctcacctcttcttgcctgggaccttgtaaaaacagtgattgtggtaattaaattgagatatgaggaatatatataactattatgtagtcataataattaaaaatttaaaaaaaatgcaatgagaggggaaaaaaatctcctggattggtgagctagacaaaacttcatgttaattaacatggatgctttaatccatctattcctgagtccaggacatcaaatcttgggttctacaatgggtgccagtcttaggagggtcatatgtatttccagtcacaaaagatctttctgtcatgttggagaagacaaaagtttataagaatcagtgggccatttaaaatgataatgagcaacttaggcgtaaagccagatgtcacaggctggtggcttgcagcctgctctactgtgctttaaatacgcagtatttaaaaaattgatgttggttcccaatatttataaattgggagatatcagccataaatctagattccatcctcccccacctttaaaaaaaagaaagttggatctgggaacactaggtctatgtttgtgcttagcaggaatcggaagagctgggttgtgaccaggctctttcttttagcagtggcaagctcttttcagctttctgccatcccgaaagcaccctagtgtttctcattggccgtgatgcccatgttgactgcaatttgtcattgtcctcaaggctgtcgttttttccacagagccggctttgctctttgacaaagctactttggcctccttatacatttgagttcattgatccttagcctaaatgatcaggacatgacacattcagaagtttgtattatcttgtaaaagcacatgagcaaagtctgtctagtaagtgacattgctggtattcagaccaggatatggctgagaggaagcacatatgtaaattgaatgcatcagggatcttttggagaagtcaaacaagaattctgattacctcatcagtgatacctaaatgcagatttcttcttgcttcagacaaaatttttcaaagatactcaaagtatctcagctcttgttgtatgtgtgttttgaaagatagggttgaagaaaacaatgaaaagataacagggatatctgtcctccagagttgttcaggggattcagcatatgagaagttatttgcgaagttttagttcccagtctgggcatcagctcattatcattagtctctgatatgagttgtttaatgatgaacttgtgcaaagcacttgatcctattcagcgtcagacattcattgttaaaagaacacattgaggacactgttgtaggtcaggaaattgaaggtagggagttgagggcaagtagaagagagtttcattctggagttagttcagtaaacattgaatgctcatgatgtgtcaggctttatgctgctaccagaggcaggaagataaataagacagaacatgcagacttgaacagtacggtgtggtaagaggtgtgcccatggtactgtgcgattatagactggcgttggcccagtgcagggctagagggatgctccatggtgatgactgagttgagccttaaggcccggatgagctggccaggtagtgatgacaagagggagagggatttaaagtgtgaagttcaatttaaggaacagagatgatgcaggaagggctaagatatggaaggctttgatgaagattttggggagccagggaagaaggggagagatgatcagatttccattttgattgcagcttggtaactggattacagtgtggcagaactggaggctgggagaccaggaaggtttcaaccaagttagaaaatcatttttggtttagaagacagtgaggggctgggtgtggtggctcatgcctgtaatcctagcactttctcaggctgaggcaggaggatcacttgagctcaggagttcgagaccagcctgggcaacatagtgagacgcacccccccgcccatctctattaaaaaaaaaaaaaaaagacagatgaggatgggatctggagtggcacaagccatgatttaccccctcattaggtgagatactttttggaagtgctgaccttttgccattttgaagaaccagcttttagatgctccattatggacttagattgaggaagattgatcaattttattattttgctgctttacattttcaagaggtttttttttttttttttttttgaggaggagggaggagaagggaacttactgtaatgtaattttgctaaaagtttcccagaagtgaatcatgtttatcaagataaattgtagaaagaagaaatttgtttgcttataatattgtttctatgggaaatcattcttcaacaacaagcagcaaacttcctgggaggaggcactcagtatattcttctgcccctgaggaagttgaggattgaagtatctcccttgcttgtactctgggactagttgactctaagcctccttccagcctcctgctgtcaaaacaacttttcttctgtttattttcatataggagctgcacaactcaaatgttatgtgttatgccaggacctcagtagcaggtgggggtgaaaagccctgcacagtatttactgggaaaggattgcctgttcctgaggcactgcctccatgatagacgctccactgatgctgcagcccatgataggctaaagagattttgtgggtactaagttctattaaaatttagttcaggctgtcatcgctgttctccaggaaacctcagtacccttttaattagccccacccaggctgtgacctcaccctgatccattgtctgtacagctgccagagtgattttctgaactgcacatccaagtgtatcattctcctacttaaaatccttcagcagttccccagagctaatccatgggagtgggaaggcaagaatctgagtctcttgcaggacccgtgaggcatccgtcccccaagggagccgaagttcagtccttcctattagatctctagaaagctacgtgactggaccccattattctacactccctgaagcccacttactttaatttttgatgcttgtctttggcttttacaaattgatatgagaagccaactgtgaagttcaggtccatgttgtttgttaaaggaatcataagtctgttttgcaattcaatgctttctttaaggacctatgaatacttgttaaatgaatagttcatattctaaattgcttttagcatttagtgccaggaaaaaagaacttttctcatttaaaaatcttgtgtgcttcgtttaaagaatcaattaaaataatagggtgtttggttttttaaaaacataaattttgtttttttagagatggggaggtggtctcactctgttgcccaggctggccttgaactcctggactccaagtgatcctctcgcctcagcctcctgaatcactaggactattgtgtatttgccttttgacttttgttgccaggagcctcaaatctaaagataggtcataatagtcataaaagtagtgatgaactggaaatctgctgtttttgtctttccagcctaggagccttttccccatttactcgtttgtttacaaatattttttgagtggttgtcatgtgctgggcactgagaaagctgtagtgaataagatgggtaggcaaaaatggaagtggttcgattgtgctcatccaggtatgagataatagtggcttgggtgagtgtttgcagtgaaggtgtagagaagtgggtgagttctgaatgtatttttaaggtagaagcaagtgaatttgctgatgatcaaaagtggggaatgagggaaaaagaagaatccaggacgattcccaggttttgattaggtatgtgatactgacttttgctgaaactgagggacatgttgaggaagaagggaaggacagctgaaaacatttgggaaatgttaatttgtaatacttgttacatatccaaatggagatgtcatttagttttccagagctcagggtagagattctgtctccattccatagcaccacccaccatgcaaacatgcatacacacacacacacacacacacacacacacgcgcacacacacacacacacttcttttagggaacttctcatgtccacagcaaccatgtgattctactatggtttcagcttcttcagccacaaaagacctgatacttccgtgcctgctggcctttgtgctatagtctcctggccacagtgattagtccagggggtggacatatgacccaagagtccttcattggggtctagggaaataccgccttgaagagagaggctctctttttctgctggagagactaaatggtttacactcagatgtgattcctgctacgtggaggaagtccatctgaatagtacagattgatgaccttgcccagaaaagcagagattctacagaaatgtggaaagtcccctccctgctgtttactacactgtatcccttggaatgccagcgcttaaaggtgttaagtgagtaaaacttctttggtcaaataaatttaaagaaagaaatttcttgacagcagaacttttcagatgagcctttgtaatgaatatgcggctgggcatagtggctcatgtctgttatcccagcactttgggaggctgaggtgggtggattgcttgaccccaggagttcgagaccagcctgggcaacatcacaagaccccttctctgcaaaaaatacaaaaaatacagaaaaatcagtgatgagtgcagctgtagtccctgctacttgggaggctgaggcaggggcatcgcttgagcctggaaggtcgaggctcctgtgagccaagattgtgccactgcgctccagcctgagtgacagagcaagacactgtgtaaataaataaaaatatgttttgtgcttctttaagaggaggattagtaaacagtgttccccaaatctatttgacagtggagggtttttttttgtttttaaatgggacatctataaatatctctcagttggaacccagcttgaaatattgcttgaaatgctataacaggttgtcatttttttgtagtcatagtggggatgggtgagttgttctttatttctggcaaaactggtaggctccatataactgtcattacttcctgatgttttatagcttgttaaggagacaaaagccttttttcttctcctagtattttaacatgttagtaccagatattatctatgcttaggtatgaattttggctcagagattttctcagcatcacaccaatgataagtttcatgatcctagaatgtactttccctgtattctttctcctctgctggtgttctgtgagtccacgtgtatgtgtgtgcaggacaacacttaaagtggttattctttcttcaaagactcagttcaacacacccctggtggctgttgtagctcagggttgagtagtgatcctggtattaaagatgagaaatttgttaggtagccgctatgagctgcaaggtttcctgaggcagaggtatccggaacagagtcagggaggccatggggccagaggccttcctgattctggacacacagagtaccttggtttccccaccctaccttaaaaatatattcggattcacttataccgattaattacttagagagagtgaatgtattatagttatgtgaacttgtactccctggctgtctctcttcttatgccttggtgatttgtctagaggataaattgctttttggcttttataaattctgttttcttctaccaactgctaaccattaacatctcaatcaaatgggggaatttgcagttatcagcttaactaatctccatgcccacatttcttgcttctctccctgttactgacccagatccttgatgataactcattgtagattttgttatcatttaaaaccttttcaactaggtacttgatataatagttcttattaatttttaattaattttatattatttagtcatttgctgagttggtagatatttatcttgtgatttcttttaaaaaagtcttagttctgagatgaacctttaacagcacccttctgtggcagtctactaagcacagtgttaacctgaggtctttggaaaggccagcttctcacagatctaagggatgcaatttgctggcaaatctttagttggccagtcttgactacatctgatcaaagttgggaagtgagctgctggagacggtgacattttctgaagcatgaacagtaacaatctgaaaccataggcccttcacacctcttctgtcatttcgtctttgctaccgtccttggaaatagcctgtctttacaaaggtttctatataggttaagatacttgcttgaggtcatgcaaataagagctagtctggaggaaaaactcagtttcctgtctcttctgttcatttcactgtcctgcatggggttatgcttttttctttcaatgaagcgtaggaagtctccttgggaatcatctgtgctgatctctgtgtgtgtgttttaaattgcaatttgtgttgcaactggtaattccagttcttgtatattactaaggctttctctgtagatggatagttaatccgtgaaaatcccgaaaagcatgcagctctgttgatttgattttgttataagataaggaatgcataatcactctgggttcctggctttaaattataaggatgtgttaaattatgaaaatgaaatgaggtttctaaaaattctatattctggaaaatgctattaagcaatttccattttgatgcaatgtatatttaaaaagatatattttctgtgtatagttgtactgtttttaatctccttgtgattttcctgaagctgtgcttaaatgtgaacaattgtttaaaataaaccaataaaggagagaaataggatgaagatattttacatgttttactaattctgacatgtccccaagtgataaatggtattcagaggctgtctgtacaagaagggttcttacagtccatttctagactaatttcagagaacgcagcacctgagtggccaggtgagctgtgctcactgtggggcggcagggtgggcgctaaagccttgagtccatgctcaatgcgctttcccctgccccgtgctggcatccagatttttgtttattgtctctagtttctacatcctttgtaggcaatgaaactcaccttatatggaattgtacgtgtcttttataggaagagtatgtgtgtctaagttaatcactcctggtgggatctctgtctgctctgttactgtgttggccattgttactgctctgttactgtgctggcccaatgaaatagtctctcggccatttgactacttcagtttaggccctagattgttttgcaacttgcttcctagttcatcccccttccacccatcttccatatttccaggagaaaaaaaataaaaataaaaactttaatgtctcccccaacccccagattttaggtactgttttctgccccctgtctcgctttctagctgtttctcctctcctgtttgcatgcacccttctcattctggctttaggaactacttgctgtcttgacagtgacaggtttcatccctccatgcttgtaggttgttgcaccatcctatgaccagaataccttcctctccccatttcagccattagtactcagcttctgtatgtgcttccctaggaagtccttccagtgacagactgtactctactcacctcccctgtgagcagcctaaggcagtatggtagcgaagagtgtgggctgtggtctcaggttgcctgggttcaaacccagctcctagctgtgtgacgttggacaagtcacttaacttctttgggcttcagctctcatctctaattaatagtatttaaggttgttttagggttaaatgacttaatggatgtaaatcattcatgaaagtgcacatacgaacatcctgttgctcacaatctagtattactagcttttaagcctggaaaaccagtatgattccatttttgtaccctcaggccccttttatagtacataggacatggtaggcactcaataaatgttgcttacttgaataaatgaaacaaaaaagtcaggaaacacagaacacttattttagtgtttgttaagttatgccctgctttgttccagaaaatgatttatttcaattagggtttcagatgtaccctttaaggagcaatgtatgtatctgtaaactttatattttcctcagagtcacaagccgtttggaatttcattttgaaattctctttccactaacatttatagttttggcacagttgccctttaaaaagacagcgtatcaattgaacataaatatattgtgtttaaactatatgcctgcttgaataagtgcagtacttatttgtcagggcatatattatgttggagtatgatgtcatgaggcttaaggaaactaatgcttatcatttgttagtgcttaaaacaaagtagagatagccaaatgcatttctctacttccttattgccatacagctctccttgtaagttaataagtatcttattgcaaatcagccctgtatctgttccaaattcaaatgttgatggttgagcttccagtattttctcccatatattcacactgaataacatttcctgaggattgcataagacccatttaacatttgtgaactatgagacttctttgtacatttctgtttctttagttgtattacggtaatcgggcatatgtcttctaaccttgatgatctcacctctatataatataaggatgttgggagaaatatgaaatctagaccaactctaaaaaattgaatgtcaaggtaattgtcttgtcacacaatggtgtaaccagccaacatcctcgaacagatccgtgtccataatggcatcattgacttctgaactgtatggtggtgttctctgaaaggtgctatagagaaaacacaagtgtgaagggcgattgtgatggttgtgggtcagaggctcctcaagtggagtgaatgaggccagccaggaatgaagacaatgcagtgaatgattcttttgttgcatagtaaaatgaagtactagaaaatgttctcttaacaaagaatcatgtttggtcagagtggacgtgatatagtgaggagtttttgtaaattcttcatttagcgactaatattttggctcagttaaagatatgaaaaacattttttaacaaaaaggtgttagtggccgggcatggtgggctcactcctgtaatctggctttaggaactaactagctggttctgactagcgtatgagggtggggttaggttttccctatcttcccccttcttccatagcactttgtgaggctgaggcgggtggaccacctgaggtcgggggttcaagaccagcctggccaacatggcgaaaccccgtctctaccgaaaatacaaaaattagccaggcgtggtggcgcatgcctataatcccagctactcgagaggctgagtcaggagaatcgcttgaacccaggagtcagaggttacagtgagccgagattgcaccactgcactccagcctgggcaacagagcaagactctgtctcaaaaaaaaaaaaataaaataaaaggtggtagtataaaaaaaggggcactgtattttatagttacaaatactgagtcattaatgttacaggcgtacaatgctccacttgctatgagagtgtgctgctaagctctgtctccagaacttttgccccttggtagactctgtcttgcacaggtttcttgtcagatcatagtcctcattttctgtgcataagatggaaatagcatgcagattataccacagattgtcctagtagttcttttatatgttttactcaaaaaagctggtcctacttttttttttttttttatttcttgactagttttgttaggagaatttacacttttggtagtagttttgccattatgtcattacttatgaacaaatgtagttattgcacttactttatagagccagctcagaaaatttgatttcaatgaaattctttgtgtttagcacttttccaataagtgggccattgattcggttataacaaactattttgatgaatgagttgttctgtttatggaaggattttacacttaaatgttgcttcttgggttgtgctatttttgtactttgaaagttacataaaatgaaaagaaccagcacataagttttatatgctgagagttgaagggtgatcccattgtttctgaatttgagtctctgccagcatgaatcctcctatgagggtccctaaaggctatattatagtttcgatgaaatgtatacattctatgaatgaaaaaaatatagaatttccttttcatgattttttttcttagtttgttcccatttttgtccccatcaatataaaataaattaaaatgaccacaacaaactcaaggaggtgaaaatcaagaaattgttacctgtattatggacaggtggtgtagcgtcacctctctcatacacacccactatctccaataagcctagcctgggaaggagaatattttcctgttagctatttgagtcctcttgcgaagtcatttgaatatgtgagttctggacattgcagataactagttggttctgactagcgtatgaggttgggattagattttccctattttctctcttcttccatagtgagatttgtggagggtcaattagagtcttccttgacacaaggttatttctttaatgtagcacaggggaaggacatctttttccttttatgaattctgcccaatccttttctgggctgatctttgattcctatcatggggtctgtccagttttcagtattcttccttgtttgggtattcaggtagtagatatctcagatattcttccttgagtacaaaagtatctcccagcagtgtggccttaggcagatttgtggtctttttggctgtgctgtccagtactggaaaggataccagatagaagcttcagttctcagcagggtcaggttgcctctggctgggcagtgggtgtccagatgcagggatagtggtgtagatgcagggcagtgattaaaggctttggagtttgaatcccaaccctgctcagtgtgaccttgggcaagttacttacctgtgttaagcctcaataacctgtgccattggggcctttataaagattaatgaggtgtaatataaaatacttcacatagtcattttctggcacatactcagtacgtggtggaggttatggtgattttattaaaatagaattggctgtagatgcccctccccactttccaagatcccaacatcatgcctagtctgcctgcattgttgtcgagcatgaagaaataatcgattttgtaatttattcggctccttattacttttccattcttgcagatccattgcccatatccttaagatgttttctttaagccttaccctagtcagagactattttctaaatagaactaaaagagaaatttgattgagcatctgaatctgaccttctccccaattaacccagttgggcagaccttcatttagagtgtcatttatttttcaagccacgtggtaaggaagcagagggttctccttacttctaaagtcaatttccattaaaaccttcagtgttcagtgtgtagcttaatgccttttaaaatgattgctatttttgaaccagtgtttttgtcacaacgttttgagtgtagaatattccttatttgacaaccctgagcttgtaggagtttataaatggctaagaacaatctgattagaatgtattgcttttggttggaggccaagaatattggatcattggtttagggtatgacacttaaagagaccaaagagcagagtacataatgcccagataggccaattcatgtagctttgttccataatgtaagattgaaccccaaaccctggccacctatctttgagatatatgctgttggccacaggagcattaattactccgggcagatcagcagaccatgaactacatgctacgaggggaaatccaaatgcctcaatgtacaggatagtgggtcagtagaagaaacctcacaaaggaaagctggagaaggctgtcaatgaaggtttttttttttttttttttttttttttaagtcgtgtaagaattgctaagtgacagatcagagtccagaagacaggaaaggagttaggaaattctgagatatttaaattctgaccatgtaataaatgattcccttgtggaagataaggggtaagtaccaaaaggaaggagtgtcacaatgtggcagttttctaatgaacttaggtcttaaaaggaagcacacacaagatagaaggctcacaatcaggagggactggcagtgatcttagctcatgttaatatactgtgtgtcaggcagtgttctaagcactcacatccttgtttgatctcatgataaccttatgaagtagatggtattattattgcccttttacagaggcgtaaacgggaggctttgggcgtttaggtatttgctgtcatttacatagctagttaagtaactgcgctgggatttaagttgaggtagtcagattccagagagatctgagacttgcagaaggtgccagagacaataaaaaaaagtagttgaaagaagtgttcagagtcataaggaaagaatatatttgcatctgagtggaactgatggtggctgtgggtagtcatagagcatagccttttaactcctgttgtctatctatcttttatatatagaaaactcagaatgccggctgagcatggtggctcatgcctataatcccagcactttgggaggctgaggcgggtggatcacctgaggtcaggagttcaagaccagccaggccaacatggtgaaacacagtctctactaaaaatacaaaaattagcgtggtgcacacgcctgtagtcccagctacttgggagggtgaagcaggagaatcacttgaacctgcagggcagaggttgcagtgagctgagattgtgccgctgctccagcctgggcaatagagcgagactctgtctcaaaacaacagcaacaacaacagaaaactcagaatgtcaaaaatatgttggagaagtaataagacagacatagtttttctaactgaatttaagcctcttagcccgacagaatttctccacagggttctgagaacattttggatccagattgttcaaccaagtccatgatgatctgtgaggaagcatggagaacagaaataacactggaaaggcggaggagggggcacaggtgcactttggtgcggaaaagtttgggaagcattgtttgaaagaagttgatatctttaaatattcagggctagttgctagcaacttactatggctagttgttgaaagctgcagtgagtctgttcattagctagtgggcagcccacatttagaagaatgtaggtgtgagatgggagagactttggcataagaatggttcagatggaatgggaacaccagggggtgattcgatcattaagctttcctctgagaatgtgatttggtatctttgaaactaggccagagatttatttggatctttggttttccatttgtgaagaggtcatttagtctcatttccagatgaagaaatttgggttcagagaggatgggagtgactttccctaagccactgagctgtttggtgaccaaggcaggctggatgctcacctgctttctcgctgctctcttcttactgcagctcacctgtggacttgtggactgggccatcaggagtctctaggaggcagcattgattttgggataggcctacctgggttcaaatcccagctctgacacttaatctgtaacagtgttacattattctgaggattagtgaaaagggaacacttagcatataggaagggctaagtgtatgttcttgcctctttctagttaggcttgaaatctttctttattttatgtacttattattactaagttttctagcacctcccaactcatgaccaaaaagtttcattttcatcttatttttctctttggatgatttttataagggtatttcttatagtttctctatatttaaatactttatactgtctagggtatttaggcaaaggattcaactacagggcttttagaaatcctttccagctctaaaattataggatttaattgtttttgaaaaagatgccttctaccttcctcctcctccagctgcacacgtagtttactggttactgtggtaactgcactctaataatcctgtcaggaaatctgatgcaactatctgtctaatcttattttccagacacaaaacaagcacacggcttccttctaagaatccttctaaagcgctccagcctaagcattgtttcttcttgttctgatgttttttaagattgcacttagagaagaatgcacctcattgggtgtttcctcaatgtggaatgttttatagtatccagtgaccagtgcatcactctaaagcggtgtgtgttttcatgcactctcctggagttgatgaaattttgggtagtttgaattataattttaaaaaatgcagaatagggattagagaggatttaaatttattttgcacatagaggattgaacgtaattactcagagagttagctaaaatcagtatttttgcttttttttttttttttggacaagccagttttacaaaatgtccctctgctgatccatgaacaagggataagtctgtaccttttcatcctccctcccttcttcagccattcaccttccttagtaggggtcaagtgggatccctgtgatgctactcctggcaaggaacctctgtactcccagcctctccaccaatctctacttgaccctcagaagcaatctcatcacacgtcttattcccgtttatgtcagtcaccataggaagcctggactcccgtgtcatctctcactcctgtgtcctgatcctcatttgcctctttacttcagcttttccaatcctgcttccctcccctagggaactcatgaagccccttcactgtgcagtttgtgtgctcaccatcagtcatcagcaaaccccccacttcctcaccttgtctgggagcatgaccttcatctccttgctttattggacacttgggtctctcctggcagtactgcccctccttcagctgtctcaagtggccaccctttttcatctttcccgtacaccatgggtagagctggggtagcctcgtctatgctattttcatagtgctgctcctccttctcctgaaacgccacctcctctgactttcaggtctctgcatggcccactttgcctccttgtcactagtcctctgctcttccacgtggtcattcccctctttctttgaaaaattttgtttctggttcactgtccctgtctccaacactacttctgtgagttctccaggatttcagtccccatgttcactccatcccacggtcatatcttgatcctctcatcaccggtgacttcagtgcctccatcactcactttgaaacatcccactcttatcaccacttcctcttctctcgcaagcctcatgtggtacctccaacctcaatagtccattgatccaccaggtttttcagtccattgaatccatcacgtcttcacggacccacactcaccccatgtcctcacttctccccttccccagcttggagtccacgatcaaccactgtaatctctaccatggcatagatccttatcacccttgacccctcaggcttggtcattcttgcttgactaaatcacagttctggttaaatccttccctctcttcacctgttctgtgcttgcacccatgaggccaaatgtgcttggagaataccacagcaccatattgtttgtctcactctaagctgatcacagatcttaagtgggcccttgatgctacctggcagtctcattgtgtttccactgtctcttcattcccaccactctctcagacaactgttgcatactttctacttgctgttcaaacatccatggtctccttacacttggttgtttcctttttcaccagaaaccccagaaataatcagtagagactgccaccagcacacccaccacctgcctgcgtctgtgcccatgctcccacctccttgggcatgatgttctatctccatctacacgtaccttctcaaggacattgctgtatgaaattttccctccctttcctatgtcatctattttcttctttctacctgattcccactggcatatgagttattatttttcttattaaataaaaacatcctctcttgactctgatttctcttccagctactagccagtttcttttcttgcttttactgcagaacgtttgaatgagtcatctgtatgcattaggtctaacatctcccctcccattctatcctgagcccatcacagtcaagtttgcaccttaactcaccgtacttcactggcattgtgcttttcggggccacgggtagcatttccttgccgaagcccatggtcaggacccactcccttcttacttcatttaccagcagcatttaacagtcagtaagtcccctccatgaaatacattctttacaggactgcttggacacacatgcacctcatttttttggttttcctggtctttctcagtctcctttgctaattccttatcgctccaaactctaagcaaagtgtttcagggtacttgttcctcatcgtgtctactctcagtgctttaaatatcacctgtaagatgacttctgcattcgtatttgtagcctggatctctctcttgaactccagaccccttcatctggctgcctgctggacatctctcctgggatgcgtctaacaggcatttcaaaacataacatgcccaatctccaatctgcttcctccacagtcattcccatctcagttaatagcatcctgctcttccacttacttaagagaagacatttggtgtcattcttttcttttatttcttttttgagacagagtctccctctgttgcccaggcttgagtgcagtggcgtgatttccgctcactgcaacctccacctcccaggttcatgcagttattgtgcctcagcctcctgagtagctgggcttacaggtgcctgccaccacgcccaactaatttttgtatttttagtagagatggggtttcgccatgttggctaggctggtctcaaactcctgacctcaagtgatctgaccaccttggtctcccaaagtgctgggattacaggtgtgagccactgcgcccagtctggtgtcattcttgatttctctttctcacataccccatcagcaaatcctataggctctatcttcaaaacgtatccagagttgatttcttatcacctttattgctatcaccctggtctaagctgccataatttttcacctggattaggagagtatctttctaactggtctttcagcttccagccttatccccttcagtctgttatcagctgtgtgcagattacgtcactcttcttcccatctcattcagagtaaaactgaagtgtttaccgtgactgacaagctgtggtgtgccctagccctccattaccctctggcttcatctcccacttcccgcccacttgcttccttgtttccccctctggtcttgctgtttcttgaaacagtccaggcctgagtctacctcagagctttttgcatttgttcttccctctgcctggaattcccttcagcttcctgtcctttatccatgtcctcatgatcccttatcccactccctcacttccttcaggtctttcttcaaatgtcactttttcagtgaggacttccctggccaccaatcttaactttccacacccctcctgacactttctgtctcctttgcctaatttattattctagtatttagcataatctaatagagtatatgttttgttgatttatcttattccttgtctcttttctctcctactggagtgtaagttccacaaggccagggacctttgttttgctcattgcttattcctggggactagggcgtagtttgtgtcatggtagggtgtcataagtatttgtttaagagaaaaataactatttctggctctaggcacattttggcttaaagtcactgtaaatctgcttgccacaatgcactaataaagctaattattttatttcatgttccctcttaaagtatatttattacaggtgtcaaattaatttaaaagcataatattaggcatgagagaatacaaatagagaagagttcctgcagcttttcatgctgctttaagtgagtcccattcatggtacagttctctctacatgcatttagaaatatgtcagcttatttatttaaatgtatcttgccttattagaaaaacaaaaaagatttaagggggctgtttggaaatgtgatgatgtaaggatggggcaacttaacatgctgtttcaaatgtttagaccgtacattattgatgtcaataatctcctctctaagaggcactgatatctgtctattgtgcagtttgcagcattccatgccaaagcttttgtatttattacttcagttctacctctcttgtttgggaaataatatctccagtcctctaaatgtaagctaatttatattataggcaaaaagcaattgaatggcagtttctcaaagtcaagttaatcacaactacctaaatttagccatgtgatattttaccaacagcccattgatctcctgccccactggctattgcatgtaactataaagcaaaggacagaacccaggcttgtgcactctggtttttctcttagtattttctggtttcccttagtgtcatagttaaccagagtgaagaagattcagagcaattcatatttctgcttcctagtaagttttcaaaaacatttcatttaaagaaatactgtgaaattaacatttttgagtggggtatggttctttgaatttttgaaagatcattttacttggaaattattttagatatatgaaagaatggcaaaggtagtttagaaagttcccatataccctttactcagctttccctaatgttaacatcttatttaactgtagtaaatggattaaaactgagaaatcaacagtaatacaatactattaactaaactgcagactttatgtagatttttaccagtttgtccactaatgtcctttttccatttcaggttctcatccaggatatcatgttttacttattcatttgtcttttagtcttacaatcagtagtagcaccactttcaaacttacatggatagagaaaggaggttaagttaatgctgtggtgaagtcatgagagtgtacagtaagtcctcacttaatgtcatcgatagggtcttggaagctgtgactttaagtgaaacatcatgtaaagaaaccagtttggccacaggctcattgatataaacaacaattaagttcctactgcagatttctagttacaaaagatcatcaaacttctatacaaacacttaaagcacttcttttctttttttttgagatggagtctcactctagggtggagtgcaatggtgcgatcttggcccactgcaacctccgcctcccgggttcaatcgattctcctgcctcagtctcccgagtagctgggattacaggcatgcgccaccacagccggctaattttgtatttttagtagagatggggtttcaccatgttgggcaggctggtctcgaactcctggcctctggtgatccaccctcctcggcctcccaaagtgttgggattacaggcgtgagccactgtgccttgctgttaaacgcgcttctaatcttaaacatagaaataaatgtgagttatacacacatttaagaaagagcaataggctgggcgtgatggctcacgcctgtaatctgagcactttgggaggccgagctgggcggatcacgaggtcaggagatccagaccatcctggccaacatggtgaaaccccatctctactaaaaatacaaaaattagctgggcgtggctgcgtgtgcctgtaatcccagctattcaggaggctgaggcaggagaatcacttgaactcgggaggcagaggttgcagtgagccgagatcgtgcctctgcactccagcctggtgacagagctagactctgtcttaaaaaaataaaaaataaaaataaaaaaatgaaaacaagataattatccaatttttggtgaatcagtgagtgatagcagtcatcttggtgatgggttaaatcaaggagtaaatgtttgcaaagtgaaaattgtagagtcctccctaccatcacgcgttttaaaaacaaatatagtgagcttgctgagtgcttttgtacctcatctttattgttatgtatttgtatgattattgtctacttggtgaatttaaatttgacagtaatttgtattaattccttccttccttcattcatttttcaacttgcttgctttagttcagggttgaaggtggctggagcgtatcctggcaggcagggcgcaaggtgggaaccaactctggacagggctccattccactgcagggtgcacatacacatgcacacacgcattctctcaatcagactgggacagttaggcatgccagtgaacctaatgtgcatggctttgcaatgtaggaggaaacagaaacctggaaaaactcactcagacatggcgaaaacatgcaaactctacaccagacagtggtcccagtcaggaattgatttctttttcttctcatcagtgttattaaccaaatgaaatgacattattcacggacctgctgtataggtttaaggcagatagactgttgggactgggagacattctgatccaggggctacagacgggtggccctgtggggctcatatactgttggaaatgtgatttgaatttgccaaaatttaatgactaaaaggttttccagaaaaatttatgtttgtggcttctctttaaaagattggtagttcccactgcctgaggcctgtgtttaccaccagggatgatcacatggccctgaggcggcccttcaccatgggcaaggatcccaccctcccaatactgccctgatctaaaccagtcccctcattttttttttttttttttttttgagatggagtcttgttctgtggccaggctggagtacagtggtacaatttcggctcactgcaacctccaactccctggttcaagctattctcctgcctcaggctcccgagtagctgggattacaggcacatgccaccacgcccagctaatttttgtaattttagtagagatggggtttcaccatgttggccaagatggtctcgatctcctgacctcgtgatccgcccgccttagcctcctaaagtgctgggattacaggtgtgagccaccacgtccagcctccaccagccccctcatttgataaatggaaatgcctcgggggaccagcacagtggcagaaagccacctcgccttgtctggcctttgtctgctcctctcggtctaagagagagctgggcaggcatggttttggcttctttgggcagcaaagatgatagctgaaagaggatgcagtattaactcccctccaggtctaggcctattcttagtatttttgcttgtgtccctcaaatactagagtttgcagactggtgcccggggctgcatttgctttgtagtcccttcctgtttacctgtatgtggttatctaaagtcttatagttactaatggtaaaaatcaagtgataagcctgaaaatccagatttgtgacttattttgataaatcagatgacctgcagcactggggccaccgtctcaccaggcatgggctcctgggctggggtcaaggctgcctcctcagatgggcacaggctcatttggccctttattctcgtttttggggcccgcctgggttcctgtgggcatttgagtttgcagtgtttgcctcaagttattaggttgaaaatcagagaagccccagtagtttcctgtttgtgtttcttgataatagttattcttgacaaggagttattgaagtaattcctttaaagttcttgaggagagagggaatttggaacagggacttgtaatagaatctgagatgaggtttgccaaaagtcagccatctgatttttgtcttctgtgcccctactggctctccctggatgtgctgtcagttcccttcatgtaacctaaggtttaatgatagacagatattagcttagagtattcccccttttggggcatttttgtttaaacacaacttgaagcacagtatatttaaagaattgagtgtaagctaccatggtggaatttcaggcattcattggatggtatccctgtaatttcatcccagaagtgtgtaagcatagaaacgagagtagagcactccctctttggatcattatagaaacatggaagagattattaaaggggtgttgtatgtatgtgtaactcttaagggtctagatctttgtggccctctatggtagctgctagtcacatatggccaccgagcacttgaaatatgctagtctacattgagatgtgctgtgagtataaaatacactctagatttcaaagacctactgtgaaacaaaggatgtaaaatgtctcattaataattttttatattgattacatgcttaaaggataatgttttggatatatgaggttaaataaaatattattaaaggtactttcatctttttaaaatatgtggctacaagaaaatttaaacttccacacacagcacatattctgtttctattggacagagctgctctagattctgctgtatttgatggtaagaaagggtgagcagcctgttgtctagatcttggtaaaccaaagtacaaagaacaaatgtggagagactgaaaatcgtaaattgttttcacacctcttgcctttaataaagtttattcttaactgctcactttacggtttttggtgcatttagttggatgcgaggttgccttttcacttccttcattgtattcatggtgtggcagtgttacacaatggttcagaacaagggacttgaagtcaaacagttgctacttggaattccagcccagctacttgaccttgggtcaattattttaacctccctgagcctcgttgtcctcctctataaataatggacgatgatgatgcaccccagtgaatgacgattgtggaaaataacatatgtaaagtgcccagtgttatgattattattcctgacaatatgaaaaaaaaaatcttattcagcacttctctgtgctaggagttaagtctgcccccaaaatcaggaaacggctcctttttgcttctgtggtgtgatactgggtctatcagaaaccatttaaaataaatagattttttttctattcactagtttcatggcataggtttttattgtatcagtctctttttgttcctgatgttcaatatttatcaaaacccagcaaggactaaatgtttaagaaaacgtttggcaccttgaattctcacagaagttgaaaacatgtattggatacagtaaaaaaaaaaaaaaaagtattcatctataggtgactacataaatgaccccagataacaggaactggacaatggaggatgggagcagtcacaaaaaccatgccatggggaccatcaacctggtcatcttgctctttctctttgtggttttcaggtacttgtaggatactttttttttttttttgaggtgaggctaaacttttattatgtgtcttccagcttttattatgtgctgtggaacttattaaacttaatatatgactaatgtatataactcaggggaacgtctgtgtaagttaactactagagaaaccttgacaggaaaaatatgaagatagttttgagtggactttatcattctcccttgatcataaaagaattgagacttggaagctgggaacttgggactcagaaggcccactggtggcctgctaacatgtaagagtgcacagattggtaaatgttttttaaagcttatttattttctctgtgtctatgaaagacactacgggtgtcattctctgcttcacactcatgtctcttgtactaaatagaaggcaagtcttatatttcccacttcctgctactttgcttggcagtgacttttcaaataattaaaaaaactgtcttgctggagtagctctctcttacccatggacagtcttgttatatccaaatcagtcagatagtatatgtaagaatgctttgtgagctaaagtcacttaataactacagtcttattactaacctgaccatggctgctggccatgaagctcacttgatttcatccacaggttccagtcaacccctcctgccactacctgttgtaggtgtggatggtgtttctgtgtgtcttctcctgccgccctgcctggatctcagctgctatcttttggccatcacaagcctggctttacccaccaactgtaggtcctggctgtcctgctcaggatatgacagctgctctctagtaagaattctctgattcctgatagatgacccctcttcgtaaattatgattatcttaaataatatgatatctataattgtaataatagaagctaacaactgattgcttactgtgtgctagatgctcttgtaattgatttgttctcttttgagtctcaacaatcctaggagagatgtgttattatccctattattcagatgataaaactgaggtgcagacagggtaaatgctgtcccaaagtctcagattagaacccaggtctatcagagtaggtcttgaggttttaacagtgcttgttttctgatctttgtttatgttgttttcctgatctcttgccatgtgtctaaatatttctagtcttcaaacacaagttctacctctgaagtgacattttcattaaggactctaggctgcatgttatgtgctcttatccccattgctctgagccagctgaaggatgtcttgcttgtctctatggcttagctagccttttataatgtatttttttctgattgtttcttgtgcatcaatcttgattttccaaattttattgttagtacttctaagatgagggcactttgtacgtttctcttagattcttcaacatacttagcatggtagtgagtaagctcattaagaaaaatttatgaactagacatttaagaaacagacatagagaatttgctactgacagtgtctattggctgaccctgtaccattcactacccttttcattttagcttctggagggattagtctaagagtgcttctccgttagaagaagttttgccctgcaggggacatttggcagtgtctagagacagatattttggattttcacaactaggaatggggtgctactggcatctatggggtagaggccagggattctgataatgcacagataaaaatagataatccacagataagaatattgtctggttccaaatgttgatagtgccaaggctgagaaactctggactagaggtagcaatatgatatgttctggtcaattaaatataagtggaagggtctgctgtggctttcttttcttttttgggacagtattttgtctgtcacctaggctagggtgcagtgatgtgatcatagctcactgcagcctgcagttcctggactcaagtgatcctcctgcctcagcttccgagtagctgggactatagttgcgtagcaccacacttgactaattaaatttttttttttttttttttttttttttttgtggagacagggccttgctatattgcccaacatggtcttgaactcctggcctcaagtgatcctccctccttggcttcccaaagtgctgggattacaggagtgagccaccgtacttgccctgctgtggctttctaggaaaattatgcttccatgagagaggattgccccttcatgttttcagcttcttctgctttcaacatgagcttgaacctggaggtagaatatccatgcatcttgtgaccaagagggaacaaacatgaagataaaagtcagcatgctaagggtggtgaagtgaaaagataaaaaatgtttgagttttcttttacttgtaaccaaacacattcctgagctaatagaccacagaaacttgagttgggaaggaattaagcccagcctgacctcatcgaagacttttccaacgtttctggtgacataatccactgctttgggagggagtctaattttgttgcagatctatatccattccaacagttctctcttacagtgagtgaaatttgacccccaaaacttctgcttatagacccagtgtgatgctgacctgagagtcacctggacagtcactcccacactttcatagatgtcagtgaaaagtcatcctgatcaagctggcgagtctactgacagagaccctcttccaaatattctggagggatgtacatctagaatgtaataccctctccttgggtagctctttagagccacagtccaaaggtgaggccattaataaaataaaaagatgtgacctctgggacccccaagccctttggtttcctacataggactttagagtcaacataaatatactagaagcttctgatattataaccacatgaatgagccaagaaggaactctcagtggcttgactgcccttaatctttcctctatgtcttgggctagacaccaggaatactactttcctcctgattacctttattttcaatccagtttacaaataactaagtgcctcaaaacccctcagagtaaggacaggtggctcatgtctgtaatcccagcactttgggaggctgaggctggaggatcgctttaggccaggagtttaagactagcctgggaaacatagggagactctgtctttatgaaaaaagaaaaaaaattaattgggtgtggtggtgtgcacctgctactgcgtagcagtccagagtagttgcgtagtcccagctactctggaggttgaggcgggaggatcacttgaacccagcaatttaaggctgcagtgagttatgatcgcaccactgcaacccagcctgggtgacagagcaagaccctgtttggaaaaagaaaaataaacaaccaaccaaccaaagaaacctctcagaataaatgcctgagagctgtttctgctaaatatctttcaatttaaaattttttaattctggtaaaaagagaaaaccacatgaaatttgtcatcttaaccatttttaattgtgcagttcagtaaagtatattgacattactgtgccacagatctctggaacttttccgtcttgtctgctgactatcttttatggcagtgtagggtgagccatgtctttacacagttgttcattcactgcttgccctgctacttacactcctcctgcaaaatgcccctagcttatagtacaagaaagaggtttctttggctggactttcctccttctaagacttcttttttttttttttttttgagacggagtttcgctctgtcgcccaggccggactgcggactgcagtggcacaatctcggctcactgcaagctccgcttcccgggttcacgccattctcctgcctcagcctcccgagtagctgggactacaggctcccgccactgcgcccggctaattttttgtatttttagtagagacagggtttcaccttgttagccaggatggtctcgatctcctgacctcatgatccacccgcctcggcctcccaaagtgctgggattacaggcgtgagccaccgcgcccggtcctccttctaagacttctgtgtcagccattcagtgagtttgctcaagtcctcttacagtccttaccatttcattagttgaatgcttaagtagaaatgggtttaaaaaaccagagatttggtttaaagagagggaatatctgggagcagcaaggattctaggtgggtagggtgtaaacctcaccaagtaactcagctgaaaatactttctcaatttagtacaaggtcccagcacggaaagatgtacaaggttatttttcctggcgcttctcccttccgtatagcccatatgttagtgcccttagttcttaatgccctctggcagccaagttcttatcttggggagctacatcacaggtgttgggtgctgtttaattttcagctaattgagcttttttgctgctagagtcttgtatggtgttttcttgaattcatgaattagtcattaatttgtgtttagcaggcaggcaccctggcagtctgtggtctgtccagcagaccttcttttggactggacggatgctctttgtgcagtttttagtgaatgatggtgggaaaaacagaatcctcttccagaacccttaaacggcagccttttctttacttccagctcttaccttgcaggtgggtgtgggtcttaacttcagaatggctacttttagtggggttaactattggggtaggatggagactgtgttctgaggctcagcagaagtcattgtgttttttttttttttttggcactctgtaaggtttgaggaaattctgtgatttgaatgaattttttctcaggaggatttacttctaaaataaacgtaattaattagataactggaatttcctaccacttagatggttgttgtcaggttctgtttccttgctacaatttgaaagcacttgaaatttcagattcatgaatttataccacaaaaactcaaaacagttgaaaagtacatagatgctcatgcctgtaagcccagcactttgggaggccgagatgggcagatcacttgaggccgggagttcgagaccaccctggccaacatggcaaaacctcatctctagtaaaaatgcaaaaaaattagccggatgtgttggtacatgcttgtaatctcagctacttggaaggttcaggcatgagaatcacttgaacctgggaagcagaggttgcagtgaaccaagattgtgccactgcactctagcctaggggacagagtgaaattttgtgtcaaaaagaaaacaaaaataaaaaaacacatttttttgagtgttatggagttatgattccaattctttaattttaataagccttgaaaagctgcagtttactccatcatgagtagggataagcttctcagtataaacaacctgtagttctgtggttaatgaaataagaagcttgaactactttcttaagttaaaagtgccttttcagcaagtagatgctcaatgaagttagcacacctatttcaactttaatcaataaggtggaaataatgcagtatggcaggtacattactttcagttgcattttctaggtgtgattatctcagagtttgaaatcgtacattttatgattttatgttagtgcaggatgaatcttttcagttataactgagctggctgtgagcatttagcctgacaggttgggctgcttttcttactggttttgtccgtataaggagtaccacagaagtacctcacacgcattttaaaataacttttcggtaataaaaattaatattggttaagaataaacttagcttatctaatgcgtgggccaaccatttctgagcaaaattgtgagcagagtttgtcttgtgtgttggctgtggtcttaaaaacactagcagacagtgttatgttgactgtaatatttcttctgtagagtaaaagatagatttcatttctgggtgaagcattgtaattggcttatacttttgtttctggtcatattatgtagacagtagaaaagaagtgggaatataaaggtaggagaggtattacttgaatgtgacgcataaaaagtatataagtagacagaaaagaagtgggaatatacaggtaggagaagcattacttttatgtgatgcataaaaaatatatagagttttctattgttttgggggtggggttagaaaacatgctatagataaagaagagtcaaaattagaaaattaagtaagatgtttcctgttatacttaaacattgcaatacttacaaagcatatcataaggtatatataaagtggtcattatgaactttctttacccaggtcaagcaacgcctctaagggggaaaaataatttggtgaatccccatactctatgatagggcatatagagccattttattataaagaagtgatatattgctgaagtgagtactaagtagcaagcagtggaaatgtgtaccatgcatttctgagaaataatgcctgggaatgcactgcaaaacaggtgtacttggtgtatatgcaatttaagtaacataacaacttgagaaggattcaaagatgggaatagctatcatgtgaatgaaggcattgcactgtagaaatatcttactataacaattttattatatgatcattgtggccaagaatactgatcatttagcttagttttagaagctaaatatgaagtatcatcattctatgtacaatgtattctgtggtggttgtgcatttattattgggatcacagcgtgtcttttttctgccaagatggacactgggcaccatggtcacaggcttcttgggtgctactaatagaaggctctctcttggctttctctgttgggcagaagtctgtgaatgccattatagctaagactctcccattctggccaggaaaggaagctggaaggacttggactcactgatttgtgctgacacccattcagccctgccgttggaactctttaatgtgcttttcagtgagctagtgtttcagaacctcatgacagggcaggctgatttctcagatgcatacttctctgacctctggcttcccctagctcactgaggctcgttctgcctgttgatgaggctctcctggcagatttgacactggacccaagagggcagaagaatcagctgttaagctggtacagggctcaaagataaataagaagacactcagcagagcgtaactttgaggcaggcacacaaccacttgggtcagtgtagtatttggggcatgtgggtttgtgtttggaatttgagaggaagcactctgatgatccagcagcctttgtgctccagtgacatgctaatttttttttcctgatattgggattgcgttcccttgactattgcagcagagaaactgaaatgggaatcatttcctgtgggtgcactgatgtgcacagtgggcggaaccgggaaggcaagtcagaggcatttttctcatttctgaatccatgagtctggcttttcccttagggtatttgggccaattgttatagtgtgtcccactgtgtaaattgaaggtttagccaagtctggctgaatggtttagtcttgcaaaaactaaagcactttgtttttaaaaaaggaaaaaaaagtttaactttttttatttttaacatggcattattggactaaatgatgttaggcatgttaacagagtaaaagggagaacttctttctgcagtttggcaggcctgtcacttcacaggtgtatcactgtccaaatgagggatgccagataagacatcattcagcctcccggaggggtgggggagcaggtgtggcacaatacagtcattgttcattgtcttcccgcttacagtattgtaaaacctgcactgcattaaaaatcctattaatagaacattggattaggaagaatacttaggcttctccctccttccatcagttttaaaaggaatttagaaaaatcactatttcttgtatgtatgagtgggggagggaaagaaggaagaaaagagagactgactttgtctttgaaatacagaagagaacatcttgcagtgaggaatgagaatctaaaaagataaccaggcttcttgtaagaaaactttcatagacagttattcagcaggcagatttttaattttcatgtttccagcttgtttagtctgtggggactttgatttctggaagcccactgggatcgctgctaaaccttacatactttttttgttgtatcaaattcagttcaactaccagaaaattttttttggcaattatttttttctctgtcatgttttctgtccaatgagaggagaagactgggatagccaaggcaaatgctgctcaaattattgtgcccaagaggagagatttggccctgtgatactgcagggggactgttgagaaagagtaacagggacatattgggaagtgtgcagcctgggcttcccaactgatgtcttagctaatttgaaatgttgtgattagaccttcccttattcacgttgaggaatgaatatgctgacagccatatgcatgtgattttaggattattaagtgtaatggaatgtccaaaccatcactcagttttacatagcacccttcaagaactagaatgcctgggaaacatggctgtcccagttaagttgaggttttatctgaaacccattttgttttcaaacatgttggaaatgttcctaaaaatgcctgagtgtgctttgggggtgtgcttggtgagtatgctttcctacccttgagtgtttgagacttgttttcattatgttaggggcttatgataaagtcttcattttcagatctttatgtagaagatatatataattgagcagattttgaagtttcgctcaaatcttgtttgtatttaagaatactttttcttattcattattctgattaatttttcttttaaaactggcaacattttgcaggtagtttatggttttgcaaattagaatatgggtcattcctctaaatagaaacagtgtttttggtcttgatgggtctgtgaattaggtgaaactagttttatctttctccttctacttctaggggaaagtctttacctttccccccctgcacactcctcccaccccacccttccaagcttgatctcagcaaattcattgacttccaaaattcatttatatgactttaatcttaagtcatctttatgaaaatggcttatctttaacttactacctgtttcaggaatagttgcaggcagagcttttttcttatttttcttggtatgaaaggctttgtatcctgctaaaggaatttcaggatttatagttataagtagctatatttttagtcatgagctttgctatggtttgaaagtgtccgccaaatttcatgtgttggaaacttaatccccaaatccatatgttggttgcatttggaggtggggcctgtgggatgtaataagggttaaataaggtcatcaggggggttcccattgatgttacaggtggctttataagaagagagacctgagctagcatgctcttgctctctcaccgtatgatgctctctactatgttatgacatagcgggaaggccctcgccagatgcagactcttgagtttgaacttttcagcctccagaactgtaagaaatacatttctttttcaggacccataagacagagcaaaaaataaaaagaaaaaaagaaattaaaaaaagaaagaaaaaattttaaaaaattcttttgaaaaataaattacacagtctgtgatactgtgttatagcaacagaaaatgaactaaggcgggttcccagaacctttataatcacatcagcttgttaactgctgttccacttgtaagcagctccccctcaggccagatattactggcataagtggaaaacctaggcacctgaaagtttctgacagcctttcagaaagttccagaaaggagtgcctttgttttcctcactaagtgagagattaaaaaagaaaatcagtaaaagtcacttcccctaatgcctacagttgtcatcctggaatcacacttttattgaatccaattcagcaaacatttatcgaagaccagctatgtatagttaaaaccactacacgggccgggcgtggtggctcatgcctgtaatcccagtactttgggaggccgaggtgggtggatcacctgaggtccggagtttgagaccagtctggacaacatggtaaaaccctgtctctactaaaattacaaaattatctgggcatggtggcacatgcctgtaatcccagctaattgggaggctgaggcaggggaatcacttgaacccaggaggtggaggttgaggtgagctgagatcgtgctattgcactccagcctgggaaacagagactccgtctcaaaaacaaaacaaaacaaaacaaaaaaaccactacacgagctgtagaaaagcccatttgtttctcttctaaagtatataatggggctgggcacagtggctcacacctgtaatttccacactttgggaggccaaggcaggcacatcacctgaggtcaggagtttgaaaccagcctggccaacatggtgaaacctcgtctctactaaaaatagaaaaattagctgggcatgatggcacatgcctgtaatcccagctactctgggggctgaagcatgagaattgtctgaacctgggaggcggaggttgcagtgagccgagattgcaccactgcaccccagcctgggtgacagagtgagactctgtctccaaaacaaagaaagaaaagaaagaaagaaagcacacagtgggtgaagaaagtactcactactcaggtagtgagtacctgaccaatgtagaatgacttttaaaattccagacttgggagcatttctcaggatgccagtaggtattaaaaattatttttgaccaagtaaatttggagaaagatgggttaagtgaagttggatagggattttcttttttatcggtgcttccaaagggggatggtatatgcagcatttcccaaatttatttgaccagggaccatgtatttatttatttaggagcagctcagaggactagtgttccatggagaacactgtgacaaaggctgttctacaccacggaagatttttttcctctctctcttttagagggctcttttattttggtgtatacatgtttattattcagagccagcaaactctgtaactttctccattggttatataaaaagtgttagcattttccttggatatttgtgaggttttgaagggccgggataatgaccgttgagtgagctcttacttggtgccagctacattgctgagcatttcctctagagtctcattagtgggaagtacaaattagcagttctgctttttaggtgagaggataacttgaccaatatgcaatttatgcatcatttccaacatgccagacattttaaggtgaagagattttaaaaatcatgtatagttttatatatagattcatatatagttgtaagaagttatacagagtgattctgtgtccctttcacccagtttctcccaatggtaacgtgttgcctaacagtattacagtatcacaatcaggcagttaacactgattcagtgatcaacactttaacactttttagatttttttcttcctttctctcttctcttctctctcgtttctttctttttttgagacagggtctcgctctgttgcccaggctggactacagtagcaatatcatggttcagcacagccttgacctcctgggttcaagcgatcctccctcctcagcctcccatgtagctagctatgaccacaggcatgcactaccatacccataatttaaaaaaaaatgtgtagagatggggtctcactatgttgcctcggctggtcttgaactcctgggctcaagtgaccctcctgcctggcctcccagagtgttgggattacagacatgagccaccatgccctgccattttttagatttcataggttttacacacattctttttgtgtgtgtgtacatttagttctatgcagtttttcacatgtgaaaatttgtgtgaccaccaccgcagttaagatacagaacagttccatcacaaggatcccaaatggtatgcctttataaccatagccaactctctccttctttataattttgtcattttaagtagtctctataaatggaactatacaacatgtaaccttttgagattggctttttaacatcctagctgcttttaatccactgttgccaatttctatagcaatcctatatggattcttttttctttttcttcttttttttgagacagagtttctgtcttgtcacccagactggagtgcagtggcgcgatcttggctcactgcgacctccgtctcccgggttcaaatgattctcctgcctcagcttcctgagtagctggtgttacaagtgcccgccaccacgcccggctaattttttgtatttttagtagagatggggtttcgccatgttggccaggcttgtcttgaactcctgagctcaggtgatccatccgcctcggcctcccaaagtgctggggtgaattcctttaagtagatgaggaagtgaaaccccggaagagtacagtgtcatgcccaaagctatattattagtggaccaggaagcgaggaggggcccaagcatccctgattctcagccttgactcctttcactcagcgttggcctttctctatctggattcccagtgttcatattctgtttctaccaacacagttctccttttctcttcctctgtactcaaaataaagtctctcttgttttttataaatcttaaattttaaaaaagaagcttggatcacattattattttggaagtgcagagattggatattttttccgtccagctctattttggtcttgttaccattttcagtgttttctgtgctgagttgcttcaccaccttgatgctgccacaaatgatgaggatggttgtagtatagagaataaaggtggagattcttgcacatcatttcttgaatccatgtataggcatctttggcttgcagcccatctgagtgctgtattcagcctactagctctggttgctctggtgctaaacatattcccagcgcctttgggacttaactcactacaggcaagaagctgtcagtgcactgagggatggtgggaaagcaaaatgcatacatttctatttatcgcagtagtgccagatgctgtatatttaagaaaaaaacttccagtattggagaagaattgccgtccgcccccctcactttatttatttatttttttaaacagggtctgggtctgtcacccagactggagtgttttgttgcaatctcagcccactgcaaccttcacttcccgggctcaagtgattctcctgcctcaacctcctgagtagctgggactataggcatgtgccactgtacctggctcattttcttttttagtagagatggggttttgccatgttgcctaggatggcctcgaactcttgagttcaagcgatccgcctgttttggcattccaaaatgctaggattacaggtgtacaagtgtgagccaccatgcctgaccataagccttttgaaagctgtacttttgaaatgtatgtgggatgtagtatttaagaagattaggaaacagcaaaatgtgtagatttttgttgatcattgaaccgcctagacattctcttctttcagtgtccatttacgtatgtatgtattatgtatttagagacagtgtcttgctctgttgctcaggctggagtacagtggcactatcacagctccctggaacctcgaactgggttcacaacctcccatttcagcctcccaaatagctaggattacaagtgtgtactaccatgcctggctaattaaaaaaaaaaaaaattgtagagatgtgctctcactgtgttgcccaggctgatcttaaactcctagcctcaagcagtccttccatcttggcctctcaaagtgctgggattacaggcatgagccaccatacatggcctttcagtgtctttgaactagctattccctctgcctggaaaactttcctaagatttccatgcagtttggggcacttcctcaccttcttcaaatctctgtacaatgttaccttttttctgtgtctgtgcctgacatttaaaattgtaacacctcaccctcaccccattctgctttacttttctccatcacactttgatcagctttgaacatgcccctatgtcttcgttatgtatctatgcattgttttctctttcctagaatgtaaacctcctgaaggcagggatttttgcctattttgctcactgctgtatatccaaccttttagaatagtgcctggcacatactagatctcattatacattatacaagtaaatgaaagttttcaagattaaagatttgtatgaattaagttaagtaacagcaccctcttacaggacacaagagaataatcatgtctgtacaggttggcccctggtaagatgctcatttaaaaatggttgtgtcagtttaatataagtgtgttcttttcttgcctacttaaaatgtatttctaactatgacttttcttttggaaaatgattgactttgggggagctctttcagaggtaaaggaagttaactagcagatctaggtaactgaaccttgtgtactattctagaaatgtttatacttctgccaaattgaagcatgagttcagtgtttgcataaccacctgtgcagttactcatagtagcattccagtatgcatttgctgaactatactcttcaattttgcaataaaagtattttcacatgttggctgctactgtgaaaattggtttctctcaaatgttcggaaagcttgtgctgcagttttgatgtggggggtgtggtttagtgctgcataacatttacttttttggtggaagggggatctgtgatgtaaacttttggtttcaatttctctatttggagctctttttgttagtgctaagaattctgagggtatccctatagatgctggttaaaaaacaaacaaagcaatgttgtcattgacagtttggtcaagtgggatgtaagctgctgagtggggtgaagacctggtctccttggggctgatttggggtttgggagtggtttggagggtggctgccattgaggagcaggaagtgtgggggttgctgctgtgtctggaaggacctcctaggggagagctagcaaaccaacatcaccagtgcccccagaacactcagctgtgtgtgatgtggctgtgtgtgcccttgctggtactcagtcctgttaaggcttgaagaggaaggtaaggagggtaagacttggagagggaagagttaaggagggagaatattaatgcagtaaggaagtaattcatattttgagacaggttcccatgtgtgaacacttgacttccaaacagcccacacttggcttcattatctacagaccacctctcctgtgctgcattcagactctcccccaaaccccgacggagcctcggtctgtcgcctaggctggagtgcagtggcatgatctcggctcactgcagcttctgcctcccaggttcaaatgattttcctgcctcagtctcccgaatagctgggatttacaggcacatgccaccatacccggctgatttttgcatttttagtagaaatgaggtttccccatgttggccaggctggtcacaaactcctgacctcaagtgatctgcctgccttgacctcccaaagtgttgggattacaggcgtgagccaccgcacccggctgcattcagacctttccacgtcagctgaactatcagtaaaattctgagcacaactctgagagaaattcagagttcaaatcagttggtatgccagaagcagagaaccctgatccttactggagttgactaggacaccttctctttattagttaaaggtatggctaaatttaaataactaatagaggtcagacacgacttacttagtttctgagagtagttgttaactgtccttttcccaagggaaataagctaagctgaattacttaaaccacactttttccgtttcttaaaatgatttccatttccctgccctaggaaaagtaggcggctgcagagaggttgtgacagaattataaagctatttgagttaaattagcccagtacatcactcttagagcacattgaacagacagctaacacctcctgataagcaccagctacatacagatcaatgttttcaaatgaaaccaaagacatacattcaatttagggagacaaaacagacattactcaggaatctcatagaaccccagatgattatgatataaccaataacataagacccacctgattggcagttctgtgaatcaccctaaaatctctactaaaatggttaagtcctgtactctttactctggagtcctcttgtctacctttcagaaatggttgaaatatttagatgtggaattaatgagattttacatgtctacactcttgctttatatattttaatgtgataaatggcctcatgtatgtatattcttccttgtcccagactcatgttttttgagtaaaatctttaattggtcaaaatgtgttgtattgatcagtatgttatatagaatgatgtacttattgatttactgtaaataattacagtggagcaattctgttaggagggttcgtttttgccattttagcaaggaaaatttgccagttattttggctgaatttaaaaccccttacatgattagatcacatgtctatttctgctgtaatagaggagtgtaagtaactaagtttatctgaacttttaggagtctccttttaggctcaaattagttagtctggtgtctatacagggcctttgttaaagactggatttaaatattgggtggatctgtcttggatcctgttctagggaacgcttcttggaagtcccagacggggaactcatcataacctggttttaccccgtagcatggccctgtgccatcgacaccattagagcaaggctcagtgtctcgagctttagtttaattctcaacccattgatcgctcttgcagtcagcttaacagttgaatgcaatgctgtattttgttttttttttttttttttaaagctagtccagaaattaccacagctgcttctcagttaatcagatgcttaagactcccgtttccacattgcttggctgctacatttttataacaccacagctgtctggatctagcttgtgcccctcgccccccttacccctttccatctgccacctctcaccacttcctcacttgctatgtatcgaggtggcaaattcccaagtaaactgctgactttcctcccctgcaggaaggctgggcctttggttcacagtagcctctttcaccagaactctcgtaggctaggaaccaaccctggagtactgctgctctcagaagtgcccacatttgcctctggagcttgctttgtgtgtttgggtgttgaattttccccttgacttggaaacttttgtgaagaaactgaaaggtgctttcagattaagcagctgtggctcccccttccagccacgctctttgtttttaaagctcaaagtcttatttgaagtgaggagagaaggtaggtaggttgcagtccaggtttttctgtttgtgaatgacgttgcttaccttggctgattccttttcctaatgacggtgcttctactcttggccttttgccatgtgtgtaccatccactgggagctgttttcccttgtcctttaaagcgtatccgactctatctccagtgctcttctagcaagctgttacagtaagcataaaaacaagcgcattaaactaggaataaaatgccaagtttctgtctccttgccaacctcattagaaaacagtgataaagtatgtatgcatataattacagtaattaaacatttgaaaccagctcaatagggaaccttcttaatgcttttatgagtgtgatattttcatttcagaactggactctgtgtggcttctattttattcaagaccttcatctttatgggggtaggcgggggaaggtgctccttttgaccacagcgccaagcatctgcaagagtagctttattacacatgtattagcagggaacagagcaacctttccatcactgtgtttatttttgagggtgtgtagccagttgtcaaatataaagacatgaatggcctggctagtaaagaagacgtggaaaataattgtaaactgtctgccatgatgtgcttgctcttaagagcaaaggacaggaatattttgtcttttgtactgccccgacggagtcatacagcccctgcatttgtgtgggatgatagagtagcactatggggtttgtctgcctcgtagctcttccaccctgagagctattctcacttaggaagtggaaagtctaaaggaccaactgtaggttgaaccaggagtttcattcactaaacatattttttttttagttgatatatatatatgtaaaatttcaatagcttttgaggtacaaatggtttttggttacacggacaaattgtatagtggtgaagtctgcgattttagtgcacccatcatctgtgtatattgtacccaatatgtagcttttttttatccctcatctctctcctcccctcccctcttctgagtcaccaaagttcgctaaatgactctgtatgcttttgtgtacccatagtttagctcccacttataagtgagaacatacggtatttggttttccattcctgagttacttcacgtagaataatggcctccagctccatccaaattgctgtgaaagatatttcattctgttttatgtctgagtagtattccatagtgtatatagaccacattttctttatccattcatcagttgatgggcacttaggttggttctgtatctttgcaattgtgaatggtgctgtgatgtgtgcacgtgtctttttgatagaattacctcttttccttttagtagttgcccagtagtgagattgctggatggaatggtatctttactttcagttctttaaggaatcttcatgctgttttccatagaggttgtactaatttacattcccaccagcagtgtataagtaagtgttctctttttaccacatccatgccaacatctattgtattttacctttttagtaatggccattctggctggggtaaggtggtatcttgttgtggttttaatttgcatttccctgatgatcagtgatgttgaacattgttttgtatatttgttggccatttgtatatcttcttttgagaaatgtctattcatgtcatttgcccactttttgatgggattatttggtttgttttcttgctaatttatttgagttacttgtagattgtgggtattagttctttgtaggatgcatagtttgcaaatattttctcctactctgtgggtcatctgtttactctgatggtgatttgctgtgcagaagctttttagtttaattaggttctatttatttatttttgtttttcttgcatttgcttttggggtcttagtcataaattctttacctagaccaatgtccagaagtttttcctaggttgtctactgtaattggtttcagctcttagatgtaagtctttgatccatcttgagttgatttttgtatatggtgagagatagggatccagtttcattcttatacatgtggctatccagttttttcagcaccatttgttgaatatggtgtcctttctccaatttatgtttttgtatactttgtcaaagatcaattgtggttgtaagtatttggttttattactgtgttctctgttctgttacattggtctatgtatctacttttatacctataccgtgctgttttggtaactataaccttgtagtataatttgaagttaggtaatgtgatgccttcatgtttgttctttttgcttaggattgttttggctattcaggttctttttggttccatatgaatttttttttctaattctgtgaaaaatgatgttagtattttgatagaagttgcattgaatctctagattgctttgggtagtatggccattttcatgaaattgattcttccaattcatgaggatgggatattttttccatttgtttgtattatctttgatttccttcagcagtgttttgtcgttcttgaagagatttttcacctccttgttaagtatatttctaggtaatttattttatttttgctgttattataaaagggattgagttcttgatttgattctgaatttgattgttgttggtgtatggcagtactactgatttgtgtacattgattttgtaacctgagacttcactgagttcatttatcaaatctaggagtcttttggaggagtctttagggttttctaggtatataatcataccactggcaaacagagatagtgtaatttactcttttccaatttggataccctttatttttctctcttgcctgattgctctgactagggctcctggtgctatgttgaatagaagtagtgaaagtgggcatccttgtcttgttccagttctgaagggcaatggtttcaacttttccccttcagtatgatgttggctgtgagtctgtcatacatggcttttattattttgaactatattccttctatccctagtttgttgagaatttttatcataaagggatgctggattttatcgaatgctttttctgcatctattaagatgatcaatagatttttgtgtttttaaaaaattctgtttatatgatgtttcacatttattgacttgcatttgttaaatcatccctacatcctggatgaaacccacttgatcatggtgaattatctttttgatgtgctgttggattcagtttgctagtattttgttgaggatttttacatctttgttgattcaagggtattgttctgtagttttctttgtcttttttttttctgttatatcctttcctggttttggtatcagggtgatattggtgtcatagaataagttatagaggatgccctctttctcaaccttttggaatagtttcagcagattggtaccaatttttctttgaatgtctggtacaattcagctgtgaatctatctggccttcggctttttttttttttttttggtctgttcaggatttctatttcttcctgattcaagctaggaagattgtatgtttccaggaatttgtccatttcctgtagattttctagtttgtttgcatggaggtgttcatagcagtcttgaatgatcttttgtatttcttttggttataatgtctcaattttcatctctctctctctcttttttttttttttgacagagtctcgctttatcaccaggctgaagtgcagtggtgcgatcatggctcactgcaacctccacctccctggttcaagcgattctcctgcctcagccttccgagtagctgggattacaggcatgcgccactatgcctggctaatttttttgtatttttagtagacgtggggtttcaccatgttggccagaatggtctcgatctcctgacctcgtgatccgtctgcctcagcctcccaaatgctgggattacaggcctgagccactgtgcccggcctccattttcatttctaattgagcttacttgaatcttttcctggttaatctagctaatcatctatcgattttgtttatcttttcaaaaaaccaagctttcgtttccttgatgtattttttgtttgtttgtttcagtttcatttagttctgctctaatgaaaaggtctttgttatttctttcattctgctagctttgggtttggtttgttcttgtttctctagctccttgaggtatgatgttagattgtaagtttgtgatctttcatactttttgatgtaggcatttagtgctataaacttaactcatagcactgctcttgctgtatcccagaggttttgatgatgtgtatcactattattcattttgaaatatttcttaatatccatcttgatttcattgttcacctaaaagtcatacaggagtaggttaatttctatgtatttgtatagttttgggaattccttttggagatgatttctagttttattccactgtggtctgagaagatacttggtatgattttgattttttaaaatttatcaaggcttgttttgtggcctatcatatgatgtgtcttggagaatggtccatgttctgatgagaagaacgtatattttgcagttcttgggtgggatattctgtgactatattaggtccatttgttctagagtatagtttaaggttgatgtttcttagttgactttcttccttgatgatctgtgtggtgctgttagaggagtattgaagtctgcactattattgtgttgctatttcttttcttaggtcgtgtagtaattgttttatgaatctggagttcaagacttaggtgcatgtatatctaggattgtaatatcatcttgttcgattgatccttttattattatataatggcattttttgtctttttttactgttgttgttttaaagtctgttttatctgatgtaggcatagcttttcctgctcacttttggttctcatttacatggaatatctttttccaccactttacctggagtctataagaatcctttcatgttaggtgattctcttgaagacagcagatattcgatttgtaactttttatccattctgccaaagtatatcttttaaatggagtatttaatctcaagatgcaaggtactgttcagttatgttgattgttacataggtacttagttttcttcattgtattattgttgataagtcctataagttttatgctttctagaggttctattctggtgcatatcaaccttttgattcaagattaataactccttttagtatttcttgtagggttggtctggtagtgacacattccctcagcatttgcttctctgaaaaagactccttcatttgtaacacttagtcttgctggataaaaaatgattggctgacagttattctgtttgaagaggctaaagataggactccaatcccttctggcttgtaaggtttctgcggagaagtctgctgttagtctggtatgttttcccctgtaggttacctgatacttttgtctcactactcttagaattctttccttcatgtttactttagatagcctgatgactgtatgccttgatggtgtcctttttgcagtgaatctcccaggaattatttatgcttcttgcatttggttacctaaatctccagcaaggccagggaaatttttctcacctattttctcaaataagtttcccaaattttttgctttctcttctccttcagtaacaccattgattctaaggcttgactgttttacataatctcatatttcttggagactttgttcatttcttttaattcttctttatttttgtctgggttaatttgaaaggcttatcttcaagctctgaaattcttttttctacttgttctagtctagcgttaaaactttctactatattttgcaatttcctaagtgtatctttaatttccagaagttcggattggtttttcttcagaatatctgtctctttagaaaattttttgttcatactgtgaattgttttttcaatttctttatgctgatttttacctctgtcttgtatttccttgaacagctttaatagtccaccttttgaattctttatctggtatttcaaagatttcatcttggtttggatccattgcagaagagctagtgtgatcttttggggttgttatagaaccccgttttgtcatattgccagaattattattattattttttgagatggagttttgttcttgtcacccaggctggagtgcaatggcacgatcttggctcactgcaacctctgcctcctgggttcaagggattctgctgcctcagccttgcgagtagctgggcttacggtgcccaccaccatgcccagctaatttttgtatttttaatagagatggggtttcaccatgttggccaggctgatctcgaacttcctacctcaggtgatctgtctgcctcagcctcccaaagtgctgggattataggcatgagccaccgtatctggctgccagaattatttttctagttccctctaatttgggtaggctattctaattattcttgaatttatttttgatttgacttaaaaattttttttctcccttgaggatgtgactttatcgtttattgtaggctaattcagctcttggtgctttcagggatgaagactgtgtatgacttccttggttatagagagtctttgtatgacagctttcttagatgctggttgtagtagcatagtgcttggtttgtgagcaggttcattgtctcctgtgggattggaattgcgaggtctcttaaagcttatctcattgcactttttaattaattaatttttttctgcagtattttatttactgagttgaacagcttaggcttcaggccagtaggagagatgtccatgggtaaaaatcagttgtggctaaagcaggttggtaaatgcaatactcagtggtgggcagaggtcccagccttgatagaagcagctggggcagctctcagtgaaatgcactgaggtcttttcaagggaaagggaagaagccacctcagcttccctgctaggccagcaggaaagtgatccaccttccaattacactcctgacccagagttccagctattctgatcaggcacctcttttcatctgcaggaatgttgatgttcaacatagaaagggattgtgactgtacccctcatccaagcttgaacctaggggacatgcattctctgtggatgcagttaccctgaagtattccagaaaggctgtctacaggtgcatccatgctgagctcccatgggggaagcctcagctatgtcgatagtggatgaagaggagaagaaatcaccttctccaagacccttcatgggcaccagggctgactggctgttggggtagagccacagacgttttctgctgagccaagcattgcaactgtgcctctgctaaaagaaacttcccagaaatgggaagttctgggacttaaggcctgccatcttgtgttttttgtttcatggagtgctcccttgatgtcatgtacttcttcttcccttaggagtagaaatccctgaagtccagactactgtgaatgcaactcttatctgggtctagctgcctagtggggctgccacactccagggtggtgctgggggatgtctccaaggaatccagtgatgtgacctgtcctcaagtatcccagcagtgggtaccagcaccagttctgatggggatggcaggggagtgctgtgagattccttggtcatgaaaagccttagtgtgttggttttctcaagtactggttgtagtagtagatgaactggtcacatggacagactcaggatctcttggttagccagggtgttgcaggcaatagtgattgctgaggtcacacatgacttttctccttcctgcatgttgtcttcttctgcctgaagatgctaatctcctatgtcagttggcctccaaccagaaggtggtgcttgcaaaagagtaccagctgtggtggtggtaggatttatgctttgccttatgtacccaggggaagtactctggtgtctcaggcaattggtggggctatagagctccgaaaagtttctgttctttttattaagctaccagggtaggattgaggggcaaagccaggtgagggctgggtcaggcaagtctgtgctctagctctccatatgtgggcaaaagtagaggtcccagtggggatcagaaggcagttttctgactgctggggtatattgaaggaaaaagcacagctgcttctgctgcaccaaagagtctgcatggagaatggggagtagcaggtagcagcaagccctacgcagctttcatgcacttggcaaggcaaatctcatagccacagtgtaccactagcagcagctagctgggtttcagacagttgacactcagaactcaaaactgccccaggccattagcctttgcatggccttcaggccacatttctcttggtctccctacacagcaggggcacccctgtgctctcttatggctgcagcacacttcccacttgcccctcagttctggccaagggagcttgttcccactcatatcgtgaatctcagttgagcttctctcaacctgtgattgctgtctgagttagctggctgacttccacaaggtcccctgtgaggtaggatcagcagtggcttccctctgtccttgctggagactgggagtgcactgaaagcatgtccagtgctactccttctcatatactccccacggctcactgaatcagctttagtgctgggtagggttgagggcttcccttgtggcctggattgccaggttccccagtaggagtgcatatcctagaggtagtttatcctcctctcacactctagggacttagagttttccatctgcctcgtagtaagtttctgggttttttcctgaaaaaaaaattcacagtgtgaatctctccacactattttgtctttccaagtggtagaggcatgctcacagtgcctccaatccactctcttggggattaaaaaaaaaaaaacaggtgttattgggtacctttggggtgagagttagtgtacaatttagggacactattcttggaaccagacagaccttggtcagactcctggctcagtcattttctggttgtatggaccacagcaaatttaaaactttaaatctcggttttctcatctgtaaaactaaaataatggtggtcacacatacccataagattattttgagacttaaataagataatgcatacaaagcatttagcacaaagtttgactcagtaggtgctatttggtgttcatgccattattagctttgtattaaagaggtatatattgtcctatcttctaggagcttacagtccagtagggccataagatacatattgaggaaagaaagggggatgtcagcctgctgtgatgtgttgggagagactttcttgaggagttgggattggggccactgtgttgtacaatgccagggaacaccatttacatcatctttgagaatgggtccctctggagtagtacagttgcactgcttggaattttgaatgtgaccatgaaggatgtgtagaatttggatagatggaagaaggaggggtttgggtttggtaggaaaaaacaagattctttcagaggatggtgagacctctcagctggccagagagctttttgcattgagcagaggtagtcaggctgtgtgtcttgaggtggctccagggctttgcttctttctgatcactaaaaggtggatggaatgaaccttctggtgaaatgggtacaggtcagggtgaaatgcctttgatctcttcacattgccttccttgagtctcctcaggggccgggattgctatatttccaaaagggcacttttctgtgaatagccttttagcctggttaagtaaaccaaaaggctcacttgctttttctgccatttctttttctttaacattacttgtaactcattttgttaaataccacatttactcaatatgtgaagtgatcaagatgttgtatgtgtgaccctgtaccctggttctactttgtatagccttacatttcttttgaacttctttatgcactttttttctttccttttcttacctccatggaatttattctgctctttaaggactctcaaaggcatagtagatcatggcataaattaggtggcaagaaaggattttctttatcattaggcttctattcttctaaagctgtgtctttgggagattttaattgtgaggatgtaaataaagccatatggaccaaaagtgaatagcatatttaattatcttgtaaataactttagcttagtaaatctccgacgttattttaaaaacacagtattttattgggtatttagtattatatgatactctaaagcagaagtcaccaaacttttactctaaagggccagatagcaaatattttaggcttgcaggccgattctctgttgtagatactcagttctgccatggtagtgtgaaagcagccatagaaagtatacaaactgatggaggtggttattttgcattaaaactttatttaaagcaatagacagtgggtcagatttggctctctggagtggtttgctgacccttgccgtcaaggaaatagaaagagattttgttgggttgggaaggtaaatggaaaattacaggaattacaaaatttccagataatgaactctacaaaaaactaaaaaaaacttatacctcctattgtttgaattagatttcatgtttgatatgaatttgtaaataaatcccaaatatctttattgatagttcttcctttttaaaatctaaggacttggttcacaacaggcctgtctttattaatcaaccatttattgttttctttgcaccaggcactgtgtaggtcattggaaatttacaaataacttagacacgcatttttcctttaaggagccacagtctagactgtgtactcttttttgccagatgtggactcatgccttggaccacatgaaatatttgctctaaagtagcaagaaacctgcattggaaaagggactttttgagggtacacctatctttttttctctttctactatatgtgtgttaggactgctatattttcgtttctctttattgttgtattgttagagaaagtctgctagaatttataaatggtgagaatattttgataacttagttgccaaaattcctagtcttgattccagaggttgtgttttcctgccctttaaaattttcacttagtcaccttaattcagtttttgaatttctttgagttctgcctatcaaattataaacaagcaccaccaaattgcagaaggttatctcttaatagtattgaaataggcagttataaaaaattgtgtcacctaagtctaacagctcttctagaatgttttcctttagacctaagccattctggcccttgcacattgggtgggtctgtgatctgtttctactcacaacacttctgacacaaatggctggattttttccacaccaacaaccaattcttcgactctgacactacccagagttagcacagaccccacagattatgggcttagacccacaagactcttctccactttagatgccagttgtaagtccaggtctcctatacttctgaccaagagatgataaatcttgagtttctatgagccccactctttgggttcagtaattctctataaaggctcacagaactcacgaagtcactttacttcctattactggtttgttatagaagttacaacccaggaacagccaaatggaagacatgcacaggacaaggtatagaggaagggcattgccctctctagatgcccaccctcctagcacctttgtgtgttcaccaatccagaagctctttgaactctttaacttagaggttttatggcgtttccattacatagtcatggttgactacatcactggtcattggtgattagttcaatctccatcccttcttccctccccagaaatggggcaggggctgaaagttcattcctcaaatttcgtggttggttcccctggcaaccaccagccctcatcctgaagctctctaggggcccaccaagagtcatcacatttgcctaaactcaagtatgattgaaaatgggctataataatgaacaagagacactcttctcattcctattgcccaggagattccaaaggttttagaaactctgtgctaggaactgggaatgaagaacttatttttatttttttaagacagagtctcactctgtcacccaggctggagtgcagtggctcaatctcagctcattgcaacctccgcctttctggttaaagcgattctcatgcctcagtctcctgagtagctgggattacaggtgtacgtcaccacgtctggctaatttttgtatttttagtagagatggggtttcatcatgttggccaggctggtcttaaactcctgactccagttgtgtccggagttggttccttccagtgggttcttggtctcactgacttcaagaatgaagccgcggacctttgcggtgagtgttacagctcttaaaggtggcacggagccaaagagtgagcagcagcaagatttattgtgaagagcgaaagaacaaagcttccacagtgtggaaggggacccgagtgggttgctgctgttggctgggggtggccagcttttattcccttatttgtccccgcctatgtcctgctgattggtacattttacagagtgctgattggtgcatttacaatcctttagacacagagtgctgattggtgcgtttttacagagtgctgattggtgcatttacaatcctttggcaagacacagggcgctcattggtgcatttttacagagtgctgattgatgcatttacaatcctttagctagacacagggcgctgattggtgcgtttacaattctctacctagacagaaaagttctccaagtccccactcgacccaggaagttcagctggcttcacctctcacaagtgatctgcctgcctgggcctcccaaagtgctgggattacaggcatgagccacaatgcctggccttatatttcttattatatcataaaatcacagtggagttggatgggggtgagggagggcagtctgtgaaagagagaggttctgaagtccaaatgagggcagaatgtggacttctctggccctgaggagtgggttgggttgagtactatggggtgatttgattggacaggttctgatgagtctggtagtgggtacctcaggagccatgaggacatttaaatgtcacagtgtcacagaaaacatagaagattgttccctaacttgggtagtggcatgagaaagtgggtctgttgttgggaataaggtaggctcggatggtggtttttgagggtgccaagaaatgtctttataaggtttcaaatgtacatagatgtagaaggaagaatggtgccattctaaagtttttttgaagtgaaaaacaaaaataatatattttaaagatacaaataatttccataaacatataacaatccatagagaagagggtaatgtccttctggtgacattaattgaaatactttatgccagattggacaaaatctatgtttaaattactggtattagtattttggtattttccctttagtaagataatcttgataaccttgatttgctttttgtgtcctgattaccttgacattaatatcttgaaatagaaaaactgtggttcttgctttggtagtacatatactaaaactagaacaataaagacattaacatggcccctgtcgaaggatgacatgcaaatttgtgaaatgtttcatattttttaaaacaaaattatggcttgtatatttttaaaactttgtattatgcaaaacttcttgagaacaaataattatgggaacttttaaatacatgcaaaaatagaataggataataaacttcccatctacattttatttatttatttatttaatttttgaggtggagtctcgctctgtcgcccaggctagagtgcagtggtgtgatcttggctcactgcaacctccacctcctgggttcaagcaattctccctgcctcagcctcctgagtagctgggattacaggcatttgccaccatccccgggtaatttttgtatttttagtagacatggggtttcacatgtttgccaggcaggtctcgaactcctgacctcaagcgctccgcccaccttggcctcctaaagtgctgggattacaggcgtgagccaccgcgcccggctggtttttaagacatgaaatttcagaatgtttgttttcaagaaagaaagcccaattgcctcaatgctttatttgaggacagagcctgaggcacaggagaatagcacggtgggacattactggcaccattgccaacacagctcacacgcagcaacagcacgttttgttggttttgccagcgttgatgctcagatccctctgtggccaccaatagccagcacctgtgtcaaaggtggctgcctcaattaagacacaaaccaaaaattctaattatatagtagtttctgtagtatcagccacgtgtacaataggtactcaggtgtcatttgctttttcttctaccacaagagtggccttggactcgtgtgtccgttgggtgatggttgaggttgctctgagccagtcccctcccctggtccactcagtggaagctgtgtatgcccacatggcactgtatggacaccagtttgtgtttttttaacaaacattgctatttttagatttgctttcagaatgcgacctatggggcagaggacccagaaatatatagcttctacctcattgcctcgttctcagggatatccaagcctcactgccttgagaaattaagagacagttccagcaggtactgtcttacttgatgactataaattctataatcattgctaataatagagtgttttgttcaagccgcttaaatttgtttattttttcctctcggcaagcctaacatcatcatcctcaaaagcatggttgcctgtgaatttccttttggatagatgtaacactatttaatttcgcccatccattcatctatccaagcatccagcaaacatttatcgagtacctattatgtgctgagtactcttttagatgctggagggacaatgattaataagataatctttctttacagagttcacattcggtgagagaggaaagttggacattaaaacagatagtaatgtggtgagctaagtgcagctataaagttatgtacaacttatcaggagaaccgttatctaaggcatccagttcacagaagggaggagggaacaccatgtaggcaaggggaatttcactattattgccatatatccaaggccaagagtggtgagagaatgggctggagatgtaacaaaggtgctctgtgacagagtttgaacttcagtttgctggtgaggtgtggggaagtctatgaacgggattcgaacagttgagtggcatgattatatttgtgttctagaagaatccctctggtggctctgtgcaatgtggttttcagggagtgaggactggagacagagtagataagtgagaatgctgaggggcctaatgattcgttcatgcatttcatttagtaaacatttattgagcacttactatggaccatgccctgttatagtcatttggaatttattttcacatagataaacagaagagataaatagtagtagcttttttgggataaatagataccaaataaatcacagtgttcgctttgatcatgacaaacttttgaatacatgttttctagagttatatattgatttggtggtatttttattttggatttggatcagtcagcactaacataaaaaatggcctctttcatggtgcaaattagtaaggcttcactttcagctcttgaatttttccaagactcattattccagtctgtagattattctgagccttagactctcattttctgctcattagcacctcaaagaatggagaggaaggaagagagagaaacttcagtctgacttgctacttgttagaagatttggtaaagaaggtgatgaaattaatatttagttttcaaaatcaggttacagattgtttttgggcttgttcttgcctgcagttcttgctttctctcaaccatagctaacttgctgtctggatacatccgagtgtatttgcctcatgcacaatgaagggtaggattaaccttggaaatttgctgtgggcaaatagcccaagaattaatacatttaataatacatttaattattttaccaatcacactggttatttgcagtgtcaaagcagttaccttggtatgatataaggacatggaattaattttgttgtttataatctttgtgtgtgtgtggggtgggtggtgaggacggaatcttgctctgtcgcccaggctggagtgcagaggctcaatcttggctcactgcaacctccacctcacagattcaagtgatcctcctgcctcagccttccaggtagctgggattacaggtgtctgccaccacacctggctaactttttgtgtttttagtagagatggggtttcaccatgttggtgaaactgctgacctcaagtgatc

SEQ ID NO: 60142 - DNA, 549 bp, Homo Sapiens
ttttttgccattgaaatatttatttatttttgccccaagaagtgagcttactgtagtttcagcacatttttgaatacccaagatcaacgcaacattatagcataaaagagcaaaaatatcattctagcataatattctaacttgagaaaagtttcaaatgctcaagcaaaagtatgaaacatcaggctaaaaggtttattaactgaaagacttatcagcatctttaaaatgcaaatacgtacctgaatctcccttgaaaagggaattctatggtcactgttgaatgtcatgtccttcctttaattgccattgctaaaatctttgtcctaatttggttatttttagagtctttaacttacattgcatttctttttgaattcaaagaaaaagtatttaaagaaaatatctatagtaaaaacaaagtctgtataaaattgttgtaactaaaagacaggcaagagtaatgtataaagagaaagcatagaagagcatgcatctttctgtgtttttagcttgagacgattcactctgtgtaggttataatgtgaa

SEQ ID NO: 60143 - DNA, 449 bp, Homo Sapiens
  misc_feature (13)..(13): n is a, c, g, or t
  misc_feature (27)..(27): n is a, c, g, or t
  misc_feature (159)..(159): n is a, c, g, or t
  misc_feature (173)..(173): n is a, c, g, or t
ggagaggagggcngtgagctgacatcntgctattgtacctagctgggcaacgagtgagacctgtctcaaaaaaaaaaaaaatactgggggaaacataaaataaccttgaaatctaagttatatattatatagtattcacacagtattataataatatgngatgaatacggganatgtgcataggttatatgcaatactacaccttttatatcaggtacttgagcatcctgggatttgagtatctatgggggtcctagaaccaatctccctcaggtaccgagggactatactataccttgttcttgaacgagatgatttgacattttaaatagatgttcccctagattaatctgtaaatataatacatttccaaccagaatgctaacacattaatttttttttttaacgatctggaaaaaataaaaatacatagcaaaaaaaaaaaaaaa

SEQ ID NO: 60144 - DNA, 166949 bp, Homo Sapiens
gatctttgacaaacctgaccaaaacaagcaatggggaaatgattccctatttaataaatggtgttggggaaactcgctagctttatgctgaaaactgaaactggaccccttgcttacatgttatacaataattaactcaagatggattaaagacttaaacataagacctaaaaccataaaaaccctagaagaatacctaggcaataccattcagtgcataggcatgggcaaagacttcatgactaaaacaccaaaagcaaggggaacaaaagccaaaattgacaaatggggtctaattaaactaaagagcatctgcacagcaaaacaaactatcatcagagtgaacaggcaacctacagaaagggagaaaatttttgcaacctatccatctgacaaaggtctaatatccagaacctaaaagaaacttaaacaaatttacaagaaaacacacacacacacacacatcaaaaagtgggtgaaggatatgaacagacacttctcaaaagaaaacatttgaatgtgtcccagagattctggtatgttgtgtctttgttctcgttggtttcaaagaacatctttatttctgccttcatttcgttatgtacccagtagtcattcaggagaaggttgtacagtttccatgtagttgagcggttttgagtgagattcttaatcctgagttctagtttgattgcactgtggtctgagagatagtttgttataatttctgttcttttacttttgctgaggagagctttacttccaagtatgtggtcagttttggaataggtgtgctgtggtgctgaaaaaaatgtacattctgttgatttggggtggagagttctgtagatgtctattaggtctgcttggtgcagagctgagttcaattcctgggtatccttgttaactttctgtcttgttgatctgtctaatgttgacagtggggtgttaaagtctcccaatattaatgtgtgggagtctaagtctctttgtaggtcactcaggacttgctttatgaatctggatgctcctgtattgggtgcatatatacttaggatagttagctcttcttgttgaattgatccctttaccattaagtaatggccttctttgtctcttttgatctttgttggtttaaagtctgttttatcagagactaggattgcaacccctgcctttttttgttttccatttgcttggtagatcctcctccatccttttattttgagcctatgtgtgtctctgcacgtgagatgggtttcctgaatacagcacactgatgggtcttgacttgttatccaatttgccagtctgtgtcttttaattggagcatttagtccatttacatttaaagttaatattgttatgtgtgagtttgatcctgtcattatgatgttagctggttattttgctcgttagttgatccagtttcttcctagtcttgatggtctttacattttggcatgattttgcagcagttggtaccagttgttcctttccctgtttagtgcttccttcaggagctcttttagggcaggcctggtggtgacaaaatctctcagcatttgctcgtctgtaaaggattttatttctccttcacttatgaagcttagtttcgctggatatgaaattctggcttgaaaattcttttctttaagaatgttgaatattggcccccactctcttctggcttgtagagtttttgcggagagatctgctgttagtctgataggcttccctttgaggttaacccgacttttctctctggctgcctttaacatttttttcttcatttcaactttggtgaatctgacaattatgtgtcttggtgttgctcttctcaaggagtatctttgtggcattctctgtatttcctgaatctgaatgttggcctgccttgctagattggggaagttctcctggataatatcctgcagagtgttttccaacttggttccattctccccgtcactttcaggtacaccaatcagatgtagatttggtcttttcacatagtcccatatatcttggaggctttgctcatttctttttattcttttttctctaaacttcccttctcgcttcatttcattcatttcatcttccatcgctgataccatttcttccagttgatcgcatcagctcctgaggcttctgcattcttcacgtagttctcgagccttggttttcagctccatcagcttctttaagcacttctctgtattggttattctagttatacgttcttctaaatttttttcaaagttttcaacttctttgcctttggtttgaatgtccttccatagctcggaaggactataaatcatgctgctataaagacacatgcacacgtatgtttattgcggcattattcacaatagcaaagacttggaaccaacccaaatgtccaacgatgatagactggattaagaaaatgtggcacatatacaccatggaatactatgcagccataaaaaatgatgagttcatgtcctttgtagggacatggatgaagctggaaaccatcattctcagtaaacgatcacaagaacaagaaaccaaacaccacatattctcactcataggtgggaattgaacaatgagaacatatggacacaggaaggggaacatcacactctggggactgttgttgggtggggggaggggggagggatagcattggtagatatacctaatgctagatgacgaattagtgggtgcagcgcaccagcatggcacatgtatacatatgtaactaacctgcacattgtgcacatgtaccctaaaacttaaagtataataataataaaaaaaaactaagagataaaaaaagaaaggaattactgggtcatacagtaattccataattaacattttgaggagctggcaaacagtttctgaaatggctgcaccattttatatttcactagctatggatgagtgttctcatttctttttattccatttttttttttttgatggagtctcgctctgtcacccaggctggagtgcagtggcgccatctcagcttgctgcaagctctgcctcctgggttcacgccattctcctgcctcagcctcccgagtagctgggactacaggagcccgccacagcgcacggtgagaaggggtttcaccatggtctcgatctcctgacctcgtgatccacccgcctcggcctcacaaagtgctgggattacaggcgtgagcacctcgcccggcctccattgttttaattataaccattctagtgaatatgcattggtatctcatggtagttttgatttgtatttatttcactaacagttaatgatgctaagtatctgtcatgtccttattgtctgtttcgataccttctttgaagaaatgcctattcaaatactttgttcatttttaagttggattacttgtattttcattaccaaatgtaagagtttttaaatgtattttgtaaatagtctccttctcaaatatatgattctcaaatattaaaaaaaaaagaaaagaaaacatttattcagccaacaaacatttttaaaaaagctcattatcactggtccttagagaaatacaaatcaaaaacataataagataccatctcactccagttagaatggcaatcattaaaaagtcaggaagcaacagatgctggagaggatgtggacaaataggaatgattttatactgttggtgggagtgtaaattcaaccattgtggaagacagtgtggtgattcctcaaggagctagaaccagaaataccatttgacccagcaatcccattattggttatatacccaaaagattataaatcattttactataaagacacatgcacacatatgtttattgcagcactgttcacagtagcaaagacttggaaccaacccaattgctcatcaatgatggactggataaagaaaatgtggtacatatacaccatggaatactatgcagccataaaaaagatgagttcatttcctttgcggggtcatggatgaagctggaaacaatcattctcatcaaactaacacaggaacagaaaatcaagcaccgcatgttctcactcataagtgggagttgtacaatgagaacacatggacacagggaggggaaaatcacactgaggactgtcgggggatgcggggaggaatagcattagtagaaatacctaatgtagatgacgggttgatgcatgcagcaaactaccatggcacgtgtatacctatgtaacaaacctgcagattctgcatgtgcatcccagaacttaaagtataataaaaaaatagtgtttggaaattaattccaatcagaggccattaaagatttgcataagatccctcacctaaaatgtacaaatcatattttaatctatttgttattttcaactggagatttgttctggaagcataataaatgagtgcactgattgatattttatttattctgccccagcatgtattacttatatgcttttttgtctaaaaatcactttgtagaaatcaaaggctgtgatgcatttagggatttcatatacattttggtagtggatgacaccagagagtatgaggaagatctagagtgccagaggaatgaaagtattgatattatgttcaggcaaaagtgagaaagactgagacattaaggaaataagagcattcatgtctgaaatttttgaagaggcagggaaggttggatgaggctgaatagaataaaaaggttattataataattttcattttttaacagaaactaagagtctgggatattttagaacaagaagaaaaagtttgtttagaaaaaaaggaattagagaaaacaaagatatattaggaaaatatggaaaagccctacacataaagatagacaacagtatctatgacagttttaagatttgatcagaaattttgtgggtagttttactaactctatatatgtgaagattgccaagaatttcatctgtgcctttggaagcaatactctaattattttgggcctgcgaacattaataaatatgtaggattctaatgaaaatgcaaccaaaagtacagtaatgctagtggaatattttattggtgaaatgcaaatatttaacttcttaagttataagcaaccaagaatcatataactaccttgctggatagcttgcatttacccctctaaattcaccctcctcatttatccaccttgttttctcctatacaaagcctacctgtatggactatatctgtggaatcccttgccctctagcttaaaatgggctttcatcaatgggaatctccagtataagatttgaaggaggaagaagacttaaatcacagtatttattttcctcagcttctaacctgcagtccctttgttggaaaactaaggctgtaaagaaaggcactattgctaataaggctttggtttggatgtccctgataactaatgatgttgaaccaccttttcatgtgcttattcaccatttgtatatctttaaagaaacgtctgttcagggtcctggccattttaataaaattgagttcttaaaaacaattactgagatattctagatacaagtctccatcaaatttgcaagtaatgttatacgctgcataataatggtttggtcaacaacaaataacatatataattgttatctcacaagattataatggagcaaaaaaaatttcctattgcctagtgacattgaagccatcataacattgtagcacaacacattactcaaatatttgtggtgatgatggtgtaaacaatcctattgtgctgccagttttatgaaagtgtagtacatacggttacattaaatatgcaatacttgatcatgcttcaaaaaatctgtgttactggtttatgtatttactatactatagttatcactaatttagagtgtactctttctactcgtaaaaaagttaactataaaaactttaggcagttcattcaggaagtattccagaagaaggcattcttatcatagcagagggcagttcaatactgttattgccttagaagcccttccagtggaatcagatgtagaggtggaagacaataatattgataatcctgaccctatgtaggcctaggctattgtgggcttgtgtcttagttttttaaaaaaagtttaaaaagtaagaaaaaatacaaatagaaaaaagcttctaaaataaatatataaagaaataaaatatttttgtacagctgtacaatatgtgttctaagtgttattacaaaagagacagagttaaaaaagaacatttataaagtaaaaaaagttatagtaagttaaagttaaaattattgaagaaagaaaatattgatatataaatttagtgtaacctaagtatacagtgttcagcaagtctacattagtgtacagtaatgtccaagatcttcacattcacttaccagaaacacattgacttgccaaagcaacttacagtcctgcgacctccattcatagcatgtgccttacaggtgcactattttttatcatttatgccatatttttaatataccttttctatgattagatatgttagatacacacatactaatcattttgttacaattttctacagtgttcagtacagtaacatgctatataggtttgtagtataagagcaataggctatactaaatagcctaagtgttcagtagactatactatctaggtttgtgtaagtatactctatgaactttgtgcaacaatgaaatcaattaacacatttttttcagaacaaactccaattgttaagtgatgcaagactgtattttctcccattctgtgggttgtattttcactttcttgatagtgtaacggtgaaatgggaggaattttcccttattcccgtcacagggcatgtgatgggggtgtggctcacttatgtggtgccctgctgctccagcccctaggaggagcatgcagatgggcaggttgttgggctcccaccccacggcagtgtctaaggttgagtgtttacagctcccaaagccccaataggcatgtgttatagtgtgctctttcagcttagccatctgcaggtggcttacgttaatcagctcaagtagatccatttgccttatcacaaagttagagggctttctgtatccaggggttcttgccttagtgtactggaaaaattggatcacatgtgggcttggagaatgagtataaagctttgttgaatggtgtaagtagctctcagcagatggactggaagccagaaggggcacggagtgggaaggtggtcttccccggggttgggctgctaagtggctgggctctcctcccagtgccctcagcggaattccccttggcatccacgttgttctgccattgatggcctgccggcatctgttggtgtgttctgctggtgtgttcctctccacgtccagctgctggtgtgtgtgtgtccgcttaaggtctctggcttatatgggcacaggatggggggtgtggtgagcccaaaggcaactttttgtttgtgaaaacagaaaagctggtcctcacttaggaccgtgggcacaggcctgagggtggagcctttgtcagggacctcacccttctctacccagcatttccctgcccccatcctgtatcagtagtatcctagtgccctttaaaacaaagtaagtattaattttcatgaagtccaatttatttctcttttgttacttgtgctattggtgtcttatcgaagaatccattgccatatccaaggtcacaaagatttaccctaaattttcttctaagagttttataattttagttcttagattttggtctttgatttattttgagttaatgttgcgtatcatgtgaggtaagggtccagtttaaatgtttttcatgtgtctattatttttttttatttttagatacattatatttttacatatttataacatgcacgtgaaattttgtcatacacatggaatgtgtaatgttcaaattagaggatttaaggtatccatcaccgaaatatttaccatttatctatatagagtacatttcaagtcctgtcttctagctattttataagtacaatatattgttgctacctgtagtcaacttactcttccgtcaaagattagaacttattccttccatttagctgtatgtttgtacatattgactagcctcttttcaacactcgcacttatatattctgcccatcacaggtatctaccattctacattctaagtcaatgagaacaattcttcttagctctcacataggtgtgagaacatgcaatatttgtctttcagtgcctggcttatttcacttaacattatgacctgcagtttcatccatgttgctaaaatcacgtgatctaattattctttataatcaaatggtattctactgtgtatgtataccgcattttcttcatccattcatttgctaattaacacttagttttatcccatatctttgctattgtcaatagtgttacaataaacataagagttaatgtatccctttcatatcttcatttcttttcttttggataattgcctagtagtggaattgctggattgatgggtagttctatatttagctttttgataaatctctgtactgttttccacagtggctgtactaatttacatttccaccaacagtgtataagagttccctcttattcacatccttaacaaaatctgttgttccttgcatttgtagtaatagacattctgattgggggaacatgttatctaattgtggttttgatttgcatttccctgatgattagtaatatggagccatttttcatatacctgctgtccatatgtatgttatcttttagtaatttatcattctgtcattgttcttgcttcctgtttctgaagatatcatttcagccaaaagttacagattgagctctgtctgatattttctgagcaggaatatgtccttttagtacctcaagaatatgtcatagctcttcaaagccttccatgagacaactccttcttcaggtatttcttttactttgttggccagtttcttgtttacctgagctgataccatagcctcatgcgtcagtgataaaaaataattgccaccaattatcttgaatgaaagctctggatatagggtgtttcccacgagtgaggactgaattaaatcaaataacaacaccatgtgaatataattcttctagagagcttcaagacaggtcatatagtgagaaatgctttggatatggctttttggggagtctcaaacccagtgtttcccttccagtgactgaaaggctaccgtttctcatagctacttggttgtggggctgctgcttttcaaagcttaaagaaacctgagaaaaggatagtagtagatcagtttaaaatgttatggccagccctgctcttcttactgagatttagcagttttccttgaattagtaattctccaagtatagcaaggttttggttaattaccgaagctctgaaaaagttggtttgttgttgttgttgttgttgttgttgttgttgtttttgctagtgcttttattgatttgttggagtggttgatttatgaagctcctcactcatccaacctgaaagtcccattttggaaagctgtagattttaaggtaaatcagatgaaaacattacgaagtaatttcccttttaaatgtggtgaacaattaaataaagaagtctctaaaatgtgaaatatctgcttaatcaagagacaactcatgtaaatagtgtaactcatgtaatcaagagacaactcatgtaatcaagagacaactcatgtaaatagtgtaacagcttataatttcactaatttctttttattttaattaatttttaaattaacttatctattttaaattttgttattgacaaggtctcactttgtcacccaggctggggtacagagggcaatcatggcttactgtagccttgaactcctggacttaagcagtcttcccaactcggcttcccaaagccctgaaattacaggcacaagccaccattcctggcttagcaatttatttactaattattctatttgttctttaatcaattgtagtagtttatattttctagaatagttgtcatttaatatgtcttatcaattttattggtataaagttattaatataatttagttatgatttgaaataatcttgagtgtacttatgctcttttttattgtactattatttgcttatatgttctcccatttattttttcttaattagtgtttttaccttttggtgttgatgttcatttacattgggtttctttttttctcatttgcttcttcatttaatattatttttaaaattttatctttatattttgcatttcaccttaaaatgcattctattcattctttttgttgagtaaacagtatattttcttttaaacttcctcttttctaattcatttaaacccaatatgttcttctaattaatgtgtttattatctccaaaatgtttttctatatagtgttctcttcaatatcagtggtttataagaagaagtcaaaagaaatacaactcatgttctttttatccaaggagcttccaaggaaatgttgtaaccatggcaatgagaagcattcataggattcagcagaaaatattgtttatttctccaaagcccactcaagcatcttctgtataaatgtattttcccatgatttttctcacaatattttggaaaataattctggttattaggttctaaaatatttacagttcaataaataacaagtccttctccacattgtcattttttaaaaattagatatcatggatacataagggtttttgcaagaaaagtatggcactacaaaacgaagttactaaggagagttcggtaagggcactacttaaaaaggatggacaagatgaggaaaattgtcaagggatagcaacccacaggtctagcaacagttgttataaccactcctagatgtaaccaagcaaggagaatgagtaataactagatctatgtaacatgtagctaaggagaaatcttcccaacagaaactattacttttgctagaggaacaaaaccttgccaaaccttgactgaaagaatctaggggaattaatgccctgaccaagagggtatatgcatttttgccctctgatctccttaatgtgatacaaattgtataatgccaacccaaacccagatgtcaatatggattatcattctagtcatagaggtcagccagtactactttaaaagttttaacttcctttattgcccagcttaagcctttccaaaagggacaaataggaaaaataataaaaaagtaaaatacatcccaatcaaatctaaaacccaacaggaaaaactatttttcattaagaaatcatagttacatacatttatggaatacaatatgatattctgatatatgcatacaatgtagtataattaaatcaagctcattaacatatccatcactacgcttatatattttttatgtgattgtactagtccgttctcacactgctatatgaaatacccaagactgggtaatttataaaggaaaggaagtttaataaactcacagttccacatggctagtgaggtcttccaatcatggcagaagacaaaggaggagcaaaggcacgtcttacatggtggcaggcaagagagtgtgtgcaggggaactgccctttataaaaccatcagatcttatgagacttattaactatcacgagaacagcatggaaaaacccgaccccatgattcaattacctcctaccaggtccctcttatgacacatggggattatgggaattacaattcaagaagagatttggctggggacacagccaaactgtatcagtgatatattcaatacatctcaaactttttccccctattgatatgaaactttgtccattttaacaattttccattctcctacctaaaacattttatcaacaactccccattccttccattacaataccccagcatctggtattgttctactctcttcctgtatgagttcaactttattagatgtcacatataagtgagataatgcaaaatttgttattttgtgcctggcttatttcatttagcatgatgttttctagattcatctatcttgttacaattgacagaattttccccttttatatgactgaaaaaatattccattgtgtagatatatcacattttcttttcccattcatctgttgatggatgtgtaggttgttttcctatcttggctattgtaaatagtgctgcgtgggagtgaatatatctcttcaacattttgattttgatttctttaaatatatacccagcagtggcttttctgaatcatatggaagttatgtttttaattttttgagaaaactccatactttttccataatggcttcactaatttacattccaactaacagtgtgcaagggtggccttttatcttttgggtaatagccattcctactgttgagaggtaatatgtcattaaggtttgggtttgcatttccctgatgattagtgatgttgaccatttttttcatatacctgttggcaatgtgtatatcttattttgagaaatgtctacttaggccttttgtggacttattaacagggttatatgttttcttgctcagcagtttaagtttcttacatattttgaatattaaccccttattagatgtatggtttgcaaatattttctcccattctgtagcttttctcttcacgccatggatttttctttttgctaaagaagctttttagtttgatgcaatgtgttttgtctgtttttttcttttattatccatgcatttgagtttatatccagaaaatcattgttcagacaaaaatcatgtatcccaaagattttgccaagtttgctgctagtagtttcatagatttgggtgtacatttaaggctttattttatttttagtagattttcgtatatggtgaaagataggagtcttatgttattcttctgtttgtggatatacaattttcctagtagcatttattgaagagaatggtactttcaccatcgtgtattcttggcaccttcatgaaaagtcaattgactgtaaatgtgtaaaattatttattggttctctattttatgttactgatttctatgttttcatgccagtaccatgctgttttggttcctgtagctttgtagtatattttgaaattaggttgcataatttctccagctttgtttttctttgctcaaaattgctttgactaagtcatttgttgttctaaacaaatttcagtatttttttatttctgtgaaaaatgccattggtattttgatggggattgtattgaatcaccaacaatatgaatttttcaaattcatgaatgcatgctatattttcatttgtttatgtcgtcaatctatttcaacaatgttttatagtttttggtgtaaaaattttttacctcccaggttaaatttattccaagtaatcttttgtagttatcgtaaatgagattgttttcttgatttttttttgagttagttcagtgttagtatatggaaatgctactaaaatttattgttggttttgtaacttgcaacaaagtcaaatgaactttaatgaagtcatttattacttttaacagttttttggtgatgtcattagggtttactgtatacatgaccatgtcatctgtaaattgagacaaaatgactgcttgttttccaatgtggatgcccttttttaaaatatttctcttgcctaatttctatggctaggatttccaatactattttaaatagaagtagtaaaagtgaacatctatgtttaattcataccttagagaaaaatctttaaatttttattcagtttgatgttagctatgggtttgttatatgtgttctttattgtgttaacacactttcttttgatgtttattttgttgacaggtttatcatgaaggggagataaattttatcaaatgctccttttgcttatggaaatgatcatattgtctttgtccttcattctgataatgtggtgtatcacatttattgatttccacatattgaactatcattgcatccctgaaattaattccacttaattatagtaaatgattgttttaaactgttattgaatgtgatttgctagttttttgttgaaaatttttgcacctatgttaatcagacatattgacccatagttttcattttttagttatgttcttctctggttttaacatcagagtaatgtaagcatcatagaatagatttggaaagattttgtcatcttggagtttttgtaatagtttgagaagaattggtattatttctttaactgtttggtagaattcagcagtgaacgtatcaggtcctggtcttttatttgatggaaggtgcttcattactggcccaatcaccttacttaatgttaatcagtattagttcagatttttaatttatttataattaaactatggtaggttttatacatccaaaaatttatccatttcttttgggttatatagtctgttggcttataattatttataatagtgtctataatcctttgtgtgtctattgtgtcatttgtaatgtctaccttttatctctgattttgtttatttaaaccttgtctctctcttatttagtttagttaatggtttgtcaattttatctttccaaaagaaaaaaaaaaccctctttgttttgttgagcctttgtagtggcttttgtctctatttcatttattttttatttgatccttatcatttaattttctttaattttctgtttagtttattcttgtttgctgaattgcaatgctatgttgtatatatgagatcatcttttttcatggagttgtttgttgctgtaaagctccctctaaaatctacctttcctatatctcataggttttggtatgttgtattatcattttcatttgtttcaagaaattttaaatttttcttttaatttttatattgtctcatttgtcattcaggttcaggttgcttaatttttacgtatttgtaaaatttccaaaattgcctgtgttattagtttctagctttataccattgtggtctgataatctcagtcttcttaaatttgttaagacttgttttgtgatcaaatatgcagtctatcctagggaatgttctatgtgcagttgatacaaatgtgttgtcagatggtgtgttcagtaagtgtctgttaggtctatttgtcctagggtgaagtttaaattcaatgtttctttgttaatttttctgtctgaattatctgtcagttgctcaaagtgaggtatcaaagtctcctactattattgtattgcagtctatgtctttctatagaacttttgatatttcctttatatatttagagttaatgttgtgtgtgtatatgtttacaattgttatatcttcttgctgaaatggctcatttattattatgtaatgacatttttattaatttttaaagtttttgacttaaagtctattttatcttatataagtacagctactcctgctctctttttgatttccactttcatgggaagtttctttccatcccatcactttcagtctatgtgtgtcattagaggtgaagtgaaacagcataaagttgtttttttttttccattcagccactctgtattttaattggtgaatttaatccacttacctacaaggtaattactgataggtaaagacttgctactgccattctaactgttttccagttgttttatagattccttctttgtttctttatttcttggttactttctttctttttctctttctctctctttctttctgtcttcttccttattgtcttcctttgtggttacataactttctatagtagttcattttgcttgctagcattttttcatttttaatgtatctgttaaaggtttttgctttgtggttaccatgaggcttataaaaacatcttaaagttataacgaagtgtaagttgataaaaacttaactttgatcaccaaaacagctctacactttaatcccatacttcctcaaacatttttaatttttgttatcacaatgtataactttttataatttatatctgttaacagattattatggttattattttactagttttgacttttaatatttacactgaaaatatgattaatttacataccattattacagtattagcatattctgaatttgaatgtgtacttacttttataagttagtattatactttcggatgtttttgtattacttactatcatcatttcctttcagcttaaataactccctttagcatgtttttcatgatacgtatggtggtagtgaactttcagcttttgcttgtctgggaaagttttttatctccatttctgaaggacaactttgctgggtacagtaatcatgattggtagttttctttttctttctttttctattcagttgtttgaatatatcactctactatttcctagcctgtaaggtttctgctgagaagtcagctgttaggtatattgggacttccttatatatgatttgtttctttcctcttgatgctttcaaaattctctctttgtttttgattgttgagagttcaattatgtctttgggttgtattatgtgtattgaatcttattggtgacctttgactttcctgtacctggatatttatatctttctccacatttggaaagttttctgctattatttctttaaataagctttttacctctttctcttactctacttcttcttagacaccaatgactcatatacttgctcttttgatatagttctataaaactcattagcttttttcatacattcttattatttaaaaaatttctcctctgatggtcaaatttaaaataatctatcttcctttgagtttttgtactttttaatttaattgatcatttctgctgttgctacttttcattgcatattttatgaattgtattttaaaataattttaatatttctcacacatttctgattttttttattttattgaacttaactaagctttttaaagacaggtgttttgaattctttatcagacaatttatgcatcttcatttctttggaattagtcactgacaccttattttgtctgcttggtggcgtcatattcttccagttgttcttgattcttgtggtcatgaatcaatgtctgcacattgaagaggtaggtactatttcactctttgtagtcaggcttttttgggggaatgcccttcaactgtaagcttgtacaaatattttggacagcacttctggtgtaatctctaagcccatggtaacttcagctgtctcagggctaaggttgctctaagctcaggacccatgtggtcagtgaatctcatgctataattgctgttggctagtttctctggtgtggcatctttgttggccagaatgcatagtagccaccatgatctgtgtactggtaaatgtgaactctatccctattctttgtttctaactgactctaggtggtctagctttcatggtactctcactgttccctgcaggaaaagataggaatgaacatcctgcttgaggttccagaatggttagcaagttgcatatctgctttcaattcactttgtttttaaactatatgaaccatgtgtagagaggaattctctgtgtgtttctctgtgccaacatgaagaagaaacagcatggtcaaatagaacagtttttcttaaagtttcatcacagcttttctcagttctatagtccatgtggaaagttttagcatctcttctgagttctgggatattttagataatattcttgcctgtgtatagatacttgttagatttctatgggacacttgaagctaggggtctcctatttcaccattttattgatgtaactcctcacaaatattaaatcttaaggctacagaacaatattcctccagtcaaagtttcatcctctggaaacacaggcggagaggtttggttcctaaggctccagggagattcacctccatggctttactgggcacagctcatgctgcagcttctatacattagagtatcatgcttgttgtccttccaagctagagtcacatgcctatggctctaccagttttgttccatggggttggccccatgctccactaggcatcaccctactctggatgctctgcagttgcccttttcccacagctccactaagcattgtcctagttggggttctctgtggtgaatctgcccagatgctctgctaggcattgcccaagtttgcaatctctacagtgacttcacatgtgtgacatttctctgcctggttttcaaagctctctgcggcatctcttaaaatctacatagaggtagccatatactaacaagtcctgaaattggtatacccaccgagatagtactgcttaggcactataattgtatactgcctgtgcctcccagacaggtgtcccaagccacgtctgtgcccactggagcaacagctcaggtagccaaagagcactgcactggaatgcaggaagcagagacttgtaattgttttgttttcaggcccctggatttctcaacctgtgattggcagggcagcccccaatgatctctgaaatgctttcagggccattgtttcattattttggtggctagaactttgcttctggcaatttatactagtcttcttatttaatgcaaatgatcacttgtacatacccttgatgttctctcctgaacatcttctgttttttttttatttttttattttttattccctttacaatatgtccagtctgagaattatgcaaatctttaagttctgcttcccttttgattaaaaatcccatttctaatttgctactctccttctgcattttactgtaagcagaacagataaattatttgccacatattgtcttagagtttcatccataactaagacaacaatccccattttaatgtcctgtaaccacagcatgccatgtaaaatccatactggcactgtctacctctttaatagtatctcttaatatatataccctcaacactttacctagatatttctttcatcaaatattttatttcaattctcagaagttctacttcccataaagcactaggacacaaataattcagttaagttctttgtcactgtataaaaaagatcacctttcctcaagtttttaatagcatgttttacatttctgctgaggcctcatcagaacagaatttgccattcacattcctaccaacattttgttcacaaccgcctagataatttctaagaaaattgaaactttctcttcagtgcttctcctctgagctctcatgaacatcacccttaagactatttttatggccatatgcctcaaaattcttccagcttctactcattactcagttccaaagtcacttccacatttacaggtatttgttatagcaacacctcatttcttgataccaatttctgtaaagctaatttgggctgtataacaaaataccttagactgtgtgatttataaacagtagaaatttattgctcacatttctggaggctgaaaatttaagatcaaatcaccagcagacttggtctgatgagggtctgttcctcatagatggtgccttctgacgggatagtcagacgaatgaacaaaaaaggaatattttcccagcctctttttttttttcattttatttttttatttttttttattttttatttttttacttttcttttttttttattatactttaagttttagggtacatgtgcacattgtgcaggttagttacatatgtatacatgtgccatgctggtgcgctgcacccactaactcgtcatctagcattaggtatcccagcctcttttaaaaaggctctgatcctgtttgtgaggactctacccttatgtcctaatcacatttcaaaagccctatctcctaatatcatcaccttgtggattaagttttacgataatagttttggggatacagcaacatttatactgctgcacatgcatttggttataatgaattcaaattccaactattattccctaacttccatggatgatgttagtcaattcttttgctctctgatttctcatgcatgagtcatacacccgttgaatgtgccctttaagttccagaagactgacaatgagctctctaagctgtcctcttgaaatccttttcactggtcttgtggtaagaaaaaaatagctcctttaacccttttccataggcagtgatgcacctcattacttctaatttctgtctttctcaatgttccactttaaattacttttacacttaagagttggctatcaatgaagggttgaaaatccaatttctgaccaccttttttgtaagttgagcttagctcactgagctacttgcttgaaaatttaggtaggttttctgtcacttattgccttagagcctcatccataactaaaacagcaatgcccactttaatgtccctaagcgcaggctgtcatgtaagatacatactggcactgtgtacatttttaaccttatctcttaacatactctcactgctacattttttttacatccacaattatctaaggccatttttggacatgctgtgttctctcatgcctctgtgaattttaatatgctgttttctctgcttagattattagtttcctcttctcctcccttagctcatccttcccacgactcctaaaactatttgatcatatctatttttttttcttcaagtctcctttcagatattaattttcatagtataccttttttacaacacccggaatgacttaatcatttgggaactatgctttcacaataatcttttttactttatttggttcttaataatttgatttgcaattattggtttacttatgggatctacctcacaattttgcaggttcctgaagggtagaaagagagcatttaatactgaatttctagagtgtaacagagttcataaaatatagcaaatgcttacactacattacttcattaaatgactgaataagccagagtaaatataaatgtgagtgtaaataaatatatgtataaggaatataaggattaataattcaatattctgaactagagtgctgatgaaaaataaggaaaggcattcagctgtgtggtctcggcaattcacttttgcactgtctttatctttctgaaataagcattttaaaatacattactggctttcaagtatttcttgctctgaaaattttactaaaattttacaaattatttatgtatcattattgggaaatactttttcaaactaaatcttacttagaatcttaatgagaaacataatatttaacagccatttgaaaatttaagcttgtagtttaagagagaacttatatttggtgatgtaggcttggcattcagacagttaaatatagggaaaatgaaaagagctgttacagttaaatttgagttttcgaaaaatggtgaaaaagtctccagtgcaaccataactaatgaggattatttaaatattttgtcattttattttaaaattcatttgattccaccacagaagaaaaaaaatttttccatttgtcttgtttggtataaaattacacatttatttagtatgagaaatgaatgtaaagtatattaggtttaaaaaaacctgacaaatagttctatgcaataaataactaaccttacccaaagagaaatcttatatttttttcttgttttctaggaggtgatctctagactctcaaaatgttttgcccggtagaagtgtctttctttgcttgtggtctttggccatcaggcagtttatcaataggatttataagggaggctttggccatgcagtctctgttatgcctccagaagggactggaaaataaaggccttaacttgcccattgggaaggactggagactacaggtcagcatatatagacaatatattacctagccccaataaaaactctgtatactgaaatacagagtaagcttcctggattggcaatattccatgcatattgtgacacaattaagcaaggcaaggaggaattatcaccatccatgtttacatggggaggagacaatcagaagatttgtgcttgggctcttcctgaactctcccgtgtgtcttttattttggcttattttaatctatatcactttcttgtaataaactgggactatgaatatagcaactttcagtaagttctatgagtccttgtagcaaactatcaaatgcaagcatagattttaaaacccttaaacttgtaattggtgttaaaagtgaaagcaaccttctggggattgttctccccaactttgaaattggttaaattcattacaacctcaaacatcacaaaatctaacaaaataattatatatttttattaattattctcatggatttctatagttcattgttttctactttgttgactcttttgcatttgattatttgtcccgatgctaaataattgttaatcattttccatagagactgtacaaatataacttagtatttcttttaccatggataatacgacttgtcattaacaactttggtgttataggaacgtcgaagaaagaaatcttttaaataaaaatttcaagttgagaaactggaagtttgtgctaaggcaaagaaaatgttaactcgtataggaacttttggcatggaaagaaacaatagaagtagagaaaagtttgcttccaatattcacttaacatttatttaaccattgaaagtttctgaaatagacaaaatatgacagtttttagtatactttagaaatacctgatgaagcatagattacttagaaaagctattataatagcctaggcaagaaataatgtcttctttaatttagaaaatgacaaaatatataggggaaaacaaaaataggaaatgttgtgaaatttgaactgacaaggcttggatacagaaggtgactaaggaaagagctgatgaaactacttccttgttttcatcctggatgactacatttaatatcaactgcagtaagaagcaccaaaaaagaacagatttttattgggggcttagcagtatataatgagttctgttttaggccttgaatttgatgagtatattaaaaaatctataaggagatctgtaactcacatttgacatattggggtttgagtttaagacagggtcatgctggtaaggtagatgtaacaatcatgcaattatatatagaggatataacttaagaaacatgattgaaggaaattaactcaggtaagaaatataaaatcagaaggacagtaaagatagaatcttgagaagtgtgtaggtaatgtttaatcaagcaggcataagtccagactatcttaatgaaaatttaggctccatgacttaaaagcgatatataacggcaacattatttaacttatcagcatctcatgtttcttatcaattaattgggataataatagtagtattgtcattggaaacctagtaagtgttccatacattttaactattataatcaatctcactattatttctattatctttttttattatactttaagttttagggtacatgtgcacaacgtgcaggtttgttacaagtgaattatgaaggaagatatgcacaagaaatataaaaccagttaaaagatagtaacagaaagtgaagaagaggagtagacaacgaatgtagaccactttttcatgtggttttaaagtaaaatacagagaaaacagaggatgtcagcatgacagcagagtagaaattcctagacccccctctttcacccacaaaaactgatgcagcagcaattttcagaaaacctttccctgtatgaaatttgaaactaattcagactccaagagagcacaaaaacaggcttacaaagtggctagggagatttgggacaccttctacctggagaccctgcacccaactcagcaccatacaattgactagaaaccttctacctctcagtttcctccagggaagagaagagcttgttttatcttccagtgctccagttattctaaaggggatcccaagaggactggctttcatcttaccagtcttaaagtactgacgtgtgtggcacagcctagtttcctgggagagtaaaaataaaaaggcttgggataataaatgacaacgatcttctcccatgcttggcacagagcgtgtgaatgaaaaattccagctctcagattccatctagggagataaagagtcgatccaagactccagaactccaactactctagggatgtccaaagtacttgcatatgtttcacctctctagctctcaccattctagtactgtcttgctgcatggaggagaacaaagatggcagcttaggctgggagaaccataaccccctgcttcatcacagagtcaatagacatcacacatgttttcctgtttttttttgtggaggaaaagagttggtagactccacataagtatctggctgggctgattggtggcaggtctttacatttgaatgaagtaactgacctgaaaaattcagtagaattcaacagcaaactagatcaagcaaaatatagaatcagtgaacctgaaaacagatcgttcaatataattcaatgaaaaaaggaaaataatttttaaaactaattaaaacaagtgaagaaagctaaaggggctagcggggcaccatcaagaaaaccaatatatgtgttatggtaaatcaaaaaggagaatatggaaaacatcccagaaaactttttcaaagaaatagtgtctgaaaatgtcccaaatttgggaaagaaaatagatatccatattcaagaataccaaatgaacccttacaggatgaacccaaagaaatccataacaagacacattataatgaaaatgtcaaaagacaaagacagaatttcaaaagcaccaagaaaaaagtgactcatcacatacaaggtagcctccataagattatcagctggccgggcgcggtggctcacgcctgtaatcccagcactttgggaggccgaggcagacggatcacgaggtcaggagatcgagaccacggcgaaaccccgtctctactaaaaatacaaaaagttagctgggcgtagtggcgggcgcctgtagtcccagctactcgggaggctgaggcaggagaatggcgtgaacccgggaggcggagcttgcagtgagccgagatcgcgccactgcactccagcctgggtgacagagcgagactccgtctcaaaaaaaaaaaaaaaaaaaggttatcagctaatttttaccataaattttgaatgtcagaaggagtgggatgattcatccagtgttgaaggaaaaatacctgctaaacaggaatgctgtaccttgaacaactctgcttcaaaactaaaggagagatacattcccagaaatgcagcagcacagggaattcaacagcactagacctgacttacaagaaaaactaaagagatttctttaagtattaatagaaacaaaagacattaaagagcaacatgataccataagaaagtatgaagctcattgatagatacacacacacacacacacacacatacatacatacaaatgcagaatattgtatctctgtaatgctggtgagcaaatcaaaatcacttttaattctgttataaaatataaaagacaaaagtattaaaaaccactacaataaatatatgttaaaagttacatattataaatgaatgtaaattgtgacaataacataaaatgtgggaggtagagaagttatattgtgtcatttttgtatatgttaaacaatttgttatattttatgtaagccccatagtaactgcataacatactgaaataagttacacacacaaaaatgaaaggaatcaaaacatatccatacaaaaaatttttaaagcccataaaaaaacaaaaattctaacaaaatgacaatagtaaatccttccctattaataattgttttaaatgtaaatggactaagcttcccagtcaaaagttatagagtgtctaaatggttttatatattttatttataatggatttattatatatatgcacacacagacacacacatatatgaagaccagactatatgttttctactagaaactcacttttaaggacgttgagaagctaaaagtgaaggactggaaaagggtattccatgaaaatggtaacccaaaagagagaatgggtagctataattataccataaaaaacagactgtaactcagaaagtgttacaagatataaagagggtcattatataatgataaatttgtcaattcaccaggaagatataacaattattaaaaacattaatatgtgcaccccaacatcagaccacttaaatatataaagcagtaattcacactactgaaagaaaaaaatagccagcaatacggtaagagtaaaagatttcaatacccatttccaataacagacagaatatccaaacaagaaattaataaaggaagcagaggattcaaataatggtacaaaccaaatgtacataacagacatttacagaacattccatccaagagcagtggaatacatattcttctcaagtgcacatggctttttctttaggatagatcatatgttaactaacaaaacaagtcttaacatagtcaacaagattaaaattataccaagtatattttctagacccagtgtactggaactagacagccacagcagaaagaaaactgggacatttacaaatatgtggaaattaacaaactctttaactatattatgtgaaaaaaataaattcagaagaaaattagaaaatatcctaagataaacaaaatgaaaacaaagcatatcaaaacacacgggattaagaaaaaatatagttctaagaggggagttcatagtgataaatgtctacatttaaaaagaggaaacatttcaaataaaaaccctgaatttataccttaaggagttagagaaagcaaaacaaactaagcagaaacttagtagagagatgcaataacaaagatggatgcaaacatgaagaaaacaaaaaagaaaaaaagaaacaatcaaaggcattgagttgtttttattgaaaagataaacacaattgaaaaactcttaactaagaaaaagaagagagaaagctaaaatgattagatccagaaatgaatgaaaacacattacaactgatgccatagaaataaaaaaaaataaggaactattatgtaaaattattcaacaaaaatctggataacctataagaaatgaataaattactagaaacataaaatctaccaatggataatcatgaagaaataaagtgtaaccaatctataacctgtatggaaatagaatcagtaatagaatcagaaatagaatcaaaatttcccaacaaagaaaagcctagggctagatgtcttcactagtgctttttaagaaacatttaaagaagaattaatagcaatccttcactaaattctcaaaaaaaattgaagaggagaaaatattttcaaactcatcatcttatggtgcaatattaattacttccaaactctttttatgaggccaacattatcctgatacaaaagccagataccacaaggtaagaaaactataggccaatatccctaatgaatattgaagtaaaacttcggagcaaaatgttagcaaactgaatgcaacagcacattaaaagaatcatacgctatgatcaagtgtgatttatccctggcatgcaagaatgatccagcataaaaaaagtcaattaagatgatagaccacattaacaaaatgaaggataaaaatcataattaccccaacaaatgtagtaatatttaccaaaagtcaacatctttcctaataaaaagtctcaacaaactagaaatagaaggcaattatctcaacataataaaagccatatataatgaacccacagctaacttttatctcaacggtataaaactgaaagcttttcctctagtatcagaaacaagacaaggatgcccactgaattatttgcccactcattttttttccttgcacaattgatctggatagaactgacaatactatgttgaataacttcaagaggtcaattctgttcaataactaagtggaagtctaagccagattgattaaccaagaaaaagcataaaaataaaaataaaaggaatccaaatcagaaaggaagaagtaaaaatttacctgtttgcagatgagatgatcttatatatcagaaatccaaatgtctccttaaaaaagactgttacaattaatacacaatccagtaaagttgtaggatacaaaatcaacagacaaaaaatacttttaattctctacctaccatcaaactatctgaaaaggaaattagaaaaacaatcccatttacaacagcacaataaagagtaaaatgcctagggataatcataactaatggatgaaaaacttgcatatgataaactacaaaacattgataggagaaattaaacaagacacaaacaaatgagaatatatcccatattcattggctgaaaagcttaatatgtatttaaaatgtctatactactgaaagtgatttaaagagtcaatgcaattgatattaaaatctcaatagcactttttacagaaatataaaaacaattctaagattcatatggaaaacaaaagactacaaatagtcaaatcaatcttgagaaagaacaaagctgggagaattatacttcctgattcaaaatatattaacaagatacagtgatgaaaacagtgttgtactggcataaagaaagacatataggccaatgaattagaaataaagagcccagaaattaattcaagcatatgtggtcaaccaagttttgttaagaatgtcaagaatacacagtggaggtgtgggtagtctcctcagcaattatattggaaaatctagatatccacatacaaaaaaattaaaactggacttatcttacacgatacccaaataacaactcaaaatagaataaatacttaaatataagactgtgaagtgaaaaaaatcctagaagaaatagtaaaaaattatgacattggtttgaggatttcttagatatgataccaaaaaacataagcaacaaaaacaacacacaagtggggctacattaaatttaaaagcttctgcacaaagatgagaataatcagcagagttaaaaggcagtctacggtatggaaaaacatatttgcaaaccatatatctgataaagggttaaagtctaagatatataaagaactcctacaatttagtagtaaaataaacccaataatataacttaaaatgagcaaaggatttgaaaaaaaacatttctttaaagaaaatatagaagtgttctcctggtatatagaaagatattcattgttgctaatcatcagagaaatgcaaatcaaaaccttgatgagatattatctcacattagtcagaattgctgttatcaaaaaacaaaacatacaaaatgttggtcaaccatattagaaatgctcaatactactaattattagagaaatgcaaatcaaaaccacaatgagataccatttcacaccagtcagaatgacttattactaaaaagtcaagaaatagcagatgttggtcagtttgcagagaaaatgaaacacttatacactgttggggcaatataaattagttcagccactatggaaattattagtttggagatttctcaaatatcttaaagcataactacaattcgactcagcaatcccgttactgggtttatactcaaagtaatgcaaattgttctatcataaagacacatgcatgcatatgttcattacagcactatttgcgatggcaaagacatggaatcgacatagatgcccatcagtggtggactggataaagaaaatgtggcacatatacaccatggaacactatgcagccataaaaatactacatcatgtcctttgcagcaacatggatggagctggaggccattatcctaagcagattaatgcaggaacagaaaaccagatacaacatgttttcacttgtaagcgtaagtaaaacattgagtactcacggacacaaagtagggagcagtagatgccagggcctacttgagaatggagagtggaagggaggtgaggatcaaaaaactacctattaaatactatactcatgacctatgtgacaaaataatttccaccaaactcatacaacgtgtgatttacctacgtaacaaacctgcatatgtactgtcttaactaaaataaaagttgaaaaggaatgaaatgtttatgagaactggggaaattgcaatccttgtatactgttggtggaaatataaaatgcaaccactaaggaaatctgtccagagttttctcaaaaaaattttaaaagaactatcaagtagtcagcaatctcacttggcatctatccaaaagaattgaagtcaggatcttgaagtagtgttagtattcctgtgtttattatagcactatttacaatagccaaggtgtggaaacaacctaattgtccaacatagatggattttaaaaatgtgcaaatgtacaataatatgagtactcacacatgtgcacacacatacacaagggaatactattcagccttaaaaagaaagaagttctgcaatatgtgacaacaatggatgaacattgagatcattatgttaaatgaaatcatccagtcatagaaagacaagcactatatgattccaattttataagatatccaaaataattaaattaatagaatcaaagagtcaaatggtagtttccagtggttgaggaaaggagaaaatgggaagttgtcaatcaataagcaagggcatacgtttcagtcaagcaaaatgaataagctctagcgatctgctgtacaacagtgtacctagggtcaaccatagtgttttgtacatttaatagtttgttaagagtgttgatctcatgttaagtgttctgaccacaataaagtaaaatataaaataaataaggagaaagagctgtagcctgaagagaacccatactcagacattgttgattactttagtgtgattttcctgcttggttgttttagacatatttgaccagctttgtaggctaagaaaatgtgcaaatggaaaacaaaatgcagatacctttaacactatggcactgattacttaaagggatgggaaatgaaaaagtgtgagactgagcctggcacaagcattggacacttcatattctgagacaggaaatttgaagagatacagtgaacacagagatattttgagatctaggtgagagtggtcacatacttttacacaagaaaaacttaattttaccattacagtgaaggatatctttactgagagtgaaggtatatatgaagtcggaagactgaaaactgtggtcaattatgggcttttatattttaaaatattggcattggagcagctgtgagtgtatggagttcaatgatgaggctggatgtacaacgttatgaaataaaaaattgaatgtatgcatatggaggtgctgagggattttgaagcaagagtgctatgcatttattctacaaaaggaagcaatgagagggaatgagatagggcaaaaatgctctggctgaggatattaaataaaaaccaattagataaaagggtttccctcttggttgagggcaccttggtgtacatattaagaaactttaatgtgatgtgaaaggaaatcagaattcactccatttccttgggcagaggagtgacatgatcacagtaatacagagtagttggagaaaaaaaagaggctaggcaggaagataagttaggaggctgttttagtcatcctcctgtgaaacagaaatagtaatagaaatacatagaaagaggcagttggcagtgacattgtgaaggaaaaaaatcagtcttttaaaatttgctatattaaataacaattgacaattgtcacactataattacattttaagtaatttcatgtaaccatgcatgaaatgaaagaacattatagtgataaattgtgcaatctattttctcaatgttaatatttaataatatgagattgacatttaaatttattagaggaaatgctatggtttacttttttatttaacttgtgaaaagaaattgccacatcacacataaatacaacttatataacttcatgaatttagccttatcaaaattaattagaggaaacatttaaaagttataatgcaataaaaataaatttaaaatatgaaaaatatagaagcatgtcatactttatctcaacccttgcctcttctagtttctgcttttaacattgtcataaattcagcagcatttataatcagtgtgattactcattctatattttccttagggatgcatttattattattcatgttttaagtaaattagtttaaaactatagctttgtccagatctgcacttcagaatgaattatttccactattctttcaaagtgaacatttatatttcatattgcattatataactcagtttgaaaatcttaggcaattgtaaaattatgatgctaggagtgtcgtcaagtaatttttcagtctaccccttgtctcagcacatgattggtatcaagtcatgtcaactatttcattctcctgaaaaaaaaaaaaaaggttttccttctttataagctgaaactctcctgctccatgagaagctcacagatttttttctttggtggcatgagtaacagttattcacgtgtcttcataaaatagcctttcacttatttgaaatcttcttttagtgatacttgacacagtgccagtggatcaaatacattgctgaaaaatatttttaaccaaacatagcagcattaatcagctttcagaacaaattgacagtttggagaatgtaccttgcaagttgtttaaaatatttgactaagtagtcacagaaaatttatccttaataacaatgaaaataataataattcttcctctttcttgttattgtcagcaaaaggcaaatcgcttcgcatgctgaaataagcaacaaactgtgaaagtgcacacttgcatatatttcactatataaccaagtcaaatgcctaggagagttaacttgatacacattaaatgtataaaattatttttttctttccatattttattgtaggttcaagaggtatatgggcagatttggtacatggataaattgccagtcacagggatttggtgtacagaaaattttgtcatccaggtaatcaatataatattcaatatatttttaatccttaccctcctccctccctccactctcaagtaggccccaatgtatattgttcttttttttgtgtccatgtgtactctatgtttccctcacacttataagtgaaaatatgcagcatttggatttttggtcctgtgttaattcactaaggatggtcttcagctgcatccatgttgctgcaaaggacatgattttattctattttatggctggatagtattccatggtgtatatgtgccacatttttttatccagtccaccatcaatgggcatttaggttcattccgtgtctttgctattgtgaatagtgctgcaataaacatacacatgcatgtatctttataatggaatgatatgcattcctttgggtatatacccagtaatgggatggctgggtcaaatggtatttctgcctctaagtctttgaggaatcaccaaactgtcttccacagtggttgaattaatttacactctcaccaacaatgtaaaagcattccttttcctccataacctctccatcatctgtttttatctgttttttttttgttgttgttgtttatttgttttacttttttgtaatatccattcatcctagccattctgactggcatgagatggtatctcattgtggtttttattttcatttatctaaggattagtagtattgagcattttttcatatgatttttggccgtgcatatgccttcttttaaaaagtatctgttcatgacccttgcccatcttttaatagggctgtttggttttatttttttgatttaagtttcttatagagtttggatattgcacctttgtcaaatgcacagtttgcaaatattttctcccatttctgtaaattgtctgttaactctgttaatagtttttttttttcctatgcaaaatctcttattttaattaagttccacttgtcaatttttcttttagttgcaattgcttttgacatcttcatcatgaagtctttgtcaggattgatgtcgagaatgctatttcctaggttttcttctagattttttaagagttttaggccttacatctttaatccatctttagttgatttttgaatatgataaatggaagaggttcagtttcaatcttctgcatatggctagccagttattccacaatttattgaataggaattctttccccattgcttattattgtcagctttcttaaagatcagatggttttaggtgaatgtctttactcctgagttctccaacctgttacattggtctgtgtgtctgtttttgtatcagtaccacgctcctttagttactgtagctttatagtatagtttatagaagtcaggtagtgtgatacctccacctttgttctttttgcttcagatttcttggctacttggggctattttttgattccaaatgaattttacaatatttttctttataattctgtacagaatgtcattggtagtttaataggaacagcactgaatctgtaaattgctttgggcagtatggccattttaacaatattgattttttctattcatgaacatggaatgttttttcatttgtttgtgtcatgtttgatttatttcagcagtgttttgtaattctcattgtagagttattttatcttcctggttagttgtagtcctaggtattttaatcttcttatggttattgggaaggggactgcaatcttgatttggctctcagcttggatgttattcatatataaaaatactactgttatgtatacatcgattttatatactgaaactttgctgaaattgtttatcagctctaggagtctttgggcacagattatggagttttctaaggataaataatattgtctgaaaatagatagtttgcttttttctattcgtatttggatgccttttatttttttcttgcctgattgctctggctagaaactacccatactatattgaataggagtggtgacagtgagcacctttgtcttttaccagttctctcgggaaatgattcctgcttttgaccattcagtatgatgttgccagtgggtttgtcataggtggctcttattattttgaggtatctttgatttctagtttgttgagggtttttaacatgaaagaatgttgaatttcatcaaaagccttttctgcctccattgtgacgatcatgtggtttgcttttagttctgtttatgtgatgttcttattgtgcagcatgacaattagttataaaaggtaaacagggcacataatgagtgcaatttaattttactcatacataaaaaggctgaatttttttcaagtttttaaaattattgcatgttactatgttctgagtgttataaagattattcaaatataagatcgttgttgaggcatctgtaattagtgtttgatattaaaaactttttcttgatatcagagataacttaatttaacatgtttattatacttatgccatcacattaaaaagaaaagggcatgtatctgatttactgaggctggagttgactacaatcccctggcatctgtccattgcatcactcttcttcttcaagattcttcttcaaacatcaggtgttcctgattcactaccatctctccagtcaccatggtgctgatggtctccaagtagttatactttggtccacgatggtgttatttaattcctaggactgacagtactacaatcctgctgcaagagggaatatctgacccagaccacgcaaattacattgtcagattcccccttctttctatcttttagaccaaaaagttttttagcaataagatagaatggctccttatatattcttccaaatatactatttatgaaataaattttaagttattagctctttagtatattgtctagtggaaaccactgtcctagacccttagaaattgaaaatttattctctcaaactctctgtttaaaacaacggaggctgggtgtggtggctcatgcctgtaatcccagcactttgggaggccgaggctggtggactacctgaggtcaggatttcgagaccagactggctaatatggtgaaaccccgtctctactaaagatataaaattaaccgggcgtggttgcacatgcctattatcccagctacttgggaggctgaggcaggagaatcacttgaaccagggaagtggaggttgcagtgagccgagattgtgccactgcattccagcctgggcaacaagagcaaaactccatctcaaaaaaaaaaaaaaatgaataaagggattttgtttttgttctgtttgcatttctcctttaaaatctctttcctgaagattagtgggatgaaggactacaaatgtaaaaaaattatttgaagaaaaaagaaaagcaaatgcataaatattatatcaaattaatattcagacttacttcacttctaacttgttgctttatcctccaccaaggatgatggtttaatttatatcttctgaaacaaaccataaattaaaccatattcttcctaatttcaaatttctccctaaaaatgtggagattttcatttaatttgtctactatctagcacaataatttaataggtgctcaaaaaatgtttacatgtgtgcttatgtaggtataagttcaggattccaccatgatctttaattgaagacttaattttattatttcattaattcattcaatattgaaaagatagtcatttacagctttttcattaccagacacttctagattctagtgataaaaacatgaaaatataaatgtcctactattgtgccctttaagacatcacagtctagtaaagaagacagtcaagcaaacagaaaatagtatcaagaagcatatacggcatatatcaagagtcatcaagaggtattttaaaagtgtggtaagtttgcttcactaatgtatccccagcgcatagcatagtgtctaccatacagaagatattctatcattaagaagagtattgattttttacaggtaagtattacaaaggagcaatatgtttcgctatgaaggcatagttaggcttgtagtttgtcacaaataaactgtaaccagttactgacaagctgtcaatatttataaaagatttcccttttataaaatttaactgtttctgcttatagtaatattcccgctctcttttattccaaagtatttagactggttgtttagtgcagaataaaatttgttgaaatgaggatctgaatactgtttctaattcttactaaaaatgtgactttggggagtttatctactctttctgagctttgactatcttatctgtaatatagagataatagaagtaccacttcatagacgtgctgtatggattaaatgcttaatgtatgtgaagtgcttgtaacagtcctggcacatagtaagcgctatataagcattagctattcttatcatgttataggtaccccccctccaccccccgccccgccccggagtctcactctgtcgcccaggctggagtgcagtggcacaatctcggctcactgcaagctccgcctcccgggttcacgccattctgcctcagcctccccagtagctgggtacaggcgactgccaccacgcccggctaaatttttttttttttttttttttttgtatttttagtagagacggggtttcaccgtgttagccaggatggtctcgatcttctgacctcttgatcggtccgccttggcctcccaaagtgatgggattacaggcgtgagccaccgcacccagccagtataggttttttgtacaagtaacaagaggcaagagtctaacaaagcttgctagcagttgcatgttatcctgggtgggtccatagaaatggttgtgctgtgtgaactatgtcatttggttctaagagaaaaacaattgaaagttaactgtgagatagtaagtacagtatatctgagagtctgtaaaagcagcatctcagcacttcacgtaatcaatatgtgacaaacataaattacaaagaataatttatttcttttaggttaacttattttttaggccaggtatctattagtcattaggcttgctgactgatttcttgtatcttcacctgaaatcctttctttcattctgagttaagattattactttgaatctgagctaaagcaatctgtcccctagaaaatagttaaatacttaagaattttttttctcttttctagatatgttatcctgtaatcttaaatcagtgcctcttcttaatctaggaagtgattctcaaacttcaagattctgatagaatatgtcaaaaatctgacatttcctgctactctctacagcttttgccactctgagccacacgaggaatgtacattattacacttagaggtgtctctcccccttttatctagatataactagtgcagaaactaagaggaaatgcaaagataggataaaagagaatggctttctctgcagattactacctagtgatttcttttcactgtagtccatctaaaggctgtctggttatgtcttattggtattcctccttgtagtataaatgagcaaatttcttggcacctgctgaagagttatattaatttgtgcagctgctacatttgaattttcaggatcccgtagttttatttcctgaaacttaactggcgatggtaacgggaaaacattcataagaaataactttaggtgtttcatatatactatttatgtaaattttacataagcagataaatcgggatttttgcttaatttcgaatattatgtagagaggccacatttattttgaaaatctggtctctctatataatattataaattaagcaaaaatccaaattagcaatgctttgttggcttgtttattttacaagcttgcacagcatgttaaaagaagaggtaatcacatattactgggacagatatgtcattatttttctagatctaagaaatatgaataattatgtttgttcttcatatatagctttgtgtgcaacactcttacgtagatatttacatcacttatcaaaatccacttcaggcatttgcacaaacacaaaatacataagctcttcacattaaaataatagctctgaggaagtgtaaagatgctgactagaagcagctagtgtgtgctgctgtcactgagaaaacatacaggcagtaaacattacctcttcaactggattatccaggaggacacgttgggattcattagggaagcaacatgacacacagagatcagagaggagtgagacaggacagctgcccacccaggactggcacagactgcagggagaaaccccaccatgaaaaatggtgactcagcaagagcccctaggaaccatacactttattccatggactcttgaatcctgggtgcataagatcctccttcccctgcccctggggcctctagactgaaatggagagcagtgtgcattctgggcaaagacatcattcaggcccacatggaagcccaaagatcttgcatccctgagaatcccagctccagctgccatagccccaccaaaaagggatgccaggctctctcacatgcctccagaagaggggacatatcaatggtgttgaggagcagacagcctctaggtcttgcctccgctgcactgcaccgagcaaagcccactggcctggaaccccagcatagccaccccacccacagctgagcacttgggccagttgcagctctgcatttctctgagactgagctcccagaggtaactgacaggcctaagctattgccattgctccagcctactgccatcaggctagggaaggaatgaagagaagaattattgtaggccaccttcagcacaccagagctgccatatggaaaagcagccagactgttttccacacaagaaacaaggcagcatgtgtgcccagcttgggcccacactgcagctgtcttacccttggctgaacattcccattggcgggagctctgtgtcactctgggctaaagttctcagaggcaactgactctggaagtttcatccctgggaactgatacctccaccactaccacgaccttgctatccttgggctgtagagcaacaaaaaccttgatcactttgcttgcaccttcagcacaccgcagctgccatatggagaaggggtcagtcttctctgtgcgcccctgatgccctgccttttaccaggcaggatgaccgtcttgggcctgtagcacagcatctccactccttgctgaatattctcattggcagtggctctgtttctctctaaggaggagttctcagaagcaactggcaacccctctaccactgtcaccaggctgggaatgcaacaaagagcctgagtgctttacttgtacccccaccatgccacagccaccctacagagaagagaccagactgtctttctcataagtccactgccacctctgttcttcaccaggcagagttgaaaggcttgggctcacagtacagctgcccctgtataatcattttgattggcagcagctcagcatttctcaggggtggagcccccagagacaagtgaaagaccctctgacattaccactgccaagagtaccaccaccactgccccaaagctgaggagggaacaaaacatctgagcttgccccaggtctgtggtgcacagcctgagagtgccaagccaagattagtggccagaacttgagtgggagaggaacccacagtttcagagcagttccatgcaaaaaccactttgctaatatacacccctgtgaatccaagaacatcaattcagccacaaataaagaccctcccccaaagcgttggctctcttaaaacagtcacaaacagaggtcaattgaatatgctcaaattacaccacaggtaaagaaacaacaacacaaagatgggaaaacaaaacaaaacaaaacaagacaacagcaaaacaaaacaaaaaacagcacaagaactgtggcaactataaaatccagaacatctttgtacctgcaaatttctacactagttccaaacaattgtactgaaccagagagaaaaagattaaatgactaatgtagatttcagaatctgaatggcaatgaagattataaagattcaggagaaagttaaaatccaacgcaaggaatctaaagaatccagtaaaacaatataagagatgaaagactagccattttaagaaagaatcaaactgatctgatagggctgaaaaactatcagaatttcatagtacaatcagaagtattaattgaagaatagaccaacctgagaaaaaaatttcagtgctccaagcccagttcttcaaattagctcagtcagacaaaaataaagagaaaagaataaaaaaaaaaattaagaaaacctctgagaaatatgggattaagtaaggagacaaaacatatgactccttgttatccctgaaagagaaagagagagagcaagaaactcagagaatatatttgagaattttgtacacaaaattttccccaaccttgctagacaggctggcactcaaatttgggaaatttggagaagccttgcaagatagtataacaagatgactatccccaagccacatagtaattaattaggttttccaaggccaaggtgagagaaaaaaatgttaaaggcaactggagggaagtggaaggtcagctacaaaggggaccccatcaggcggacagcagacttttcagcagaaactctacaagccagaagagagcaggagcctatagtcagtattcttttttttatttttttattatactttaagttttagggtacatgtgcacaacgtgcaggtttgttacatatgtatacatgtgccatgttggtgtgttgcacccattaactagtcatttagcattaggtatatttcctaatgctatccctcccccctccccccaccccacaacagtccccggtgtgtgaagtcagtgtggcgattcctcaggggcctagaattagaaataccatttgaaccagccatcccattactgggtatatacccaaaggattataaatcatgctgctataaagacacatgcacacgtatgtttattgcggctattcacaatagcagagacttggagcctatagtcagcattctaagaaaaaaaagaaatttcaaccaagaatattatattcagtcaaactatcattcataagcaaaggagaaacaaatgctgatggaaattgttatgatctgatatgccttactagaggtccttaagggagtgctaagggaaaacccattacaggccaacacagaaattcacatatgtacatagaccattgacactataaagcaactatacaatcaagtccacataacaaccagctaaaaacatgacaaaatcaaatttgcaaatactcatattaaccttgaatgtaaataggttaaatgccctatttataaggcacaaaattgcacgttcaataaagaagcaagacccaactgtatgctttcttcaaaagacacatctcacatgagaggacacgcataggctctaagtaaagggctaaagaaagatctatcaagtaaacagaaaacaaaaaagagcaggtttgctaatattatttcagacaaaacagcatttaaaccaacaacgatcaaaaaggaaaaagaaaaacattacataataatagagaattcaattcaacaagatttaactattttaaatatatatgcaaacaacactagagaactgaggtttatagaacaagttcctagagacttgcaaagaaaattagataactacacaacaataatagtgggagacttcaacttccgtctgactccaagagacaccatccctcattttgcctccatcatctaaggagacaaaatctaacaagcatattgaggacttaactcttgacacttgatcaaatagatggaagagacatttacagaacactctacccaaaaagaacagaatatacattcttttcttctgcacataacacataatctaaaattgaccacatgcttggaaataaagcaattctgatcaaatataaaagaaaaccaaaacaataccaatcagaatctcaataaaataaaaaaaaatatatatatatataaatcagacggagcatggtggctcatgcctgtaatcccagcactttgggaggccaaggtgggtggatcacctgaggccaggagttcaagaccagccttgggaaacatggtgaaaccctgtctctactaaaaaaaaaaaaaagaaaagccaggtgtggtggcacatgcctctaatcccagctacctgggaggctgaggcaagagaatagcttgaacctgggaggcggaggttgcaatgagtcaagattgtgccattgcgttccctgctgggagacaagagtgaaactgcctcaaaaaataaaaaaaaatcagtactgagaaggtttctcaaaattatgaaattacacaacctgcttttgaatgacttttggggaagcaatgaaactaaggaagaaatcaacccagcaatcccattactgggtatatacccaaaggattataaatcatgctgctataaagacacatgcacacgtatgtttattgtggcactattcacaatagcaaacacttggaaccaacccaaatgtccaacagtgatagactggattaagaaaatgtggcacatatacaccatggaatactatgcagccataaaaaaggatgagttcatgtcctttgtagggacatggatgaaactggaaaccatcattctcagcaaactatcgcaaggacaaaaaaacaaacaccacatgttctcactcaggtgggaattgaacaatgagaacacatggacacaggaaagggaacatcacacactggggcctgttgtggggtggggggaggagggagggatagcattaggagatatacctaatgttaaatgaggagttaatgggtgcagcacaccaacatggaacatgtatacatgcgtaactaacctgcatgttgtgcacatgtacactaaaacttaaagtataattaaaaaaaaaaaacgaaaataatgaaaacaaagaaacaacataccagaaagtatggaacacagctaaagtattaagaaacacatttatagtgataaatgcacacatgaaaaagtaagatcaaaaattagcaacccaatagcctgccttgagctagaaaaacaggagcaatccagccccaaagctggcagaggaaaataaattatcgaaacaagaacaaaactaaatgagagatgagaaaaaataaaacatacaaaagatcaactacacaaaagtttgttcttcaaaagaataaataagattggtagaccactagctagactatgaaagaaaaaagagagaaaattcaaataaagacaaccagaaatgacaaaagagacattaccaacaaccccacaaaaaacaaaagtccctcaaagactattaagaatacctctatgcacacaaaccagaaaatgtaaaaaaaaaatagacaaattcctggaaacataaaatctcccaagcttgaactaggaagaaattgaaatcctgaactgaacaataatgagtttttaaattgaatcagtaataaaaatcctacaaaccagaaaaaggacttgaccaaatgaattcacagctgaattcaacaaaatgtataaagaagagttgaaaccaattctactgaaactatttcaaaagacaggagtagggactccttccatgctcattctgtgagaccagcatcactgtgataccaacactgacagagacacaacaacaacaacaacaaaaacaaaaacaaaaatctttaggccaatatccttaagaaacataaatgcaaatattctcatcacaatactagcaaactgaattccaacagcacatcaaaatgttaatctaccatgatcaagtaagcattgtttctgggatgcaagtttgactggacatacttaaatcaataaatgagattcaccacataaacagaactaaactccaaaatcttacgatcatgtcaatagatgcagaaaagacttgtgataaagttcaacattccttaatgttaaaaaccctcatcaaactaggcattgaaggaacatgacttaaaatattaagagctatctatgaaaacccacagaaaacatcatatagaatgagcaaaagctggaagcattccccttgaggaccagaacaaaacaaggaaccccactctcgctactgttattcaacacaagactgaaaatcctagccagagcaattaggcaagacaattaaataaaaggcatctatatagaaaaagaagaagtcaaaatatctctctccatagacaatataatttgacattaagaaaaccccatagtctctgtccaaaggcttttatatctgataaactgtttcaacatagtttcagtacacaaaattaattttgaaaaatcagtagcatttctatacaccaataacatccatgctgagagtcaaataaaaaatgcaatcctgctcacaatagccacaaaaacaataaaatacctaactaaagaagcgaaagctctctacaacaagaattataaaacactgctcagaaaaatcagagatgacacaaataaacggaaaaacattccacgctcatgaataggagaattaatattgttaaaatggccatactgcccaaagcaatttacagattcagtgctattcctatcaaactaccaatgagattcttcacaaaattagaaaaaactattttaaaatacatatggagccaataaagggcccaaagagccaaataaatcttaaacaaaaagaatagagctggagccatcactctatgtgacttaaaatgatactacaaggctacactaaccaaaacagtgtggtactggtacaaaaacaaacatatagaccaatgcaagagtttagggaactgagaaataaagccacacacttaaaaccatctgatcttcaagaaagctgacaatagtaagccatggggaaagagtccctattcaataaattgtgctgggataactggctacccatatggagaagattgaaactggacccgctcattttaccatatacaaaaataaatgcaagatggatcaaatacttaaatgtaaaacctaaacctataaaaactctacaagcaaacctaggaaataccattctggtaatcggctctggcaaacacttcatgacaaagatgctgaaagcagttgcaactaactcaaaaattgacaagtaagacataattaaagagaatcctcacagcaaaagaaactatcaacagatagactataaacagacaacctacataatgggagaaaatatttgcaaactatgcatttgactaagatctaatatccatattctataaggaatttaaacaaatcaataagcaaaggtaaacaacctcaataataaatgggggaagaacatgaagagaacattctaaaaagaagccaaaaagtgtatgaaaaaatgtcaatatcagtaatcgttaagaaaatgcaaacaaaaccacaatgagatataatctcacagcagtcagaatggctattactaaagagtcaaaaaccaacagatgatggctaggttgtggagaaaagaaaacagttatacactgctagtgggaatgtaaattagatcagccactgtagaaagcagtctggagagttctcaaataacttaaaatacagaacttaaaaggactaagcaatttcattattgagtgtgtacccagataaatataaatagttctaccatgaagacacaagcatgcctatcttcacggcagcaccattcacaagagcaaagtcatggaataaacctagatggccatcaatagtgaaatggataaagcaaatgtggtacatattcaccttggaatactacctcaccataataaataatgaaattatgttctttgcaacaacattgatgaatctggggaccattatcctaagcaaattgatgcaggaacataaaatcaaatatcacacgctctcacatataagtgtgagctaaacactgagtacacatggacagaaagaagggaacaatagacaccggagcctacttgtaggtaaagcatgggtggatggtgagggttgaaaaactacctatcaggtactatgctgattacctgggtgaccaaacctccatgacacacaatttaccaatgtatcaatcctgcacatgtactcccagaatgtaaaataaaatttgaaagaaaaaaataaaacaatagctcttttagagctagtagatttttactcatagaaaatgtgttcaattataacttaaaacagaactaccatttgaccgagcaattccattactgggtgtatacccagaggaatatagattactctgccataaagacacttgcattagtctgttcatcacagcactattcattatagcaaagacatcaaatcagcctagatgctcatcagtggtgtactagacaaagaaaagatggtacatatacaaaattaaatactatgcagctataaacaataaaataatgatatcctgttgtttgcaaaaacgtggatggaactggaggtcatcatgtcatggaaagacaaactccttatgttctcacttatttgtgagtgctaaaaatcaaaacaattgaatttatgaagattgagaatacaaggactgttaaccagaggctgaggatagtgaggggctgtaggggaggtagggatggttaatgtacagaaaaaaatagaaataatgagtaagacataccatttgatagcacaacagggtgactatagtcagtaataacttaattgtaaattttaaaatgactaaaagagtataattgtattgtttataacacaaaggataaatgctagaggggatggatacctcattttcatgatgtgattattgcttatttcatgcctgtaccaaagtatctcatataccccataaatatatacacctactatgtatcaatcaaaaatttttaaaaattaaagaagaaaaaaaaagaaaatttggtaaatatacaccatggaatactatgcagccacagaaaaaccaatgaaatgatatcctatgtagcaacatggatggagctggaggccattatcctaagcaaattaacacacaggaacagaaaaacaaatatcacatattaccacttataagtgggagctacatattgagtacacgtggacacaaagaaggaaacaatagacagcagagctttcttgagagtgaagggtgagaggagagcgaggatcaaaaaactgcctattgtcagctgggtgcagtggctcacgcctgtaaacacgacactttaggaggccgaggagggtggatcatgaggtcgagatcgagactatcctggctaacatgctgaaaccccatctctactaaaatacaataaattagccgggagtggtgacacatgcttgtaatcccagttacttgggaggctgaggcaggagaatcgcttgaacccaggagatggaggttgcagtgagcggagatggcaacgctgcactccagcctggcgacagagagactccgtatcaaaaataaataaataaataaataaatacataaattaaaaaaaccctgcctattgtctactatccgcactacccgggcgacaaaataatctgtacagaaaacccctgcaatattaatttacccacataataaacctatgcatgtaccctgtaaacttaaaataaaagttggaaataaaaaagaaagcatcatttcaccattttgtatttgactaaatgttttcaggtggcataaactctcttcttctctacctttaggactcacctgtgtttgtacataattctgttttcattttcaaggatgtcataaataaacacaggtattaagagacattatataattttgatttggagcctcagtgaagtggggtgccttgaattttaatacatacatggccaagaataatagagctataaaagtgccacaagctgattttaggtatgatatttcctattttgaaagttgatttctcagatttccatattatcacaaaagtgtttttttcaatggcatctatgttatatgtctacatgtatacactgagagataagttgcgtgcatgtgtgtgtctagtacaacatggaaaattacatccactgaggtatatttttagaaacacagaacatagatgattgacagaacaaagcatatggaaatgaagacaaatctaaccgacatttagatctaagaaaaaaatatttgcctgaagggaaaatattaattagtttgtctacatgcaagataaaagtctggaagacgtatctatcaaaaggcagtggaataaacagcaaaatggaaattatttgtaaactgacagtaaacttggcaaacattaagggggtaaacaagttatttggcatgcaaagcattttgaaatcacagcctctgtcaggaggcatctgtgcctagattcacttatttgacagaaattaacattttgcagaaatctttgttgcatgctaaagatttcttcaccctccttaattattttaattgctgcttcagaatgttccaaataaacactaaaaagatgctaaactccacaaagtccaatccaatttcaatattacagagtgattgcactctgagttgactgtaatacctaccaagaggtgatctatttaagtaaatatacccagcatatttttatgggataaaatataagggccatgtaaatccagtaataagccttatagcactgggaaaggtaaaattgcaagttcagccgcagaaactactttacccaattttatctatcttacataattaaaaatcatgcaaggttctaaaatcctatggattaaataattttcactatctttaatttctgacaaaattttagataactagtaaggtaaattaagagatttggtatagtgggaaaaatattgtcacagagattcaagaagtcctagctctgtcaataactagttgtcatttaacttctgtggttctcagtctcctcatcagtaaaaagaaaaagatttgatcttgtctgaagtccttttcaagctacaatttagacattccaggttatctgattataaatgttcaaactctcttattttgggaacttaagaaacttattttcttaagtgaaaactgtcttgttcaaaacagtgattttctttctttttttttttaaataatattcactgtgagagagatatccgtcagcaaaatcctgtaatttttgtttcaaaataatagaatctttaagcagtgactttttctccttttacctttgaggaaactgatgtatacaaagattaactgacttgaatttaagtgttatatttaaaacaggtcatttttatgtttaaagccctttgataagtgctttacttttattatgtaactcaatttttaaaacagtgtatgaagtaggaggaggtagtctggtagtagaaacagaatttatacaaagttaattcatctaaagactattatttccacaccacaatatcctcaagttaagtaggcagttgcatatttaaggtatactttaagggaatctactgatctgctattctaccattagattcattcctgtgtgctaccaatccagaatctgcttctaggacgttcttaatagaagtcacaaaaatgagctaacacaacaatttgtaagtgcttgtcactaataaagatttcacttgtcagtaacaaaatcaattagttatttttcataaagctagatatagtctatttaatatactccattattttaaattataatttctgctattttggtgttaatgaattattcttttatgaaataacaatctatgtggaagacaatatattccattttgtctggaggagaggttttggcatattaattaaaaagcaaggccctggtttcaggctatcttggttacacaacacctacttttaattttgcaacttgtgcaagtgattaaatctttctaaaacttttctcagctctatagtatgattaataatggtatcattttcatatgattattatgattattacctgagttaatgcatgtgaagtgctttacacatgttaatggcatgttagatattagctgttacttatataataggggtataggtttatgtgtttgagtatacgtgtgtgtgtgtctatgtttttcatagctttgtatattaaaataaaaagttagcaaacatatattggtcctcttggtatttcgttgttgtttcattttactgatccatgaaacacacaaatctttgtatcaatgaactaacttttaacctcactgggatgtagtttcaggaccttaatactaaatagaatacagggagtaggctaaatatgtattggaccttcagtttgaagctgaaggataggctaaaaagtctgggctaggaagttcaattcaaagtgtgagttgtccagagaaaaatggaaagcacagaaaagaaattggaaataggaattggtcaaaatggaggtgtgaaaaggcagaaaaccaatttagctgacattcagattttactcaggtctttttctttctatatttcttatccagaatcttttgtggacattcttcatagagtgataccagatttaaaatcaaagattgcttctttgcagaggtgaaaaacacataaacgcatttaagcttcattaattttcctcgtcctattctgtcctgaggaacaagtttggacttgaattaaaaatattcatagtcaatgtacaaataaatgaaagatcacagagaaacctcacaaagtgcacaaactgggaaacctgagaacactgtgtgctgaaaaacataaatgtaatcttaagctattcctcttattgctgttgtaggacatatgtgatgttgtcctggtcataatggggaaggattttctagagacagaggaaaatgagctagccagaatcctttgagagttaatggcaatatcattgatgaaaatacttctcacttcacttatggctatattcagtgtaatctttttttccagaattaattagaatgaaatgaattaaaattttaaaaatgtaaataatggtccttttggattttttttttctgaagggcatggaaatctataagttatctcttattaagataaaattgtctgaaatgagtaaataaaaatcagttttgattggtattattaaagctaaacatttcatatcatggtgggggccaagatggccaaataggaacagctctggtctgcagctcccagtgagaccagtgcagaaggcaggtaatttctgcattactgactgatgtacccagttcatctcattgggactggttaggcagtgggtccaacccatggagggtgagcagaagcagggtgggacatcacgtcacacggcaagtgcaaggagctgggggaccacccttccccagccaagggaagctgtgagggactgtgctacccagctgggttactacacttttcccacagtttttgcaatctatctgcagatcaggagattccctcttgtgtctacacctccagggccctcagtttcaagcacaaaactgggcagctgttggggcagacaccaagctagctgcaggagtttttttttttttctttcataccccagtggtgcctggaaccccagaaagacagaactgtttattcctctggcaagggggctgaagccagagagccaagaggtctcgccaagcaggtcccactcccacggagcccagcaatctaagaaccactggcttgaaattctcgctgccagtgtagcagtctgaagttgacctgggataatcgaactcggttaggggaggggcaccataactgaggctttagtaggtggttttcccctgacagtgctaaggaggctgggaggtctgggctgggcgcaacaaagtgactgtggccagactgcttctctagattcctcctcattggtcagggcatctctgaaggaaaagtaacagccccagtcaggggcttatagacaaagcccccatctccctgggacagagcacctcggggaagggggtgactgtgggcccagccacagcagattaaatcatccctgtgtgctggctctaaagggagaagctgattctgacaagaaggattctcccagcacagcgtaccagctctgctaagggacaggctgcctcctcaagtgggtctctgacccctgtgcctcctgactgggagctacctcccaacaggggtggacaggcacctcatacagaagaggtctggctggcatcaggctggtgcccctgtgggacgaatcttccagagaaaggagcaggcagcaatctttgctgttctgcagcctccactggtgatacccaggtgaacaacgtctggattggaactccagcaagctgcagcagacctgcagaagaggcctgactattagaagaaaagctaacaaacagaaagcaacaagatcaacgtcaacataaaggactcccacacaaaaatctcaaccaaaggtcatcagcctcaaagaacaaacgtagataaatccacaaagatgaggaaaaaacagagcaaaagcgcagaaaatttcaaaaaccagaatacctcttctcctccagatgattgcaacttttctccagcaagggcacaaaactggacagaatgagtttgacgaattgacaaaagtaggcttcagaaggtgggtaataacaaactcctctgagctaaaggagcatgttctaacccaatgcaaggaagctaagaacaatgataaaaggtataggaaaccgctaactagaataaccagtttatagagtaacataaaggacctggtggagctgaaaaacacagaacaagaacttcgtgaagcatacacaagtatcaatagccgaatcgatcaagcagaagaaaggatataagagaatgaagatcaacttactgaaataaagtgtgaagacaagcttagaaaaacaagaatgaaaaggaatgaacaaagccccaggaaatacaggactatgtgaaaagaccaaacctacgatttattggtgtacctgaaagagacagggagaaaggaaccaagttggaaaacacatttcacagtattatccaggaaaacttccccaacctagcaagacagtccaacattcaaatttgggaaatacagagaacaccactaagatactctttgagaagaacaaccccaaaatacataatcatcagagtctccaaggctgaaaagaaagcaaaaaatgttaaggggagccagagagaaaggtcatgttacctacaaatggaagcacaccagattaacagcagatctctctgcagaaaccctacgagccagaagagagtgggggccaatattcaacattcttaaataaaagaattttcaacccagaatttcatatccagccaaactaagtttcataagcaaaggagaaatataatactgtccagataagcaaatgctgaggaattttgtcaccaccaggcctgccttataagagctcctgaaggaagcactaaatatggaaaggaaaaaccattaccagccactgcaagaataccataatataaagactaattacactatgaagaaactgcatcaagtaatgtagcatcatgacaagatgatcaaattcacacataacaatattaaccttaaaagtaaatggactaaatgccccaattaaaagacacagactggcaaatcagataaagagtcaaggcccatcaatgtgctgtattcagaagacccatctcatgtgtaaagacacacataggctcaaaataaagggatggagaaatatttaccaagcaagtggaaaggaaaataaagcaggggttgcaatcctagtctctgataaaacaaactttaaaacaacaaagatcaaaatagacaaagaagggcattatataatggtaaaatgatcaatgcaacaagaactaactatcttaaatacatatgcacccaaaagaggagcacccagatttataaaacaagttcttagagatctacaaagagacttatactcccacacaataatagtgggagactttaacaccccactgtcaatattagacagattgagacagaaaattaacaaggatatttaggagataaactcagctcattaccaactggacctaccagacatctacagaactctccacaccaaatcaacagaatatacattattctcagcgccacatatcacttattctaaaaccgtccacataattggaagtagaacaatcctcagcaaatgcaaaagaacagaaatcataataagcagtctatcagaccacagtgcaatcaaattagaactcaggattaagaaactcactcaaaactgcacaactacttggaaattaacatgctcctgaatgactactgcataaattacaaaattaaggcagaaataaaaaagttatttgacaccaatgtgaacaaagagacaatgaatctctgggacatagctaaagctgtgttaagagggaaattaattgcactaaatgtgcacatcagaaagtgggaaatatctaaaactctatcatcataattaaaataactagggaagcagagcaaacaaattcaaaagcttgcaaaagacaagaaataactaagatcagagcaaaactgaaggagatagagacacgaaaaacccttcaaacaatcaatgaatacaagagccgtttatttggaaaagattaacaaaatagatggaccactagctagactaacaaatccctataaaaatccctgaatagaccaataacaagttctcaaattgaggcagtaattaatagcctaccaaccaaaaaaaaagcccaggatcagacaaattcacagccaaattctaccagaggtacaaaaaaggaactggtaccattccttctgaaaccattataaacaatagaaaaagagggattcctccctaactcatttgatgaggccagcatcattctgatatcaaaacctggcagagacacaacaaaaaagaaaatttcaggccaatatccctgatgaacattgatgtgaaaatcgatgtgaaaatcctcagtaaaagactggcaaacaaaatccagcagcacatcaaaaagcttatccatcataatcaagttggcttcatctctggtatgtaaggctggttcaacatacacaaatcaatacaggtaatccatcacataaacagaatcaatgacaaaaacacacaattatctgaatatatgcagaaaaggccttcaataaaattcaacacccattcatgctaaaaactctcaataaactaggtattgatagaacatatctcaaaatagtaagagctatttatgacaaacccatagccaatatcacactgaatgggcaaacgctggaagaattccctttaaaaagtggcacaagacaaggatgacctttctcaccactcctatttaacatagtattggaagtactggccagtacttggaaattaacaggcaagaggaagaaataaagtgtattcacataggaagagaggaagtcaaattgtctctatttgcagaccacataattgtatatttagaaaaccccattgtctcagcccagaaattctttaagctgttaagcaacttcagcaagtctcaggatacaaaatcaatgtgcaaaaattacaagcattcctatacaccaacaatagacaaggagagagcgaaatcaagagtgaactcccattgacgattgctacaaagagaataaaatacctaggaataccacttacaaaggacatgaaacatctcttcaaggagaactacaaacaactgctcaaggaaataagaaatgacacaaaccaaaggaaaaaaattccatgatcatcgataggaagaatcagtattgtgaaaatggccctactccccaaattaatttatagattcaatgctatccccataaggctactattgactttctttgcagaattaggaaaaaaactactttaattcatatgaaagcaaaaaacgattccatatagccaaaatgatcctaagcaaaaagaacaaagctggaagcattatgctgcctgacttcaaactatactacaaggctacagtaaccaaaacagtatgttacaggtaccaaaacagatacatagaccaatggaacagaacagaaacttcagaaataacaccacacatctacaaccatctgatatttgacaaacctgccaaaaacaagcaataggaaaagattccctatttcataaatggtgctgggaaaactggcttaccatatgcagaaaacagaaactgaaccacttcattataccttatagagaaattaattcaagatggattaaagacataaatgtaaaacccaagaccacaaaaaccctagaagaaaacctaggcaacaccatttggtacatagccatgggcaaagacttcatgactaaaacaccaaaagcaattgcaacaaaagccaaaattgtcaaatggtatctattcaaactaaagagcttctgcacagcaaaagatacaatcatcagagtgaaccagaaacctacagaatgggaaacaatttttgcaagctacccatctgacacagatctaatatccagaatccactaggaacttaaacaaatttaccagaaaaaaacaaacaacaccatcaaaaatgggtgaaggatatgaacaaacacttctcaaaagaagaaatttatgcagtcaacaaacacatgaaaaaaaagttcatcatcgctggtcattaaagaaatgcaaatcaaaaccacaatgagataccacctcacaccagttagaatggagatcagttagaatggagagtcaggaaacaacagatgctggagacgatgtggagaaacaagaacacttttacaccattggtgggagtgtaaattagttcaaccattgtggaagacagtgtggcaattcctcaaggatctagaaccagaaataccatttgacccagcaatcccattactgggtatatacccaaaggattacaaatcattctactataaagacacatgcacacatatgttcattgcagcactatttacaatagcaaagacttggaagcaatccaaatgcccatccaagatagacgggataaagaaaatgtggtacatatacagcatgaaatactatgcagacattaaaaagaataagttcatgtcctttgcagggacacggatgaagctggaagccatcattttcagaaaactaacacaggaacagaaaaccaaacaccacatgttctcactcataagtgggagttgagcaatgagaacacatggacacagggagaggaacataacacatatgggcctgttggggcatggcgggtaaggggagggagagcattaggacaaatacctaatgcatgtggggcttaaaacctagatgatgggttgataggtgcagcaaaccaccatggcacatgtatatctatgtaacaaacatacacattctgtgcatgtatcccagaacttaaagtaaaattttaaaaaagctgaacatttttagagcacaaaatgtcattcatgaaaatattttgaatatttttgaagttaaataactatggagacaagatggctgactacaggcagctaggaggaacatctgccaccaagatactgggaaaccgggaagactgctgcacctcgagcagatctctggaaggaagcagttaacagtgaacagaaggaggacacagatgatgggctgaaggaagaggaagttgggaaccctgcacagggctaccatgctccggtactcattcctggcccccagtgactcctgggaaagcggtgagttgagcaggcaaggcatgacctgctattcccacaggcgtctggaatcctgccagcatgagaccccatgactgcttgggacacttaaactggcagggagagccacttagggaggtggcatgggcaagactccagcatgtgtggaacccagggggtttggtgtgagaatatttgcaggggagcatgaccagggaagtccatcacccaagactacccttgctcccctgggagactctacccttaggggaactgttgcacccaaacagagcacagcaatcttgcccatgtaatggagacagtgtaacatgagcacccttcagtccactggcctctcctgggtccccagcctggccatttctgcttgcagtgcagcctagtatagccaacctgggtgcttcctggggacccgcattatcgtttctgcactaccagatcatacctgacctttggggacatccagcagagtggcctccactgacaggcaccagcccaccagctccctcccctcaacacagccctcactgtgccactttgccagcacatacttgcccatgaccactcccccatcacttagcttgcgcatgggcaaaccttgcctcaccttccctgttggcatgtgggtttatgtgcacccctcctaggcattgttgctaagatgagtactgccaccatccctgctgccatgccaccatgccaccattgccagtgaaaacacatgcacagacaccactgtccctgacccccaccctgcacagccatctgggctagcattaaagcacacacagtgattgcccacccagcgtctgctagcgcccctcctctgcgctgacactatcactggtagcaaggtacacgtggaccccagaggccccaattcctctcttctcctttccccaagcactgcctctcccattactgccaacactggcacagaatccagcagccctaagatcactagcaccctgacaagctgaggagcatgcaattcactgcactgctgctgctaaagtgcaaatgatcacagttctcactgctgcaaccaatggaagagctttggctggcacaacccttcagattgttgtggccagtaatctgggaagacctcagacccaccagtgcagcagtttcccaacctcaaggggccagaaaacaaagccaggagcctgatactagcctcccagaattacagcactcagcccaggcattggccccccaaaagtctaccagaaatgaagacagccaaataaacccatctcataccacaatcaaatacccaaggacatcaaagaagataaaagaaaagaaaaaaaattccaatggacaacaacttcaaagactgaaggaacattagaccacacagatgagaaagaaccagttcaagatctccagaaactcaaaaagccagagtgtctttttacctccaaacaattgcactagttctgcagcaattgttcttacccaggctgaaatcgctgaaatgacaaacatagatttttgaatatgaataggaatgaagatcatcgacattcaggagaaagtcaaaacccaatccaatgtttctaagagatatgatgaaatgatacaggagaggaaagacaaaatggtcatttttatgaaaggataaaactaagctgatagagctgaaaaactcacctaagaatttcagaataaaattgcaagtattaacagaagaatcaaccaacctgaggaaagaatctcagacctcaaagaacagttctccaaaataactcagtcagacaaaaataaggaaaaaaaaataaagaagaataaataaaacctccaagaaatatgggattatgtaaagagaccaagtcaactacttattggcgtctctgacagagagggagagagaaaaagcaacttggaaaacatatttcaggatatagcccatgaaaattccccaaccttgctagagaggccaaccttcaaattcaggcaacactgagaacccctgaaaaatactacacaagaagacaatggccaagtcacatagtcatcagatttcccaagttcaaaatgaaagaaaaagaaaatgttcaaagcagctagagagaagtggcaggccacctacaaagggaacccaatcaggctaacagcagacctttcagcagaaacatgtaatgcaaaagaaaatgagcccctctattcaacattattttattttattttattttattttattttattttattttattttattttatttttgagatggagtctcgctctgtcgcccaggctggagtgcagtgtcatgatctcggcttactgcaagctccacctcctgggttcatgccattctcctgcctcagcctcctgagtagctgggactacagtgcccaccaccacacccggctaattttttttttttttttttttttttttgtggagacagggtttcactgtgttagccaggatggtctcgagctcctgacctcgtgatccacccacctcggcctcccaaagtgctaggattacaggcgtgagccactgcgcccggcctattcaacattattaaagaaaacagcttccaatcaggaagttcatatccagccaaaataagctttaagtaaaggagaaataatatccttttcagaccaaaaaaaaaaaaaaaaaaaaaaattaaacgtatttgttaccaccagacctgtcttacaagaaatcatgaaggaagtgctaaaactggaaaggaaagaccattattggccactacaaaaacacacttaagtacatagaccagtggccctagaaagtaatcatacaaacaagtctgcataataaccagctaacaacatgatgacaggaacaaatcggcatatatcaatactaaacatgaatgttaagtgggctaaatgccctaagtaaaagtcacagggtggcaagttggattaaagaagtaagacccaactctacgctgtcttcagaaaaacccatctgatattctcatatttaatgacagccataggctcaaagtaaaagaatagagaaaaatctaccaagcaaatggaaagcagaaaaaatcaggggtggctattctaatttcagacaaaacagactttaaaccaacaaaaataaaaaagacaaagtagggcatcatacaatggtgaaagactcagcttaacaagaatacctaactattctaaatgtgtacgcacccaacacaggcacactcaggtgcataatgcaagtctttagagaccaatgaagagacttggacaaccacacaataatagtgaaggatagcaacacctcactgactttattagatagatcattgaggcagaaaattaaccaagatattaatgacctgagcacaacatttgaccaaatggacctaatagacatgtgcagaaaacttcaccacaaaacagcagaaaatacattcttctcatctgtacatggtgcatgctctaaaatcagcaacacaatcagacatatagcaatcctcagcaaattaaaaaaggatgaaattacaccaaccatggtatccaaccacagtgcaatcaaattacaaatcaacgctgagaatattgctcaaaaccacataattacatgaaaattaaacaatttgcttctgaatgacatctgggtaaacaacgaaattaaagcagaaatcaagaaattctttgaaagtagcatatgaacagacacttctcaaaagaagacatttatgcagccaacagaaatatgaaaaaatgctcattgtcactggtcattagagaaatgcaaatcaaaaccacaatgagataccatctcatgccagttagaatggtgatcattaaaaactcaggagaaaacagatactggagaagttatggagaaataggcatgcttgtatactgttggtgggagtgtaaattagttcaaccattgtggaaaacagtgtggtgattcctcaaggatctagaacaagaaataccatttgacccagaaatctcatttctgggtatatactcaaaggattataaataattctactataaagacacatgcacacgtatattaattgcaacactattcacaatagcagagacttggaaccaatccaaatgtctatcaataatagactggataaagaaaatgtggcacatatataccatggaatactatgcagccataaaaaaggatgagttcatgtccttttcagggacatggatgaagctggaaaccatcattctcagcaaaatatcacaaggacagaaaaccaaacactgaatgttctcactcataagtgggagttgaacaatgagaacacatggacacaggaaggggaacatcatacactgggacctgttggggggtggagtgctaggggagggatagcgttaagagaaatacctaatgtaaatgacaagttgatgggtgcagcaaaccaacatggcacatgtatacctaatgtatatgacaagttgatgggtgcagcaaaccaacatggcacatgtatacctatgtaacaagcctgcacgttgtgcatatgcatcccaaaacttaaagtataataataattaaaaaaaaataacccaaacaacagacaccaggacctacctgagggtgaagggtgggaagtgggtgaggatagaaaaacttcctatcaggtactattctcatcacctggttgatgaaataatctgtatactaaacccctacaatactcaattttcctatataacaaacatgcacttgtacccctgaaccttaaatgaaagttaaaaaataaataaaatgcatattcattaataaataaatttctgtttttaagccaccccagaagagtataatattgtatgtaaatagtttggaaaagtagcattaactttaacgtaagagacaaaatgcacatttgctactttgtatagtatttgattacttatcatttatttatgatcttctatatatactgaaaaccatttcatttattacctgcagaatttcaataacattgctgtaaacactgtttttgcttgtgatgctgtaacacattacctgagactgaataatttataaagaacagaaatttatcttttatagttctggaggctggcaagtccaagatcaagatgctgacaggttcattgtctgatgaaagctgctatctgcttccaaggtgaagccttgttgttgcatcctccagaggggagggatactgtcttctcacatagtagaaggcagataggcaagctagctaaatgctgcatgaagatacttttctaagggccttaatcccatgcattgaggagcactcttaacccagttacctcacaaaggccccatctttaataccatcaccttggccattaggtttcaacatctgattttgaaagggatatagtcaagccatagtaaataccaagttatttattttcagaaacttatttatgaagtcatttttccatgcaaactctacaaatattcactttcacttttagatttagatgaagttttcataaaagcaaaaacaatgaaatggctgcatgtctaccctcctcactttggtttctctgccatgatttggcttactctgctttctaatccctatagacatacttagagaaacaccttgtgtatggggtaaaattctaaagatatttgctaagttaatgatttcatttagttgaaattacttttgaagttattttatattcttttacattgcccttagaaacattgcatttaatatgattttggtatgtaaccctagagagtaacaggtataacaagtgaaaatatatttataagattggtaattatgacatacaatagggaatacctatataaaatataatgtaacatttaataaacatttaacattttaatgaaataaaagtgataatataaagttgaattcatacatgttaaatatagatacaatggaatttcaaatgtactgttatctattagttttcggcttctggctacagatcaagagctgaaaatctagcttagactgtagaactagggaataataaaaagcaggaaaggaagagtaaaacatctttaggtaatatgaattaacttatggtaattaactaaattttccccttctccacttttcttatttatcatattatataaaatgaaatttgctgggttttggagtcaaatattttaaaaattatattctagaaaaataaattatttgtgtgcagtatatattttaaaagtagtacttgttataatttagagaaatactcataagtgtttaaataatataaatggggaaggaactcataatggattcacgaatttcctttgtatgttttttactttaccccgactagagtttccaattttataattgtatgtgagggaatgtagttactccattgtttccccacacattgcctagcatgctggttagcactcactaggtcttcgttgaagacttggttggttttctgcccatctgctactagcacaaggcacatttgtttatacatttctgtattcagtaaccagtcagtcaatatctgtcctatgtgagctacccacagcaggacaaagtcacagcaaattgtcagtgcacacacaggaggagtgaagctgactgtgaatttctgggagtgcctggacaatatgccaagagctagtctgtgaagagaaagtagagtcagtggatttaggggcaggtcagggtgaaatgctgagtcagcacggtaggagagatcaagtatgagtagaggcaatcacaagaatcagaaactggcacggtacacccagtacaggaatgagggcaaagtgcagccactcatgacaagtcacaagacaagaaattagttcttagattcccttcaaaagcctgagacattgcgatacaaagctctggtcttccaaacagaagtcactggaaaaatctcttggagagttaagcagtaagttttagaatatatatgtaatgatcatttctttccttgagcataggaacttcggtcttgttccttgataaactccatgaacacaatacactgtctggaacgtagtaggtatttaataaatatttatcaaatgaacaaatacaggaacatctgcagtgagtcttctgagggctgatgcttcaataagatgcatgcattttcttttttgtattcattcaatcaaccaaataagcaaaaaattatgaatctcatatatgcataaaactatggggagtacacatatatacatgcaatataattgctatccttaatgagttttcaatctcatagaaactgcaaaaccttcacataaagctataataaataagaaaatagtatgccacaagtgagatgtacacaaggtaaattggaagtgatgaactctggcctcagattaagagaagactgtgtgaagggggtgatatttcagctgagtattgaaggacagggaagcttgatgctaattaaggtgggaaacaacctatgtagaaagaagggtaaccagaaaagcacagaaataataaattgccagttgagaaatagctagtaatccaatttgcttgggaatgtgagatatgttggaaagagaatagtaggaaaagaagcaggaaaggtagcatgggtaattattagggtgattctcattaaccaggctaaggagagttaaactctactgtggaatagttggaagctttggtcaggggaaaggcataaaccaaagcttttctttaggaagatgatctgataacatatatcctggggtaaatcagagaaggaactagtacaaaatagaatgtcatgcaggagaccattgccacagccaagaataaacaaacttcaaaagcagcaaagatgaggcaaagtcatacatattttagtaaaaaaagtttttaaaaataaattttactgaagaaaacatgtcctttagtgaaacataaggccctatttttcgtatggcatataatttaaaaatttcaaaacactttgcattcataggtgcaggataaattggtatgttgtgtttcatgaataacataattttcaattcaaataatatattggtctatttgatttgaaggtcatgtacttttttgtcattttaaattttttgtttttaattgttgtgagtacatggtagatgtatatatttacggggtacatgagatgttttgatacaggcatgcaatgaataataaatgagccctcttgtttgatgaaacaggtgtggaagttaaggaatgaattaacttataataattaactgaattttccccttctacacttttcttattcatcagacatattataaaaaatgagatttgctgggatttggagtcaataatttttaaaattatattctagaaaaataaattgatacagaattgtcattggaataggtcatgtcacaaggaaatatgtctagataacaaaggccttctgagccctgaacaatagcaatgatattgtaaatgctattatagaattaacaatgtaaccatctgaaaaggactttcttggtgtttcaaaggtggaacgtcagcttggtttgaagtttgtaccgtttctatcataaataaagttttggcttattgttggaaaaaattaaaataatccctctttatgcagcatgatgactaaaattgttcatctaataaaagtaatttctgaattttgctatttttcccattttgatgttgctttggtggtcccaatttgatcgcatataaacattaattcatttatcaaaacctgaaacattctaaatttctgatttgtcatacaaatatagatccgcttatcctaccctgatataactgcaaaatgcaaggtgaatgtatgagtacatacattcatgaaacatgaaaagagttcctgaattaaaagcattatgatcaatcattaacaaacagaagccgctatttgcactagaaaaatatgaagaggattttttgttttaaaattgcattcttcacacttaaaccagttgcagatggcatcaagcaagcaatttttagaactgattttatgagattacttaccaatgtgagtactgagaagttatttttgctgagtcttctacagtaccttgaggaccaaaattcctgaatttaactttaaaatgacctgaatctgcatttcataggccagtaggtatagtaaaattggaaagggatgcatgcaaagcttgcaactattaagcatctccaattaaagtaggcctgacatttctgtaagtattaatgtgagggtataaaaataaattatatttttaaagttctttatttctctattcagcccagcagaaaattttttctgtctcatctttttctcttcacatgtaaaattatcatttaacggcctacagtttattactgctgaagtttctttttttaagtatttatgtgtttgaaaaattttactcacatacacacctacagtaatttctaaagagcaaacaaatgaaaaagagcatctcgttttcatatatatccacccaacagtttaggtaaatctattcttgctctctgatgtggagatgtgcagggaaaaacaaaatcaaactagaggcaagaacgaacaaaccaaaatcagtccctggaaaactgttggctcattgtcatcaaaataattgggtgtcagaaggaaacacaagtgtttatctcataaaagcaactacggcagaatagctttaaattgctcaattccctatgccacaaagagaactgaaattaaacacatcttgggatatttgcttttcgtcttgcttttctaagatattccctgtcaaatctttatcaaaggtcattggtaatcatatttaaaagataaaaattcagatgtctttattcctctggttttaatgatcagaaaaagacatttgtatccacaataaggagaaaccctttctaaatccaataatactctctatttctttagtaatgtactatatttattatattttaaatatgtatatcagttctaaatttaatttaataaatacctgaaagcctactgcatcctggggacttgcagaaataaatggatatagggaggtgtctgtgatgtgattcctgtcctcaatgtttaaagtatgtaacatattgaagaaatgacaaatgagtctgacaaatgagtataatgtagctgatgtgatggtatttactggaagatgatttgggaaggtattttgagaccagatcttggatagtgttagtttcttgcttaaaaattgtgaataatcactctgaaattttacttcctgagtggatattctggctccattatttattgatcctagataaattaattttaatgattttcagtttctttatttataaaatgggcagaatagtacccattttatcaattatttataagaattaagtaaattaagtgtaatgcctggcatacagttgggcttagctgtctgacttgtttttgatcaatgagatatagatggaagtaagattccttgttcctagcaaaggccttaagagatagtacatgatcctgctgaacttcttgcataatgctgtgatttttatgagaagagtatttctgaggtagcaactgctccctcagcctgaactccagtatgaaacatatgaaacaaaactaaacctgaccagatgcctggaaagagctcagctaatgtgcattatgaaacaaagctgctgcagccaacccacaaacccgtaagcaattttacatacttgttatttagtgttattttgggtgttttttagtgagggatttttgcaacaatagctgactaataacagcactctatatatgtcagcaaatattacctttaatacaatctgaaatagcaattctgattcactaaacagtctttcatctaagccagaaccagagtagattctgtaggtggagatagtaacatgagttagacacggttcctgccctcctttatgctattcattatggaaaatacaaaaaggacacagatgcaaatatcatgccatgccacaagtacaaagcaaatgttttggcattcagaaggagacatcagttgcaggaaaatgaatctggacaaagtttgtggaagtgtgggcatttgtgctgagctttgaaaaggaagtaaggattttaatagaacagctattatatggcttttattgcctaaatattctctgattgatttaatgtttctaaatcccaaagcaaggtatgtgagtttttttgaaaaaattagttataatattcgaagacccaaacaacattagttcattgatttaatagttctctgttccttacagagtaccttgtaggtgtgtatgtgcatcctcattcctatttatacaaggaggaggagcctaaaagcataagaaatgttttgacctgttcgtagaacatttttgctactgagagtttaactattgtgttaaaatctgagagagagagagagagagagattacatgaagttttggtgtttggttttatgagatttaggacagttcaatatgttttaaaaagtagctagaaattaaagccattcctttccattcatttatgcatctgtgttttatttgctttctctcaatggttctatagtgagattctcctttttcaaatgtaccacccatatggccttgatttaactagtctatgagttactaactatagaatctatgccttgcctccttgatatgtctgaggcctgttgcgacaagttctggccttctactcttgtatttggggaggtgttaaacttcttggggaatgtcacttcatttatttctgtgtgagtgcagttgtgtgttcagtacgtgtttatgctgtaggggtggggaaaagtagaagaaacagaaaggtttgtgttctgctcatctgaaaccctttatgtggcttttattgtccaaatattctgtgggaaatatagcccccatagggtttttttgataatctttgtaggacattaaatcatcttttacatcatcttaattatcatcttagtcattactactataactaacatttatagagctatcaattatgtgtcaagtacttcacatggaaaattttttaatatttaaaatacttaaatgagggaaatattatttatttcctcactttacagaggaagaaatatatgaaatggaatgattagacaatttgtactaggccacacagctagtaagtcacagaagtagaattcacactcagatgtgtctgacaggagagactgtactagtactccttcttccatacatttcagttagttattcagagaacaattagagtttcttatccacgtcagtactctctgctgctggaaagtcaataaagtgttttgtacatggcagctataacagttaaataaatatttagcggttaaataaatattgaataaatggcagactgaaaactgaaagagtctggcgttttaatggagaggttctactcaccaaccttgccagttctttggaagaccaatgtcaggtaacacagctactattctcaagtaagtctcgggcaattctggaaattatattaatgtactgagtatgcaacttccaaaatgctttatatttgacaatgggaataacttccactttgggagaaaaacatcaatcatcaagtatgtttatgttcattttgatttctaaatcatatattctatactcttcaaaatcaactcaaggaacagaagtttctcttggtatttcctaaataagctgcaaaggcaccatacgaaaaagtctagtgtccaaaatttatgacttttatgttgtcctttactgtggatttgttgtgccagtatattactttatggaagaatgtcttagtggttaagaatttgacacagtgaatctgatagatttaagctcaagtcatagctagctgtataagcctggaaaagttatttaatgtctttgaaacttaatatcttcatctctaaaataaggatctgtaaacatattgaagaccactatttgctaggtactgtgctagaatctggtgatagatcaagatcacaaatatgaatttataattaaaattgtagctaccaagaactcaggtatacgatgctataaaaacatttaatataggcaattgatctagacatggagatgaaggaaagatctccttaagaatgtgatgtagagaaagagtaagagataggtaatgtaaaaagaggatgctaagatagttgtgagtattaaataaaatcatatatggaatgcacaaaacctgacacatagtaagtagttaatacatgttgctttttatgtacattattagtatttttgttttctttggcatatattttggttatgtattgctgcagaaagaaatacctaaaacagggtttaaaataaccattttattatatcatctgattgtatagctcaggttttgagaaaaaacttgctcaggcaattggtctcttatttgatgtgacatttactgtgacatcttgggctaaaggatctactcccaggatggcttttgtgactcatccacgtcaggtgacttggttttccttggcatcttaatttcttcacatggaaactcatccaccagttcttttccatatggcttgattttctcatgacatggtggtctcagagtagtcacatttttaaatgaaagttcacatctccaatagtgcatgtaccaagacaggaagtaaaaagacccattatcttaatacctgggtctgaaagagtattgcatcatttctaccatattctatgggtcaagcagggtttgcatagatttaagaagaggaaacatagagctcatctctcaatgaatatcagtttaaaaattggtggtcattcttaatctacaacaaaatgaaaaattatacatttattatatgctcataaaatttatgacaatgtctacaatgattataaaaaactttgcaattaatcttggtgttctagaaaaatgtagccatttgagtgtcgagagatgtggcttctggcccctacttctccttaaatgccaatgtggctttgagcaatcagattaacttctcaatgcttagttctctattcataaatcagcctttgttgggtaacacctaggggtaaggcactacagcaaaaattaggatgcctcactacaagggactgataattttgtttgaattggaccaaattatttgtaaactatagaattgcttcctgctgtaaagatttgtgatttgtagagatttgttaactttggcagaagactaatattggtgccaaatatgaaatttaacacaattcaagtaagatcttcttagttttcatgaacagagaagttgacatctttaggagaaggataaaacctcttcaaatagttcccacttacagagagttttcctgtgtgataatgaggttatttagggtgaatatgtatgtctaaaattttctattatctaacatgttggcctaagtatttttcaaattgttctcttaaaaagatttacttaacgtggttttattgtctacctgtgtattagtctgttctcacactgctaataaagacacacccaagactgagtaatttataaaggaaagaggtttaaatgactcactgttccacatggctgtggaggcctcacaaccacggcagaaggcaaatgaggagcaaagtcacatcttacatggcagcaggcaagagagcttgtacaggggaactcctatttatggaaccatcagatctcatgagacttatttcctattatgagaacagtcctggagaaactgccccgatgatttaattatcgccaccaggctctgcccttgacaagtgggaattattattacaattcaaaatgagatttggttggggacacagtgaaaccatatcaacataaaactatctttcattgatgcataagttaattattgtgtaattatatattataattattgtgattttaactgtcatctctatgctgatgcttcacaaacctatatttctttagccttaggttctgcctagggtttcaaattgttttactcataaatatgtgagtgtgccagaggcatctcaaatccaataaatcttaaaaggaaacactcatctggccttcctcaaacctgattttttaatctttatttcaaatttaagtaaatggcatcaccatctaccaatattcatgagttccacatcctgtaagacataaaaaaactctagaaagttttcatgctaattgttctcaaattatttcccttctgtcactctacattaccactgccctatctggtcagctaccactctaaacttttgcaaaacactcctaactaaactagctttctttgtcttcagtattgtcatctttacatccatcttctaagaatacaggcagagtaattctctaaaatcaaatgggattgttgcattctgctgcttaaatttgttaatgacgtaattgtatttaaattctatatacgttatgttctctttcatctctagaaatatgtgcttaatgttccctttgtctatgatgtttcactctcacacacaacatttcagactgtcaccattcagcttatacctctactatgaggccttgggcaagctatttatattttaattttattgtttaaaattattttattaacaaataattatatatatttatgaggtataatattttgatatatgtttacaatatggaatgaataaaacaggctaattaacaaatttatcccctcatacacttatctttttgttgtaaaaacatttaaaaactagtctttcaggattttgaaatatacaatgcattattacttattatagtcaccattctgtgcaatatatcactaaagcttatttctcctaagtgaaactttgtacctcttcatcaacatctcctgtctcccaaacacaccctcatctagcctctgtaacctttattttgccctctacttctatgtgttcaatttaaatctaaaaaagttagatataagtgagattgtgcactatttacctttctgtgcctggcttatttcacttagcataatgttttccatatatatatatatatatacacacacacacgttgttgcaaatgacagtattactcctttttttaaggctgaatagtattttattgtgtatatgtatcatattttctttagcaattcatctgatggtgaacacctaggtttctggattgcatgttaattccatttttaattttctaaggaaactttatacttcttcccataatggttgtattaatttacattttcacaaacagtacacaaggaatcccttttcttcacctccttgccaacatttgttatctcttcttaccttttttataaagccattctaatcagcgtaaggtgatacctcattgtagttttaatttgcattttcctgatgatcagtgatgatgagcattttttcatatatctgctggccatttgtatgtactcttttaaaaatgggttatttgtccagatgttgtttgagtttttttaaaattatcattatactttaagttttgggatacatgtgcagaacgtgcaggtttgttacatatgtatacacgtgccatggtggtttgctgcacccatcaactcgtcatctagtcatctacattaggtatttctcctaatgctatccctcccctattaccccacccaccgacagggcccagtttgtgatgttcccctccctctgtcctcattgttactttttgtcctgttattgagatggttgattttcttatatattttgtatattagccccttatcaaatttataatttgtaaatattttctcccaaactttgggttgtctcttcactctaataattgttgttgttttctttttttgatatgcaagcacattttagtttaatgtaatctcatttttaaaatttttgcttttgttttctgtggttttgggattatattcaataaatcattgcccagaccaatgtcatggaacatttttcctgtgttttattctagaatttttacagcttccagtcttatgtttaagtctttaattcattttgagatttttgtatatggtgtgagataagggtccaatgtgattcttctgcttatggacatcaaggtttcccaacaccatttattgaaaagaccatcttttgtctattatatttgcctggcacctttgtcaaaaatcaattgaccataaatacatggatttatttttgggctctctatcctgtttcattggtcaatgaatctgtttttatgccagtatcatgctgttttgattgctatagccttaatagattttgaactcagttaatgtgacatctccagttttgttattttctcctcaaaattgctttggctgtttgaagtctgtgtggttccctgcaaatattagaactattttttttgtttctgtgaagaatgacattgaaattttgatagggattacattgaatctgtagattgatttggatagtatgggcattttaactctatttatgcttccaatccatgaacatgagatagttcatgtttatttgtgtcatctatagtttcttcaattaatgctttataatatttagtgtacaaatctttcacctccctgaataatttacttatatattttattttttgatactattgtgaatattattgatttttaaatttactttttgaatagtctattgctagtgtaaagaaatactactaatttttgcatactgattttgtaccctgaaacatcactgaatttgttaattatttctaacaagtttttttggtggcatttttaggcttttctatatatatcatgtgatcagcagatgagatattttaatttttccttttctatttggatgccttttatttctttttcttgtctaacttatctgtctatgacttccagtgctatgttaaatagaagtgatgagagtggacatccttgtcttgttcttgatcttagagtaaaagctttcaacttctcaccattgagtatgatgttaactgtgggcttttcaaatattgcatttattgtgttgaggtacaattttacaccaaagttgctaagagtttttattcataaaagaatgttgaattttgtcaaaagcttttttagtatcgattaagctatttggtttctgtcctttattctgttaatatggtgtatcacatttactgctttatgtatgttaaaatattcttgtatcccagggataaatctgaattcatcatggagaatgattctcttaatgtgctgttaacatcagttttctagtattttgttgagaatttttgcatctatgttcatcagagatattagcctgtaattttttttatttttatttattttattattattatgatactttaagttttagggtacatgtgcacaacgtgcaggttagttacatatgtatacatgtgccatgctggtgtgctgcacccattaactcatcatttagcattaggtatatctcctaatgctatccctccccccttccccaccccgtaacagtccccagagtgtgatgttccccttcctgtgtccatgtgttctcattgttcaattcccacctatgaatgagaacatgtggtgtttggttttttgtccttgcgatagtttactgagaatgatgaattccaatttcatccatgtccctacaaaggacatgaactcatcatttttatggctgcatagtattccatggtgtgtatgtgccacattttcttaatccagtctatcattgctggacatttgggttggttccaagtctttgctattgtgaatagtgccgcaataaacatacatgtgcatgtatctttatagcagcatgatttatagccctttgggtatatacccagtaatgggatggctgggtcaaatggcatttctagttctagatccctgaggaatcgccaaaattgaaaaatgggatctaattagcctgtaattttctttgcttgtcatgacctcgtctatccttagtgtcagggtaatgctggccttgcaaaatgagtttggaagtattctctcttcactttgatttttggggagagactgagaatgattgctattagttatttaaatgagtgatagaattctgctatgaagcctatcctgggcttttctttaatgagagatgttttattattgattcaatctttttactcattttggtctgttcagattttctatttcttcttgatacagcattgatactttgtgcatttctaggaatttatcccttttttctacattaaactattttttggcatattatttttcaaaggagtctcttatgatcctttttatttctgtggtattacttgtaatttgtcctattagtttatgattatatttatttgaggcatatctcttttttggtttggctaaatgtttgtaaattttatttatattttcaaataatcaacttagttttattgatctttctattgcctttctagcatatatttcatttttttctgctctgatgtttattatcaccttcctactactgattttagacttatgttaatttttttgttccttgagatgtaacatttagttgtttacctgagatctgtgttatttttttcacgttggcatttgttgttataaactttcctcttatgatggtttatttttctgtgcagaagcaaatcccatttggcaatttttgctttcgttgcaattgcttttagtgatttcatcatgaaactttgcctgtgcctatgtcctgaatggtattgcctagattttcttctagggtttttattgttttgggtttcacgtttaagtctttaatccatctagagttaagttttgtataaagtgtaaagaaggggcacagtttcaattctccgcgtgtggctagcctgttctcccagcaccattattcaatagggaattcttttcccattgcttgtttttgtcaggtgtctcaaagatctgatggatgtagatgtgcggtcttatttctgagttctcaattctgttttttagttctttcattactcttttacaatgttgtcatctttctttgtgctttgtcatattttttgtagcggtgtactttaattactttatcttttaagtatcaattggaggcttttttctttgtggttaccaggaatcttatagaaaacattttatagttttaatgtcttaattcaacctgataataccttactacaatcacatacaaaggctctataattttgcttcccccctccacatattattcttttgatgtcatactttatatatatttatattgtttatctgttaaccagttgtttacagctataactgatttaatactttgtctttgttttacttttttttattatactttaagttctggggtacatgtgcagaacatagaggcttgttacataggtaaacatgtgccatggtggtttgctgcacccatcaacccgtcatctactttaggtatttctcctaatgctatccctcccctactctcccatgccctgacaggctctggagtgtgatgttcccctccctgtgtccatgtgttatcactgttcaccttctacttatgagttagaacatgcgatgtttggttttctgttcctgttagtttgctgagaatgatggtttccagcttcatctatgttcctccaaagaacatgaactcatcattttttatggcttcctagtattccatggtgtatatgtgccagattttctttatccactctctcattgatgggcatttgggttggttccaagtctttgctattgtgaacagtgctacaataaacatacgtgtgcatgtgtttttatagtagagtgacttataattccttggggatatacccagtaatggcattgttgagccaaatggtatttctagttctagatccttgagtaatcgccacactgtcttccacagtggttgtactaattcacactctcaccaacagtgtaaagtgttcatgtttctccacatcctctccagtatctgttgtttcctgaattttaatgatctccattctaactggcatgaggtggtatctcgttgtggttttcatttgcatttctctaatgaccagtgatgatgagcgttttttcatatggctgtgggccacataaatgtcttcttttgagaagtgtctgttcatatactttgcccactttttgatggggttgtttgcttttttcttgtaaatttgtttaagttctttttagattctggatattagccttttgtcagatggacagattgcaaaaattttctcccattctgtaggttgcctgctcattctgatgatagtttattttcctgagcagaagctctttagtttaattagaccccatttgtctattttggcttttgttgccattgattttggtgtttaagtcatgaagtctctgcccatgtttatgtcctgaatagtattgcctaggttttcctctagggtttttatggttttaggtcttacatttaagtcttcaatccatcttgagttaatttttgtataagatgtaaggaagggatctactttcagctttctgcatatggctatcaagttttcccaacaccatttaagaaatagggaatgttttccccattgcttgtttttgtcaggtttgtcaaagatcagacaacgttaaatgtgtgatgttatttctgaggcctctcttctgttccattaagttttggtaccagtaccatgctgttttgtttactatagccttgtagtacaatttgaagtcaggtagcatgatgtctccgactttattctttttgcttaggattgtcttggctatgcgggctgttttttgattacatataaaattttaagtagttttttccaattccgtgaagaaagccagtggtagcttgatggggaaagcattgaatctataaattactttgggcattatggccattttcacgatattgattcttcctatctatgagcatggaatgtttttccatttgttttccatttgtttttgtgtcctttcttatttccttgagcagcggtttgtacttctccttgaagaggcccttcacctcccttgtaagttgtatttctaggtattttattctctttgtagcaattgtgaatgggagttcactcatgatttggctctctgtttgtttgttatttgtgtataggaaagcttgtgatttttgcacattgattatgtatcctgagactttactgacgttttttatcagcttaagaagattttgagctgagatgatggggttttctaaatgtacaatcatgtcatctgcaaacagagacaatttgacttcctcttctcataattgaatactctttatttctttctcttgactgattgccctggccagaacttccaatactatgttgaataggagtggtgagagagggcatcattgtcttgtgccagttttcaaagggaatgcctccagttttgcccattcagtgtgatattggctgtaggttagtcataaataactcgtattattttgagatacgttctatcaataactaatttatagagagtttttagcatgaagggcggttgaattttgttgaatgccttttcttcatctattgagataatcatgtggtttttgtctttggttctgtttatgtgatggattacaattattgatttgtgttatgttgaaccaaccttgcatcccagggatgaagccaacttgatcatggtggataagattttgatgtgcttctggattagtttcctgtatttaattgaggattttcacattgatgttcatcagggatattggccttaaatttccttttttgttgtgtctctgccaggccttgttatcaggatgatgctggcctcataaaatgagttagggaggattccctctttttctattgtttggaatagtttcagaaggaatggtaccagctcctctggtagaattcggctgtgaatccatctggtcctggactttatttcttggtaggctattaattactgcctcagtttcagaacttgctattggtctattcagggattcgacttcttcttggtttagttttggagggtgtatgtgcccaggaatttatccatttcttttagattttctagttcatttgtgtagaagtatttatagtattctctgatggtagtttgtatttctgtgggattggtggtgatatcccctttatcattttttattgggtctattttaatatttgctcttttcttctttattagtattgctagtggtctctctattttgttgattttttcaaaaaaccagctcctgcattcattgattttttgaagtgtctttcatgtctctatctcctttagtttggctctgatcttagttatttcttgtcttctgctagcttttcaatttctttgttctagtttctctagttattttaattgtgatgttagggtgtcagttttagatctctcctgctttctcttgtgggaatctagtgctataaatttccctctacacattgctttaaatgtgtcccagagattctggtacgttgtgtatttgttctcattggtttcaaagaacatctttatttctgccttcatttcgctatttacctagtagtcattcaggagcaggtttttcagtttccatgtagttgtgtggttttgagtgagtttcttaatcctgagttctagtttgattgtgctgtgttctcagacagtttgtttggatttctgttctttaacatttgctgaggagtgttttactttcaattacgtggtcaattttaaaataagcatgatgtggtgctgagaagaatgtatattctgttgatttggggtgtatagttctgtagatgtcttttaggtccacttggtccagagctgagttcaattcctgaatatccttgttacttttctgtcttgttgatctctcgactgttgacggtagagtgttagagtctcccactattattgtgtggaagtctaagtctctttgtaggtctcaaaaacttggtttataaatctgggtgctcctgtatcaggtgcatatatatttaaaatagttagctcttcttgtttcattgatccctttaccattttttaatacacctctctgtctcttttgatctttgttggattaaagtctattttatcagagactaggattgcaacccctgcttctttttagcttttcatttacttggtaaatattcttccatccctttattttgatcttatgtgtgtttttgcatatgagatgggtctcctcatttcagcatatcgattgttccttactttttatccagtttgccagtctgtgtcttttaattggggcatttagctcgtttacacttaaggttaatatttttatgtgtgaatttgatactgtcattttgatttgagctggttattttgcccattagttcatgcggtttcttcatagcatcgatggtctttacaatttggcatgttttgcagtggatggtactggttgttcctttccaagtttagtgcttacttcaggagctcttgtaaggcaggcctggtggtgacaaaatctctcagcatttgcttgtctgtaaagaattttatttctccttcgcttatgaagcttagtttggtcggatatgaaatgctgggttgaaaattcttttctttaagaatgttgaatattggcccccactctcttctggcttgtggggtttccaccgagagatctgctgttagtgtgatgggcttccctttgtgggtaacctgacctttctctctggctgcccttaacattttttccttcatttcaaccttggtgaatctgacgattatgtgtcttgtggttggtcttcttgaggagtatcttaggggtattctctgtatttcctgaatttgaatgttggcccaccttgttaggttgggaaagttctcctggataataccctgaagagtgttttccatctgaaatggaaatgactccccaccctgctttggcttgccctccatgggctgcacccactgttcaaccagtcccaatgagatgaaccagttacctcatttggaaatgcagaaatcacccgccttctgcattgatctcgctgagagctgcagactggagctcttcctattcagccatcttgccagcaatctctattttactcttatacttgcattatctgggatttactcactgacattacagtatgagtattttggatttgactatgtttacttttatctgtcagttttatacttgtatatgttttcacattgttacttactatcttttgtttcaactcaaagaatcccctttagtatttcttgtgaggctggtcttgtgtttttaaactccttcagctttcgtttgccttggaatgtgttcatctcttctttattactgaaaaagagctttgcagggtataatattcttggttgacattgtttttcataatcactttgaatatgtcatctcactcactttctcctggcctacaagtttgctgttgataagtcctttgacagctttatgggatattgtaatatttaacactttcttttttcttgtttcattcaaaattttatctttatctttgtcttttgacattttcattataatatgtctcaaagtattctttttttgaagtaatttttcttaaggtcctctgggcttactgcatctgtatgttcatatccctgccaagatttgggaagtttatagataatatttctttaaataagctttttgcctctttgcatcttttatttcctttggatactgtcataattcatgtatttgtgtgtttcctggttacccaatttgctatgctttcttaactttcataaatcatatattttttgttttcttaattggctaatttccaataacctgtttttgactttgttaatttttttcttctgcatgatcaagtttgctgttgaaactatctactgaatttttcagttgtcccattgtattcttcaacttcaggatttctggttcttttgtatgatttccattatctttattatctctttctgttcatatattgctttcccaatttcatttagttgtgtgtctgttttacatcttattgagctttaagatgattcttttgaattatggctcagagaatttgcatatatctatttttttggttaatgatttgaactttacaagtattttggtggtatcatgttttcttaattatttgttatccatatagctttttgtcaacatcttattatttcaaaaaaacccatcttttattgctacacactggtttcaacaagttaaagtctctttctattacgtatccatataggctaaaattgagacacagtcttgtttcaagtccacagccaagactaagatcctcaggcttattttaaaagacacaactaagcatgtcttctattggattccttggtaaacatgatcctaatttcaaatggagtttgagaagggctgttgtcagttaataaggccatgtcaagatccacaatgtgaccaatgtcagggcatcagcctgcaggggcacggatcaacctgcctccctccagatcctcaggctggcagaaccactgtaagtccacacccaagggtgaacaggactgagatcgggatgtttgaggattcagagtttggcaagcctgccacatggactcagatggccataactcctggtgggaccccagctggacagaactactccaagactacagatggaatacactcaaacttagtataatagctaatgtagaacctactgtgggacctatattggcaagcccaacctagctgtactagctagtgagactctcagcagtaccctatgtgtgcaggattgcttgcataccacagctgatagaggctggaactaaatttcagggccccttcggaaactgccatggggaagaggccagcaagcttgtccaggtgcatcttccatgagttccttgcccaggcgggataattctggagctgtttcagagagcggctgggaacaagagaaagcccttttattatctgctgtgggatgtagaccagcaagcctgtccacttggcacaaatgactgcatctcccagtagtttttttgtgccatcaggattgacattaggctgtacattagagggactggagtcaagcttcagtattccttcagggtctgctgtgggatggatgttggcaagcctgtcgtgatggcacagagagaggattcttccaactacttactgtacggatggtatagctccctgaatattgcagagagggcctggagctgagacagagctcctaaaggatctgctatgaggcagaagctggtaagtctgtcctggtggctcagactggaatgtttcctagtagttctctgcatggacattgaacaagttatgtaactaacagcttagtacttcagttacatcaacataaaatggggatgacactaatacctaactcacagggattttctatctctagaatgtaacttttatgaattaaggatgttggctctttaactgctatatcactaactcccagaacagtgcttagaacttagttggtactaaataacatttgctgaataaaataattttatgagtaaattcttggaaatcacttagaataatgtatgtagatattattagtcaagcatattaatattatcatgtgtattgtaggtatcagattaaatgtcacttcctcagggaactgtatcttatctactctcactaactaaattaacacaccaacttaaaaagttttattcccccaaataaggattaaataaagagaaaacattgaatagtttaggcaactcaaaaaataaatagtaaatgcttactatgcactaatttaccagggtcagataagaatttttattaaaaatatttcatgggaatgatgtccacaaaatggcagagtagtctgttacacacttccatcctccaacataaatattgaaaaaaaaaaaaagaaactgtaagaaacaacttggtgagaactctgaaaaagcagtcaaaggtttacagcaaatatgcaaacactaaaaacaataaagttaagatagtaggaaagctttataatatttttaactggcttgccttattttctttctggtttggcaagagcctaaaagagagaagcctgtattcttagtacaggatactatgtcctgtctatgaaggaacagaacaaatcctaatcacaaattgttggataagtcttttctaacatctatgaagtctacttgaaagagttatggaaggcatttgtctctgtttggcctacctcagaacacacccatgccagaaaagtgatgggcattgctcaaaaacattataatatgaacaaacagctttcagacatttgagaaaaattaaggttgtatcctatagtagcccaactaaaacctaagaggaaaagccagggaaagagtgactttgcaaaatgaggtctatctaaattccccacgtatgttgaggaatttagaaagctgcaattatcttcagagcaacacatctactcataaaaacctgagaaaatctgtagttttcacctaaatttatgggtaaatttttggaaatcacttagaataatgtatgcacatattatcagtcatagtatattaatatcatcctgcatgctgtaggtatcagttcaaatatcacttcgtcagggaactgtaccttaactactctcactaactaggttaatacaccaaaagataatttttaattccccaaaattaggcttaaaaaaagaaaaaaaacattaaatagttgaactgaaaatgttacgagacaagtgaaccactgtgatcttaaacttttttaaataaagcagatggaaagaaagaaggagaatcttacttttggtattactacattgtaatatttaattgtctggtttttaacaaaaagtttcaaggaatttaaagtaacagaaaaatatggcccatttatacaaaaaaataaataaataggtagaagccatcctgtgaaatcataggctttggacttgctagataaagactttaactcttctaaatgcattcaaagaactaaagtaaattgtagagaaagacctaaaaataatccaggaaaatgtaaaaaatgagagtatcaataaagggataaaaattatagaaaggaagaaaggagaaatatggagctaaaaattacaataactgatatcaaaatttaatacaggagttcaaaagcagatttgaacatggagaagaaaggataagtgaaatggaagatgagagaattaaaattatacagtctgaggagaaaaagtccatagagaatgaaggaagttgaatagatcataaggaccccatgagacaccatgcagagggcttcatagaataaaaaagaaaagaaaaagcagagacaatttttgaaaaaatggtggcccaaacacctcaaatttgatgacatacatgtatccacacaacaaacaacatcaacaaactccaggtagattaaactcattgtctcacaatgagacacattatactcaaattgttgaaagctaaaggaaaatcatcctgaaagcagccaaagaaaggtgacttatcctgtagaaaggatgcttaataagatttattaccactttctcatcagaaaccgtggaggccagaaaacagtgtgataacatacttaaagtaatgaaataaaaaatagggaaaaccaagaattctacaccagaaataaattgttcttagaagtaaggaagaaattaagacagtctcagataaacaaaacctgaaggaatttgttaccactagacatttgctacaagaaaactaaatgtggtgttttgggttacaatgaaaagacactagacagtagcctacaattatatgaaaaaataaagacatctgttatgattaatatatgagtaaatataaaagccattattattgtattttggtttacaactttatttttttattttctacatgatttaaaggtcattttttaaaaagtaatcataaatatgttcttgggcatgcaaatgaccaaagataaaattttctgcaaaaacaacataaagggaagacagaattatatagcagcatagttttatcatgccatcaaaattaagttgctaacaattcaaaccagattgctataaatttaaggtgttaaatatgattctcacagtaaccacaaaaatatctaaaatatatacatgaagaatgacacagatactaaaatggttcactaaaaaattcaactaaacaaataaaaagccgtactagagaaaatgagggatttgtaaagcatatgacatacagaagacaaacagcaaaataaaaaaagaaagcccttctttgtcactaattacattacatgtaagtagattaaaatatctattcaaaagaaagattggtagactggattttttaaaatgatcaaactgtacggattccactaaagactactaattttagagctttcttaatccatttctgttataagaaagtaccacagactgggtaacacattttatatatatgtatatgtatatatgtgtgtgtgtgtgtgtgtgtgtgtgtactatataaaaatttatactctatgtgtatatatactctgtgtatatatatgtgtatatatattatattatataatatatatatgatatagtatatattatatatatgcacattactatatagtatatattatatatactatatagtatatatgcatatatatattatataatatatactatatcgtatatatattatgtgtatatatagtatatataatgtgtatttatatattatattacatattactatatatagagtatatattatgtatatatattaattatataatacagtatattatgtatatactatatatacacatatagagtatatgcatgtatagcaatatgtacatcttaaaagcaaccaaagaaagaaaaatttaagcatatatatatatatatatatatatatatatagttttgaagtctgagaagttcaagactaaggcagcagcattgcttcctggtgaggacctgttccatcaatgatgtctactcaatgatgtctactcatcatagcatccttacatttgaaggcagaaggggtaaaaggagtgaactctttctgtaacatcatttgtaaggtcagtaattcattcatcatggattcctcatgaattaatcacttccaaaaaggtctcaacttttaatatccccacaatagttatggagtttaaatatgaattttagaagagacaccacattaaaatcaaaacaagattcatagagacatagtttgaaagtgaaaggatggcacatcaatgtcctagggctgccattaaaaagtatcaaaaactagcatactaaaacaagaaaagcgtattgtctgactcttctggaggcaataagttcaaaacccaaatattggcagggtcgtccttcctccaaagattttatgggagaatatttccttgttgttttcagcttcaggatgcttcaggcactccttagctttttgcagtgtaactcttatttcagcttcccttgtcacttagcatattctgtgtgtgtgtctcttcttatatgaacccgagtcatattgacttggagccaactctacccatcttatattaacttgattacaactacaaacaccttacttcaaagttaggccatatttatatgcaactagggttaaaacttcaatatattattattagagacacaggataacacataacagataggaaaagatatgtcattacagttgtaaccaaaacagagcttaagtagccatactatatgacaaaataaaatgtaatcaaactgttacaaaagatatcagacattgtacacggatatgtttcaattcatcaagaagatacaaatattataaacacatatgcacagaagaatcccaaattataagcagcaaacattggcagaattgaagggataaatagacaattctaaaatgatagttggatacttcaatacatcatttttaatagcatagtaactatatggatgatcaataaagaaatataaaacttgaccaacactgtaaaccatgtgcaactgtcagacatctgtagaacactacacccaataactgcacaatacatctacttctcattgtacatataacattgtcaataataaatcatgtattaggccacaaacaagtttcagtgcatttaaaaatattgaattcatgccaagtatcaccctgaccaaaacacataaagctaaatatcaaaaacaaaagaaaaattgaaatatcatgaatatgttaaaattagacaatttttaacaaccaataggtcaaagaatatataacaagtaaacttagaaaatactttgaaatcagtaacagtgaaaacacaacgtgccaaaacatatgagaagaaatgaaagcagtgctcaacagaaagtttatagctgtaaatgttaacattaaaaaagaacaattttaaatcaataacttaatattaccttttaagaaactagaaaaacaagaacaaactaaacccaaagctgaagaaggaagaaaataataaagaatagacattaaataaataaaacagagaatagagaaacaatagagaaaatcaatgaaaccaagagttggtattttgaaaatataaacaaaattgacaaatccttagctatgttatctaataaaaagagataagattaaaattgaaatacagggacagtactactgatttgacagaaataaatatgttataaaggaataatatgaagaattatacactaataaattcgataagctaaatacaatatataaatttttataaatatgcaagctatagagactgaaccatgaaaaaataagaaatttgataagacctgtaactcgttaagagatgtaatcagtagccaaaaacttcccaagaaagaaaagcccaagaccagatagattcactagagaattctaacaaacatgtaaagaattaacaccaatctttctaaaacttccaaaaaattaaagagggtgaaaacttcctacctcatttctttaggtcagcattacccttatatgaaaacaaggacgtgcaaataagaaaactacagaacaatatcccttatgaatattaatgcaaaatgctgcaataaaatgtaagtaaattgaattaaatagcatatttaaaacattatatattatgaaaaagtatgatttcttccagaaaagatgttcaatatatgtaatttaatatgtatgatatgacaaattaacaaaacaaggggggaagcgtcatatgattatattaattgatgcagaaaaagcatttgacaaaattcaacactttttaataatacagacattctagaaatagaaggaaactacctcaaaataatgaaggccatatatcacaaatccacagctgacatcatactcattggtgaaaggcttgaaagcatggcaaggatgcctactttgaccacttatacgcagcatagttctggaagtcctatacagaggtattaggtaaatcaaaaaccaaaaggcaacaaaataggaaataaaaaaataaaattgtcactaattacagttaacataatattatatattaaaattttctaaagttcttaccaaataaagtgtgagaccaaataaacaaattcagcaaagttgcagataaaattaatacacaaaattacttctgtttctgcccattaaccacaaacaatctgaaaagtttagaaaaccattgcatttacagtagcaacaaaaagaataaaatacttatgattgaacttaaccacataagtaaaaatcatgtgcactgaaaactacaaaacattgtcaaaaccattatagaagacaaacaaatggaagaacatcatattttatgaattggaaaaattaaaaataaaaatattggtaccaacaaacaataactacaaattcaatgaaatccttataaaaattcctataaaaattccatgacattttgcaaaaatagaaataaccacccaaaattcatacacaatcataagggatcttgaatagtcaaagcattcttgaaaaagaacaaaaaaacttgagtctcagacttcttgatttcaaaacttactataaagcaatgaaaatcaaaacagtgtggtactggcataaaaaacacatgtaagtcaatgaaataataaacagaactccaaaataaaccatcacctatgtggtaaaacatattttcgcaaagatgacaagaccattcaatgaagaaaggatggtcttttcaacaaatattgttggctgaggcaggagaatggcgtgaaccccagggggcggagcctgcagtgagccgagatcgcgccactgcactccagcctgggcgacagcgagactccgtctcaaaaaaaaaaaaaaaaaaaaaaaaacaaattttgttaacatacaaaacaatgaaggtgtacctttaccatataccccacaaaaatttactgaaaatggttccatcacctacagttaagagctaaaactataaaattactagaagaaaacactctgggcaattttcatgacattggatttgataaggccaaaaaaaaaaagcacagagaacaagagaaaaactagataaattaagcacttttatacatcaaagagcactatgaacagagtaataatgaacccaactattgaaagaagtgtctgcaaacaaagtgtcaaatatatgtgataaggaattaatatccagaatacataaagaactcaactaaaaaaaataaaattgggcaaacaattcaatagatattttttcaaagaaatatacaaatggccagtaagcacattaaaatgttaaatttcactagcccttagagaaatgaaatcaagaccacaatgatatagcagctcacatacattaagatagctgtaatttttcagaataggaaaaaaataagtgtttttaatgatgtggagaaactggaagatactcacattgctggtgagaatgtaaaacagtgcaggagctgtagaaaacagaatagcagattctcaaatgctaaacagaattaacatgtgatctaccaattccacttctgtttatatacctaatgaatcaaaagcagaaaatagaacagatatttattcatccatgttcatagtagcatgatttataataaccaaaatatagaagcaaaccaaagatccatagacagacaaatgaataaacaaaaggtggttatgttcatctgttcatctacttgagctgtaataacaaaataccacaaataggtagctgaaacaacagaaatttattttctcttagtagttctggaaactgttaagtccaatatcaaactgccagcatggttggtgttttgtgcgatatccctccttgggttgcatatggccttgttcttgctgtgtctcatgtggtagataacctcgtcttatagcttcacccttaggatctctaattttgattatctcttaaataccttatcttcaattgcagtaacatttgcagttaggaatttgacatataaattaagggcagaacacaatttaacccatagcagtgatagacacatacaatgaaatattagtcagctttaaaaaggaataaaattttgatacatactgcaacataaataaaccttgaagacattgtaataagtaaaaaaaaagacattcaaaaatgacaaatattcctttcatttcacttaaatgaagtacctagaatagtcaaatttatggaaatagaaagtacagcggtggctgccagagactggaagaagaggagaatggagagttagtaaaaaaatgtctagagagttccagtggggaaaatgaaaaagtctgacagacaaaaggtagtgatggttgtacaacaatgtgaatatacttactatcacaaaatagtatgcttaaaatagttataacagtaaattttatgttatgtatatttaaacacaattttttaaaaattgaaaatgggaaaattactaccaatcatacagaaataaaaaattatcagatagactatgaataattgtacactgacaaattagataaattagattaaatttaaaaaattatagaaatatacaaataacctaatctgatgtaagaaggaattggaaattcccaacagctataaaaacaaaaaagaataaattgtttatttaaaagcttcacattaaatgcctatatcaaaaagtctgaaagagcagaaatagactatctaaggtcacacctcaaggaactagagaaacaagaacaaaccaaactcacacccagcagaagaaaagaaataatcaagatcagagcagaactaaatgaaattaagaaaaaaaaaatacaaaggataaatgaaacaaaaagctgcttctttgaaaagattaatacaattgatagaccattagcaagattaaccaagaaaagaggagataagatacaaataagttcaattagaaatgaaacagaagatattaaaactgataccacagaaatgaaaaacattattaaaggttactaggaacacctttacatgcataaactagaaaacctagaggaaatagataaattcctggaaatatacaaccctcctagattaaaccaggaagaaatgcctattctgaacagaccaataacaagcagcaagattcaaatggtaattaaaaagttaccaaaaaagtccaagaccaggcagattcacagctgaattctatcagacattcaaagaaaaattggtaccaatcctattgacactattccaaaagatagagaaagagggaatcatccctaagtcattcaatgaaaccaatatcaccctaataccaaaaccaggaaaggacatatcaacaacaacaacaaactacagaccaataactctgacaaacatagatgcaaaaatcatcaactaaatgctagctaaaagaatccaacagcatatcaaaatgataatctaccacgatcaagtgagtttcatatgagagattcagggatggtttaacatacagaagtcaataaatgtgaaacaccatgtaaagagaattaaaaacaaagatcacaggataatctcaatagacacagaaaaagcatttgacaaaatcctgcatttctatatgattaaaacactcagaaaattggcatagaagggacatatcttaaggtaataaaagccacctatgacaaactgacagccaacattatactgagttgggaaaagctgaaagcattccccctgaaaactggaagaaggatgtccactttcacaacttctcttcaacatagtactggaagtcctacacaggacagacaaaagaaagacgtaaaaggcattcaaatcagtaaagaggaattcaaactgtcactgttttttgatggcatgattgtatacctgaaaaaccctaaagattcatccaaaaagctcctaggactggtaaactgattcagcaaagtttctggataaaaaattaatgcacacaaatcagtagctctgctatacaccaacagtgaccaagctgagaatcaaatcaaaaactcaaccccttttacaacagctgcaaaacaaacaaacaagcaaacaaacaaactttggactatacctaaccaaggaggcgaaagacatctacaaggaaaactactgaaaggctggaagaaaccatagatgacacaaacaaatggaaacacatcccatgatcatggaagagtagaattaatattgtgaaaatgaccacattgcccaaagcaatctacaaattcaatgcaattcccgttaaaataccaccatcattcatcacagaactagagaaaactatcctaaaattcatgtgaaatcaaaaaagagctcacacagtgaaatcaaaactaagcaaaaagaaaaaatctggtatcaaaataggcatagagaccaatggaacagaatagagaagccagaaataaaagccaaatacttataaccaactgatcttcattaaagcaaacaaaaacacaaaatggggaaaggacactctacatcaaatggtgctgagataattggcaagccacatgtaggagaatgaaactggatcttcatctctcaccttatacaaaaatcaactctaaatgaatcaaagacttaaatctgaggccaaaaaccatcaaaattctgggcgataacatcggaaacaccctcctagacattgggttaggcaaagacttcatgactcaaaatacaaaggcaaatgaaacaaaaaaaatgaatagatggaacttaattaatctaaaaagcttctgcacagcaaaagaaataatcagcagagtaaacagacaacccacaaagtgggagaaaatctttgcagtctctacatccaacaaaggactaatatccagactctataaggaactctaacaaatcagtaagaaaaaacaaacaatcccatccaaaaagtgggttaaggacatgaatagagaatactcaaaagaagatatacaaatgaccaacaaacatataaaaaatactcaacatcactaatgatcagaaaaatgaaaatcaaaaccacaatgtgataccaccttactcccgcaagaatgcctataatcaaaaaatcctaaaacaatagatgttggcgtggatgtgatgaagagggaacacttttacattgctggtgggaatgtaaactagtacaaccactatggaaaacagcatggagattacttaaagaactaaatgtagaactaccattggaactagcaatgccactcctgggtatctacccaggaaaaaaaagaagttattataccaaaaagatatttgtacctgcatgtttatagcagcacaattcgtaattgcaaaaatatggaaccagcccaaatgcccatcaatcaatgagtggataaagaaaatgtgatatatatatacatatatatatatatcacattcctatatatatatatcacattcatatatatatatcacattcatatatatatcacattcatatatatatatcacattcatatatatatatatatacacacacgcatacacaccatggaatactactcagccataaaaaggaatgagataatggcattctcagcaacttggatgaaattgaagaccgttattctgagtgaaataattcaggaatgcaaaactaaacattgtatgttctcaatcataagtgggagctaagctacgaggatgcaaaggcataagaataatacagtggacttttgggactcaggggaaagggggagaaggtggtgagggataaaagactatacattgggtacagtgtacactgcttgggtgatgggtgcacaaaatttcacaaatcaccactaaaaaacttattcatgtacaataaataaatagataattagcattaaaaaaactcccaacaaagaaaatccaggaccagatggcctcactggtaaattacatcacacatttaataaattatcaccaatatttctcaaaatcttctaaaaattagaagaggagagatacttcttttttttttttattatactctaagttttagggtacatgtgcacattgtgcaggttacttacatatgtatacatgtgccatgctggtgcgctgcacccactaacgtgtcatctagcattaggtatatctcccaatgctatccctcccccctcccccgaccccaccacagtccccagagtgtgatattccccttcctgtgtccatgtgatctcattgttcaattcccacctatgagtgagaatatgcggtgtttggttttttgttcttgcgatagtttactgagaatgatggtttccaatttcatccatgtccctacaaaggacatgaactcatcattttttatggctgcatagtattccatggtgtatatgtgccacattttcttaatccagtctatcattgttggacatttgggttggttccaagtctctgctattgtgaatagtgccgcaataaacatacgtgtgcatgtgtctttatagcagcatgatttatagtcctttgggtatatacccagtaatgggatggctgggtcaaatggtatttctagttctagatccctgaggaatcgccacactgtcttccacaatggttgaactagtttacagtcccaccaacagtgtaaaagtgttcctatttctccacatcctctccagcacctgttgtttcctgactttttaatgattgccattctaactggtgtgagatgatatctcatagtggttttgatttgcatttctctgatggccagtgatgatgagcatttcttcatgtgttttttggctgcataaatgtcttcttttgagaagtgtctgttcatgtccttcgcccactttttgatggggttgtttgtttttttcttgtaaatttgtttgagttcattgtagattctggatattagccctttgtcagatgagtaggttgcaaaaattttctcccatgttgtaggttgcctgttcactctaaagttcatatggaaccaaaaaagaacccgcatcgccaagtcaatcctaagccaaaagaacaaagctggaggcatcacactacctgacttcaaactatactacaaggctacagtaaccaaaacagcatggtactggtaccaaaacagagatatagatcaatgggacagaacagagccctcagaaataatgccgcatatctacaactatctgatctttgacaaagctgagaaaaacaagcaatggggaaaggattccctatttaataaatggtgctgggaaaactggctagccatatgtagaaagctgaaactggatcccttccttacaccttatacaaaaatcaattcaagatggattaaagatttaaacgttagacctaaaaccataaaaaccctagaagaaaacctaggcattaccattcaggacataggcgtgggcaaggacttcatgtccaaaacaccaaaagcaatggcaacaaaagccaaaattgacaaatgggatctaattaaactcaagagcttctgcacagcaagagagatacttcttaattggttttatgaaaagagcattaccctgatactaaagtcagacaaagtttcacaagacatgaatataatacaccaatattccttataagtataaatgcaaaagtcctcaataaaatactatcaaactgaattcaacatcatattaaaataattatacactacggacaagtggcatatattccagaaatgtaagattatttcaacataagaaaatccatcaatgtaacagcacattcatggaatgaaaggggaaacaaaccatgattctctcaattgacacaaaaaaaaatcacttgaaaaatctgacattctttcatgataaaaacactcagaaatctattaaaacaagtggacttcctcaacatgacaaagggtatatacaaaaaaacccactggtgacatcatactcaatggttaaagactaaaacattttcctctatgatcaacaaccctacaaagatgccactgtaacaaatacctattctatattttcctgaaagttctagccaaaacaattagaaaagaaataaaaggcatcccaattgaaaagaaagaaggaaagctcttttcatgaatgacccaacctatatatgttgggtcattcattaaccaaaataatttaaaaaggatactagagtaaagcaacaaattcttcatagttgaacagaacaagatcaacgtaaaaatcgcttatgttcatggaaatcattcaacaatccaaaaatactaagaaacattaagaagcaatgtcaataaaaaataattaaaataccaggaaataaactgaagaaaagagctaaaatgcttgcacattgaaatcaataaaccattgattaaaaaataaagaaaatctaaataaatgcaaagacgtgatgatcatggaaaacttaatattgtgaataaggcaataccacccaaagtgatgtacagattcaatgcaatataccaaatatactttttattttactgtaaatgatcaatttatagttttacatatttatagaatagaaagtgattccctaccaaaattttaacaagaaattaacagcttttcttcatgttatcctatcactatcccactcagtccaagctgaaaattattctactgataaaactctatctccatacctagcttctgctgagatggctgaatggatccataaatcacaagcccataatcctttaaacaccacatacactcccttagtccaccctccggcatatactttctcatgttttgccatacgtatagactgagcatttcccaaatcttcatatttttgttctctttttgtaacaatacaaccttcactttgtctttctcctcttgcattttactaagcaacaaggagaaatgagaacatccattcaatgctttgcttaaaaaatttctcagatcaatattaaagttcatcacttacaaattctatcttccacaaaacaatagaacaaattgggaaatatttgtagaaactttaaaacaagaaacacctttcctgcagtttccaatagcatgttcctcatttctatctgatgtcaccagtaacactttagaattcatatttctactgacatgatgttcatgactatatatatacatatatgaatatatgtatatatgtaatagccttctctaaagctcttctctttttttttttttgaaacctcaccagagtcactgttgaagaccacatttctaccaaataactcttcaagacaatctaggcttttgtaatgtacacctcagaattacatcaacctttaccattatctagtttcaaagccacttccgtatttgtagatattttctttagcaccccccttcaatttctggaacaaaattctgtattagtttgctatgtgtaccatatcaaatattcagaaatttatatttttacagttctattatagaagactagatacccaaaattaaggtgccaggagggttgatctattttgaggcctctttccttggcttgtagatggccactttgtccgtgtctttaagtggcaatttccctgtgcatttctgtgtcttaaactccttttcttaaaaggacatcagtcatattgaattaggacccaccccaatgacttcattttaccttaattatgtctttaaagagcttatcttcaaatacaatctgagatactaaagagcaggacttccttaacatataaatcatggggagacaccatacttcgcataaaaaatggtatctcccattctgtgaattgtcttttcactattttgatagtgtctcttaatgcagaaaagctttgaattttcacaaacctttttcttttgttgcatgttctttttgtgtcatatccaaaaatcattgtatatctaatatcatgaatctttttctgtgttcttataaaagtttcatagttttagttcttacattcaagtctttagattgatttttaagtaaatttttgtatatggcttaaggtaagaatacactgttctttctccacttaattgtataaggatatttggagaaaaccttttgattgattatatatgtgagggtgtatttctggactctctattttaatctattgttatttatgcttgtctttattcaagtactacattgttttgattaccacacatttgtaggaaatccaaagtaagaaagtgtaagtcctccaacttttaaattgcattacaacttttttggccattattggtttttagagtttccatgtttaggatatggaatttcacctaaattaggattccactttaggataagttttggtatttctgataaaaaagtaattgcaatattgactgggattgcatctgtaatcttaataacattaagtcttctaatctgaaaacatgagacatctttctattaatttacatcttccttaattttttcaaaattttttagtttacagtgtataagtcttatttctccttgacaatttaaaaaaattgtagagaaggaatctttctttactggcccagctggttttgaactcctgggctcctgtgatccttctgcctcagcctgcaaaagtgaaaactgcctcaacctcccaaagtgaaggcacgagccaccatgcctggccaagatttgttctttactaaatttattgaaaaaagccttgtccacatctccttggattcattataaggtatgagagtctttccccttggcaatttctgttttttttgttaaccattattttaggttgaggtgtacatgtgcaggtttgttacataggtctgtcacaggggtttggcatacaggttattttttcatccaggtaataactatagtgtacagtaggatcttgatcttcacactcctcccactccccaccctcaagtaggccctggtgtctgtcatacccttcattgtgtgcatgagtacacagtgtttagctctcatttataaacgacaacatgagatgtttggttttctgttcctgtgttacttcacatagaataatggtctccgacttcatccatgctgctgcaaaggacataattttgtttctttttatggctgcatagtattccatggtgcacatgtgcaacattttctttgtggccccagtgtctgttgttccccccgtatctccatgagttctcatcatttagctcccacttataagtgataatatgcggtatttggttttctgtacctgcatttgtttgctaaggataatagcctccagctccatccatgttcctggaaatgacatggtctcattttttatggctgcatagtattccatggtgtatatataccatattttctttatccagtctactgttgatgggcatttaggttgattccatgtctttgctattgtgtacagcgctgcaatgaatatacacatgcatgtgtccttatggtagaacaatttatattcctttgagtatatacccaatgatgagattgctggatcaaatcacaattctcaaagggaatacttccagcttttcattcagaaattgccaaattgctttccacaatggctgaacaaatttacattcccaacagtagtaaataagcatttcctttctgtcacaatctctgtggccaaactgtggccaaactgtaaccaaactgtgaccaaactgtagttaactggtgcagtttgctgagcatgttttataaaggaaaggaaatgccaaaaccctggtaaagttgttccattgcagcctaagagaacaaagatttatttctcatcacttacatcaggcagataaaaattagtttccctcccctacctgaagcacttcatcagtagaaatagcctgataaataactagacagtctttgcactcaagagattccacaaaatgtaatgcaataatggaaaggtttaccttctttagcttcaaagttggagggttttggtcattttaattttatatcaaactagtgcttttcagccacagtatcttcactctgagataagaagttttcttcacaatgtatttttaatatcctcatgttcagttttaagacaaagcaactttaatactaggtgcacaccacatgaccttcctgcaaactgcttttcttgacaagttatgaagtagttcaaggaggtatggttaaggctgtattactgaatggtgctggtaaatactacacaatttttttttgtcatgttgcaaccttttgtttccaatttagtgactgctactatgaaatcagataactacaatgacaacattattaggttttgaactatgatttagtagcaacttaggttcccagttttaaccccttggcagcaagatccaagttccctcatttgcacattagcacctaagtgtcaagggattaaataaccagcacaaaagatactgcacttctgattgcagcatttggcagaactgaaaggaaaggaagttgtgctacatgttcaagggattgtgggcaacataaagatgacaccaagaaagataaaatgtcacatgaagtcttcataatcttgtacatatcctccatcataaccaccataatctgccggatcatctttcatggtggcttttaatcctcctccaggaaccacacctttcttcttttctgctgtgctttgcttttcttgcttctgtttttcattgcaaagcactgtcagtgaattggcaatttttttcaagtcatcaatttccaaggaaatacacacatctcaaactaagacttccaaaaaactggcataatatagtgacttttcattttgtgtaatttttgactttttggtaataaccatactgactggtgtgagatgttatattattgtgattttgatttgcatttcttgaattagtggtgttcagcattttttcataggcttgttggacacatgtatatcttcttttgaaaagtctctgttcatgttttttgcctaatttttaatagggttgtttttgcttcttaatttgtttaagtttcttacagattctggatattacacctttgaagtatagattgcaaatattttctcccattctgtaggttgtctgtttattctgttgatagcttctattgctgtgcaaaagctttttggtttaattaagttccctttatcaacttttgctttccttgcaattgtttttgctgtcttcatcatgaaatctttgccagcacctatgtcctgaatagtatttcccaggttatcttccagggtattgatagttttaggttttacgtttaatgtaaaggctttaatgcatctggagttgatttttgtatatggtgaaatgaaggggtacagtttaaatcttctgcatatgggaagccagttattctagcaccatttactgcacagggagtctttcctcactgcttgttttaatcagctttgtcaaagatcaaatgattttaactgtgcagagttatttcagggctctctattctgttccattgttctatatgtctgttttcataccagaaccatgctctttgggttagtgtagctttgtagtatactttgaagttgggtaatgtgatgcctttggttttgttgttttttgcttaggattgcattggctatttgggcccttttttggttccatataaattttaaaacagagtttttctaattttgtgaataatgtcattggtagtttgatagaaatatcaccaaatctgtaaatctctttgggcaatataacattttaacaatattgattcttcccattcataagcataaaatgattttccattcatttgtgtcatctctgatagctttcagcagtgtttcgtaattcaccttgtagggatctttcacttccctggttagctgtattcataggtattttattcttatagtggctattagcaatgggatttaattcttgatttagctctcagcttgcatgttagtgatgtataaaaatgctactgatttatgtacattgagtttgcattttaaaactttgttgaagtattttttatctgaacttaggtactttggggcagagactagcagagatagtttgactttctctcttactatttggatgccttttatttcattctcttgcctgattgttctggccagggcttccagtattatgttgaacaggaatgagaagagtaggcattctggtctttttctgattctcaaaagtggtgtttccagctgttgcccattccatataatgtttgctctgactcttttcgtagatggctcttatatttttgagatacgttctttcaaagcctagcttgttgagggtttttaatatgaagggatgttgaactgtgtcaaaagtctagcttgttgacacttttttatatgaagggatgttgaacagtatcaaaagccttttcctaatctattaaaatggtcatgtgccttttgtttttagttttgtttacagcatgaatcacttttattgattggcatatgttgaaccaaccttgcatcccaggaataaagcctactttattgtggtggattagctttttgatgtgctgcttgattcagtttgctaatattttgttgaggatttttgcatctatgttcattaaggatattggtttgcagttttctttagttttttgtgtatctgctaggttttaatatcagaatggcgctagcattgcagaatcagttagggaggagaccccattcctcaatattttggaataatttgaatagaaatggtaccagctcttctttatacatctggtacaatttggctgtgaatctctctggtcctggatttattcttgttggaatgtttttaacattgattcaattttggtactcattattggctttttcagggattaaacttcctcctggttcagtcttcacaggttgtatgtctcttgtaatatatccattcattctaggttttgtagcttttgtgcataaagttgttcatagtggtctctgaaggtgttgtatatttctgtctggtcggttctaatgtcccctttggcatttctgattgtgtttatttggatattctctttttgtttctttattggtctagctaattgtataccaattttatttatttgtttaaagactcaatacttggattcattgatcttttgtgtagtttttttgcaactcaattttattccattcagctctgattttggttgtgtagtttcttctgctatctttggattgggtttcttcttgttttttccaattcctctaattgtgattagatttttaatttgaggtatttataactttttaatgtggggggtttaacactgcttcagctgtgtctcagaaattcttgaaagttgcatctttgttctcattagtttcaaagaatttcttgatgtttgcattaatttcattgtttactcaaaatcatttaacaggttgtttaatttgcagtgtaattgtatggtgtttagcaatcttcctattcttgatttagacttattgtgctatgatacaagagtggggttggtataatgttgtttataaaaaaaattctgagaatagctttttggccaatcaaggggtcaattttagattatgtgccatgtacagatgagaaaaaaattatttctgttgttttagggtggagagttctatagatatctgttaggtccatttgtactagtgtcaagttcagttcctgaatatcttttttagttttctgcctcagtgatttgtctaccactgtcagtagagtgttgaagtctcccactattattgtgtggttatctaagcctcttcataggtgtctagaaacttgttttatgattctggctgcccttgtgtttggtgcatatatattttggatagttacatcttcttgttgaattgaactctttactgttatgtaatggccttctttgtcgtttttattgttgttggtccaaagtctgttttgtctgaaattagaatagtaaatcctctttttcttttccatttgcttggtagatttttctctatccccttactttgagcctattagtgtcattgcatgtcaaataggtcctttaaagacagcttacagttgggtttggttttattatccaacttggccctctgttccttttaatcagggcatttagcacatttatttcaggattaatatcaatatgtttgaatttgatcctgtcactatgttgttagctggttactatgcagactcatttgtgtagttgctttatagtgtcaatggtctctgtacttaagcgtgtttttgtggtggttggtaataggctttattttccatatttagcactcccttaaggacttcctataaggcagttctggtggtaacaaattcctttagcattttcttatctgaaaaggatcttattttttgttcacttatggatcttagttcagctggatatgaaatttgtggttgaaatttattttctttaagaattctgaatataggctgctaatctcttcaggcttgaaggttttctgctgaaatatacactgttagcctgatggggctccctttgtagcagacctacaccttctctattgctccctttaatatattttctttcaattcaaacttggagaatgtaatgactatgtgtcttataaatggtcatcttgtatagtatctcatagggctttgctgtatttcctgaattggaatgttggcctctttagcgaggttggggaaattttcataaacaatatcctgaaatatgttttctaagtggcttactttctgttcctctctttcagggaagccagtgagtcatagattggtccctttacatagtcccatttttcccaaatgttttgttcattctttgttcttgttttttctctatttgtgtccgactaatttaattcagaaaaccagtcttcatgctccaaatttctttgctcatcttagtctatttttctgttactccatatgactgtattatgaaattcttgaagtgagattttcagctctatcagattagttttttcttttttaatggtcattttgtccttcagctccttatcatttaattgtatgccttagattccttggatggagtttggactttcttctgaatattgatgatttttatttctatccatcttctaaattttatgtctgtcatttcagccatctcagcctgggtaaaagccattgcaggggaagaagtgtggtcttttggaagtaagaaaacaccggctttttgagttgccggagttcttgtgtgggctgtttctcatctgtttgggcttatatttgttcaatatttgaagtagctgccccttgaatgggttttttttccttttatattctttgatgcctttgggagtttgattgtggtattaatgttacaggttgttagacaggcaagagcagatcacgagggggctctcccccacccactaggaatgttggatgatgttttggcaattatcacattgcatctctaaaagtgataaactggcagctgacaccaaggagaggccattttctgaggttccatacctgttgcaataaagtgttaattgaatgcaagcaccagcagacaacaacttccctggcatgtgcattaagaaacaaaatggcagagtatgaacttctgggcacttcaccagaaaagggaagaaaagcttcagatgggcaagcatacaacttcctaaacacactgagtgtgctcacttcccaagggtaaggagggcactgcacatgtgggcagccgacccttagggaagaatcatgggaatggggccagcccataaaatcctagcatcagggttaaatggggaacttgacccagtgtctgcttgaatctcttccaagcatactttttttctttcctgttctaaagccttttagaatgaacttccactcctgctctgaaacttgccttggtctctttttctgccttattcccctcagtcaaattctttcttctgaggaggtaagaattgaggttgccgaagactcatatggaattgccgccagtaactcagataccttctattggtaacataaggtggtttcagctgagtggcttcattcctgaagtgtttagggggttaaagttcagctcactactcatggactacatgctacaactctggggggctgttaccaggtccccaaatttgttatctggccccttgaaattaggaacctgttacactggaggagccatttgtttccagtcagctggccacaacattccaataggtggtgctggccaaagtgctgcatcagggttatggcagtagagtccatgctcgcttgtgtatgtcagcaactgaagtagtgcagcaaagtgcacacttatcagcattttattgaaaataatgttgttccttttgaaaatattgtaagtggaattattttattaatttttatatgttatttcttgttagcgtatataaatacaaatgatttttgtgtgttgattttgtgtcctccatctttggtgaatgatggccctgatggggtttggacttgcatggggcatgtagcccctttcttttgtctgatttctaggaatgtttacccagtgcttatatcgccattgtgtcttggaagtaagtgacgacttttttattttacaggcatatatgtggaaaggacttgccttgtttcagatgagacgttggactcttgagttattattggaatgagtaaaagcattgggggattattgggaagatgtgattgcattttgaagtgtgagaaggacatgagataagggtggggccaggggcagaataatatcatttggatatgtgtccccaccaaaatatcatgttgcaatgtaatccccaatgttagaggtgaagcctggtgagaggtgatcggataataaaggaggaatttttatgaatggtttatcatcatcactttggtacagttctcctgataatgagtaatttttcatgagatctggacatttacaagtctgtagtgtctcccccgactctgttgctcttactcccacaatgtgacatgcctgctcctactttaccatctgccatgataataggcttcttcaggcattcccagaagctgatgtcagagctatgcttcttgaacagcctgtagaactgtgagccaactgaacgtctttcttgtttaaattacccagtcttagttatttctctgtaggaatgcgataatgatctaattcactagatcattattgttattgttcaactcccacttacgagtgagaacatgtggtgtttggttttctgctgctgtgttagcttgttgagaatgacggtttccagcttcactcatgtccctgcaaaagacatgaactcattctcttttaaggctagatagtattccatgatgtatatgtgccacattttctttatccagtctatcattgatgggcatttgggtttgttccaagtcattgctattgaaaatagtgctgcaatgaacacgggtgcatgtatctttacagtagaaagatttataatccttttgctatatacccagtaatggaattgttgagtcaaatggtatttctggttctagatcctggaggaatcaacacactgtcttccacaatggttgaactaatttacactcccaccaacaatgtaaaagcattcctatttctccacagcctcactagcttctgttgtttcccgacttttcaatgatgtccattctaactggcgtgagatggtatctcattgtggttttgatttgcatttctctaataaccagtgatattgagcttttttcttcatatggtttgttggccacataaatgtctttgtttgggtagtgtctgttttatactacaaagctacagtaaccaaaacagcatgatacttgtaccaaaacagatatatagacaaacgaaacagaacagagacctcagaaataacaccacccatctacatccatctgatcttcaacaaaccttacaaaagcaagcaatggggaaaggattccctgtttaataaatgctgctgggagaactggctagccataggcagaaaacagaaactggattccttctttacaccttatacaaaaattaactcaagatggattaaagacttaaaaataaaacccaaaaccataaaaaccctagaagaaaacctaggcaataccattcaggacataggcataggcaaagatttcatgaataaaacaccaaaagcaattgcaatgaaagacaaaattgacaaatggggtctaattaaactaaagagcttcttcacagcaaaagaaactatcatcagagtgaacaggcaacctacagaatgggagaaaatttttgcaatctatttatttgaccaatagctaatatcccgagtctacaaagagcttaaacaaatttacaagaaaaaaacagacaacccgatcaaaaagtgggtgaaggatatgcttttgttttttcagaagtttttgattactgattctgtctccttattactgatatatccattcatattttctatccattattcagtatttgtgagttgtatgtttctgggaatttatccattttatctaagttatctaacttattggcatacaattcttcattaaactctcttataatcctacttatttttttcgtagtaatgtccccaccttaatttctttttttttttttttgtagaaacagacacattcatatttgtacacatgtagttaatttagaacctgggacttttacaatcaattccccaaacccctttatggaaagtgatggactacacagcaatgctgaaggagcatattttctctctctaggaagaagaggattagtagacacaattgtgtgcatcaagagaaatttgcaataaaaaaatcaaagtaagacaaatgtcccagaaacctgaattttattgacactgttattttcccacagagaatcttagaaagctgtcatattttctcttaatgaatgagaggaacccacttgtatccctgaatcattctttgggaaaagcaacagaaacaattgacagtcacacttctaaaataaaacagtcactaccttcagtccacacctccacacccttacctgcctgcccaatggctgtcatttctgtaaagtcaccctcttgtactctggtgttaccacgagaattgaaattttcaagcagaaaaaaaaaaaaaaattcatggtataaataagtgactggtggcccaaaggaagtcctttgactatgaatccaattttctgttcaatccacactgcagagatacaagcataaaccaccattttggttcccaaattcttttcaagaactcatacaaaatattccagagaaatgaaatttaatcctcatcttcctcctcttcttcatcctggttaatttggaagtaacggaattcataactctcttagcaactacgtgcaaccaatcacatagattattcttcttcaaatattttttggtaagatatttcaaataccttttggaaaaaggcacctgggatgtcacggtgatatttctcttgctcctttcgatggtcactgccccttaccaagtttctcagcttttctgatcactttgatgctttcttgcaaaaactgctcaaaattggcagcatccatgattccatcttttatggggtgggtgcaatcaagagtgaatttcagaatctgcttcttttttttgccccccttcatcacaagctttttcacgggtgccatggcagtagcggaggcagaaagtcagatatctctttaacataataattttctttcctttggatgtatatccagtagtgtgattgctgagaacatacagtggtttaatttttagttttttggggaacctccatactgctttccacagtgtctgtactaatttacatatacacaatttacatatatatttacatacaccaacagtatgtaagaattccctttattcttcatcctctccagaatttatcttaatttctaattttagttatgtggtacctctcttatttctcagtcaatctagctaaagttgtgtcaattttgtttatccttgcaaagaatcaattttttctttctgtctttctttcttctttctttctttcttttttctttcttttttttttttttttgagatggagtctcactctggcacccaggatggagtgctgtggcgcgatctcggctcactgcaagctccacctcccggggttcacgccattctcctacctcagcctcctgagtagctaggactacaggcgcctgccaccacgcccggctaattttttttttgtatttttagtagagacggggttacaccgtgttagccaggatggtcttgatcttctgacctcgtgatccacccacctctgcctcccaaagtgctggcattacaggcgtgagccaccgcacctggcccaatttttatttttattgattttctctgttgtttatctattcttatatttatcttcgttctcatccatattaattttttccatcaaccaaatttgagctcggtttgctttttttccagtcctttatgttgtaaagttaaattatttactctagatacattttttaaataatgtaagcatttaagctataaattttcctcttagaccttctttgactgactgtgtaagtgttgggatgttgttttaaaattttgtgagtctcagtgtttttccgatcaatttttaaatatttttttctttaacctatttgttttgtaaaaaggtgtttcatttccacatacttgtaaatttttttagtattccttttgttatttactattagtttcattccatttttattaaaaatatatattgcacgttggtgttgtttgtttgtttctgagacagtcttcctcttcaccaaggctgagtgcagaggggtgaacatgattcactgtagcctcatcctcctgttctcaagtggttctcccacctcagcctcctgagtagctgggactacaggcatgcatcttcatgcccacctaatctattttctttttgaagagatgggatctcaccatgttgccctgactctttttaaactcctggcctcaaacaatcctcctgtctcagactctcaaaagtctgggattataggcatgagcctccttgctcagccatatgtttttaatctttatttgtaccaattttatggcctaatatatagtctaccctggtaaatgtttcatgtacagttgagaatgctatgtattgtggtgctgttttttgggtagagtgtcctctgtatttcttttagttgcaggtggtttatagttttgttcaagttcacagtattctcactgattatattgattaattttatgtgttaactttgctgggtaactgcccagcacatggtcaaatatcattctgaatgtttctatgaaggtgagttctttttggattagattaacatttaaatttgaggattttgagtaaagcagattaccctctataatgagggtgggcctcatataatcaagagaagctctcaataaaaatagaataatttatcctggggaaaaaaaatccttccagtagactgcctttagtttcagattgcaattatttctcagggtgatcagctagctacctggtgccaggtttatttcattgaactgctttcatcatggaagacagtattttgttgttgctaaaatatacacttactgcggatataaatttgccttccttttatgcacagcattgagactatggtcataggattcagtggtcttgccatgttttctccaccagaattatggagctggccaacagaaccatgaaatggtcttttgaagactctgtgacagtgcaatctaagtggtaaataccatgtagcgctggggcacatttcttcagaaagttgtgtatgatctaaaacagcatccagtatattgtaatgctcctcccatacccaggattcacaggtccaggaatcaacaagttgaaatgggaatggcaaaactattaccgctagtgactcacttgtaacaattttttttctataatattacaggtcttaattacaaagggatggatacttttactagaagacacaagaattccattgaattggaagttaagattgctcctcagccactttgagctcctcattactctgaattgtgaagaagagactattaatagcccagacacttctggaatgaaactttgtgtcagtccccaggtgaaaaactacaaccagctgaagtattttctaagagcaaaggaaatacagtatgtatagttatgagtaccagatatgactgcatgacaagttatagaaaaggtgattgtagttgtcttattttgttttgttatgaatatgtgtataaataattctttgttttcttctatgcttttatcatgtaacataatatatatttacattatatcatggttttacatattgtttactttacatcatattatttcagttatgggatatcaagaagaagagtaaacattttccaaagattttgcattctcttctgagaaaggagttagtacattttcagttatatgcggatagttgtattatatttggcaggagtatggtcttctaattttctttattaagagtttaggtatggtgtacagagatgtgtatagatggcagtttgacaaggggaggacttgtaatgtttacttttttgtgtcaacgttgttgggccacagtgcccaggtatttgatcaaacattattctggatgtttctttgaatgcgttttatggatgagattaacatttaaatcagtagacttgagtaaagcagattaccctctattgtggccgagaatcatcaattaatggaaggatttaattaaatgaaacagacatctcacaaggaagaaggaattctgccagtaaactgcctttgtacatggactacaactttttcctgggtcaccagtccgccagactactcttaatatattaaacttgcacctctgcaatcatatgactgatttcagaaagaaatccctttgtatttgcctatcaatctatctattcctttattgactatctatctagagaaattttatacacacatacacacacacacacacacaaacaattggccttctatgtctgtggcttctgcatctattaatccaaccaactgtgaatcacaaatattcaagaaaaaaaataatcactaagaaaacaataagaaaaataatatggccaggcgtggtggctcacacctgcaatcctggcactttgggaggccgaggcaggtggatcaagaggtcaggagttggagaccagcctgaccaacatagtgaaacaccatctctactaaaaatacgaaaaattaactgagcgtggtggcgggcacctgtaatcccagctactcaggaggctgaggcaggagaatggcttgaacccaggaggcagaggttgcagtgagccaagatcacacctttgcactccagcctgggtgacagagtgagactccgtctcaaaaaaaaaagaaagaaaaaagaaaaataatataaaatacagtataacaactatttacatagcacttacattgttttaggtattataagtaatctagagatttaaagtatataggaggatgtgcataggttatagacaaatactatgtcatgtcatacaagggacctgagcatctgtgaagtttggtatctatgggagtgtattagtctgttttcatgctgctgataaagacataactgagactgggcaatttacaaaggaaagaggtttaatggagaactcacagttcctcgtggctgtggaggcctcataatcatggtggaaggcaaggaggaacaagtcacatcttatagggatgtcagcaggcaaagagacatttttgcggagaaattcccatttttaaaaccatcagattttgtgagacccattcactatcatgaaaacagcatgggaaagacccgccactgtgaatcagttatctcccaccaggtccctcccacaacacatgggaattatgggagctacaagatgagatttgagtgggaacaaggagccaaatcatacaaggggttcctagaaaaaatcccctacagttacctaggaatgactgtgtagaaagaaaaagataagtctacagatcaatctccacagagatatctatatctatatgtctctctatatagatacatagataaaggtatttatatatgtatgtgtataagttcgtgctcacgctgctgataaaaaacatacccgagactgggcaatttacaaaagaaaggattaattggattcacagttccaagtggctggggaggcctcacaatcatggcagaaggcaagaagaagcaagtcacatcttatgtggatggtggcaggcaaagagagagcttgtgcagagaaaatcccatttttaaaaccatcagatcttgtgagactcattcattatcatgagaacaacacaggtaaggccattccccataattcaatcacctcccactaggtacctcccgtgacatatggaaattgtgggagttacaattcaagatgagatttgggtggtgacacaaccaaaccatatcatcctgctcctggcccctcccaaatcttatgtccttacatttcaaaatcaatcatttcttccccacagtcccacaaagtcttgactcatttcagcattaactcaaaagtccacagtctaacgtctcatctgagacaaagcatgtcccttctgcctatgagcctgtaaaatcaaaagtaagttaattacttcctaggtacaatggagctacagacattgggtaaatacagctgtttcaaatatgagaaattggtcaaaacaaaggagctacaggcctcatgcaagtccaaaatccagtggggcagtcaaatcttaaagctcagaaattatctcctttgactccatgtctcacatccaggtcttgctgatgcaagaggtgggttcccatggttttggatagctttgcctctgtggttttggtgggtacagcctgcctccctgaagctttcacgggctggtgttgtctgtggcttttctaggcacatgatgcaagttgtcagtggatctatcattgtgggatctggagaatggtagcccttttctcacagccccactaggcagtgccccagtagggactctgtgtggggctccaatcccacatttcccttctccagtgccctagcagatgttctccatgagaaccctgcctttgcagcagacttctgcctggatatccaggcattttctgaagtccaggcattttcatacatcctctgaaatctaggtagaggtcctctaaacctaattcttgacttctgtgcactgttaggcttaatgccacatggaaactgccaaggcttgaggcttccaccctctgaagctgtggcccgagctctatgttggcccctttctgccccaactagaggggctgtgatgcagggcaccaagtccctaggctgcacacaacccaggggccctgggcctggcccacaaaaccactttttcctcctgggcctccaggcctgtgatgggatgggctgccatgaaggcctctgacatgccctggagacattttccccattgtcttggagattaaaattaagctccttgttacttatgcaaatttctgcagctagcttcaattcctgctcagaaaatgggattttcctttcaatcacattgtccagctgcaaattttccaagcatttatgcttgcttcccttataaaactgaatgcctttagcagcacccaagtcacatcttgaatgctttgctgcttagaaatttcttctgccagataccataaatcatctcccttaagttaaaagttccacaattctctaggacaggggcaagtgtcaccagtctctttgctaaaacataacaagtcacatttgctccagttcccaacaagttcctaatttccatatgagactacctaaacctggactttattgtccatatttctatcagcaatttgggcaaagctatttaacaagtctctaggaagttccaaactttcccacatttttctgtcttctgagccctctgaactgttgcaacctctgcctgttacccagttccaaagtcgcttccacattttcaacaactccccactctactggaaccaattcactgtattagtctgttttcatgctgctggtaaagggataaccaaaactaggcaatttacaaaaaaaaaaaaaaaagcttaagcttaattggactcacagttccacatggctagggaggcctcacaatctggaacaaggcaagaaggagcaagttacatcttatttggatagtggcaggcaaagcaagattttgtgcagagaaactcccatttttaaaaccatcagacctcatgagactcattcactaccacaagaacagtgcagcaaagacctgcccccataattcaattaccttccaccagggtcctttcatgacatttgggaaatgtgcgaattacaattcaagatgagatttgggtggtgccacacccaaaccatatcattatgtgtgtatgtatgtgtacaaacacatacatctacgtagttaattctgtttatctagagaataccatagtgtattattcagtactagtacactgttctttttttgtggttgtgtatccattattaagagtggagtattaaagttgccaactgctattttagaaccccttttccattttcaattatgtcaatatttgcttcatatttcagagcgctattgcttggtgcaaatatgttcataatcattatatattttgagaagttagtcttttatcaatgtataatgttcctctttgtctcttgtagtaattttttacttaaagactattttgtctcttattggtgtagccagtccaactctcttttgttcagtatttacataaaatacatttttattcttttcactgtcaatctgtttgtgttctaggaaagttcagcatttgtagattgcatatatttgaatcatgtattttaatctatttttccactttatgccatttgattgggaagtttaatttgtatgattttttatttctattattttagatatggggtctttctatgtttctcacgctggttttgaactcctctcctttaaccatcctcctgccttggcctctcaaagcactgagattaaagtcatgagcctccatgactggacattcctttgcattggagtaattactaataagggaaaaaatagggttttttttcattttgttaatagggtttattttcattttgttaattttttaaatatattttatagatttttccattgtttcctccattacttcgttttgtgtttaatggattctttgaagttataaatgtttacaccctttttattttatttcttgtattcaatattttatttggggttcccatgaagattacatgtagcatccccaaattataataatctaatttgaatttataccaatttaccttcagtcacatactaatagaacttataactatactgttttactcaccttccctgttatgttatttgtgttacaagttacatctttatttattatgtgcctaatagcatagatttataattatattttatgcatttgtcttttcaaaaccatggaaaatttaaagcagagtcttaaaaccaaaattacaataataatagcttttatatatgtctatgtatttacatttacagaaattctttatatttttatatgcctttgagttactacatacagttcttacatttcaatctgaaggcatttctttatatttatatttctatgagcagataatagttgtatgaaggaattgccttagcatttttataaagatagtctactgaaaatgattccttcagcttttgtttatctgtaaatgtcttacgtcctcccttattttttgcaggagagtcttgacatatataattccaagttgacagggtttttttttctaaaaatttctttccgtgcattaaacagatcaccccactactttctggcctccaaggtttctaatgagaaattagtattaagaccattaaatggaggaaagaacagtctcttcagcaaatggtgacaggaaaaatgaatatgtacgtgtaggagaataaacgtgaacttttacctcatactttatagaaaaattaaatcaaaataaatcaaataacaaaacttaaggaataaatcataaaaatgtttcaaataaaacatagagttaaatcttcattaccttggagttgcaatagattcttagctataacaccaaaagcacaagctacaaaaaatagatacattggactccatcaaaactgaaaattttgttcatcaaaggacattattaagaaagtgaaaagacaacttaagttatgagtcaaaagatctgcaaatgatacacttgataaagttttagtgtatagagtataaaaataagataactcatttacattatgagaaaatggtttggataaacatttctctaaagaaggcatacaaatgatcaacatacacataaaaagatgcttaacataattagtcattggggatacacagatcaaaattacaatgcgatgccactactcacaaaataggataactattttctttaataatgtgaatcaagtggaactctcatacattagtggtgaaaatggacaatggtgcagctactgtggaaaacagtttaatggtttctcaaaaaaaaaaaaaacccaaattataacatgattcagccattacaccactagttatatactcaaaagtattgaagagtgactcacacacatatgtgtatgccaatatttgttgtagtgttatttatgatagccaaatcttgaaacaaactaagtgcttttcaagagatgaatggataaacaaaattacacacacacgcatgcacacacacacaatcattcagccataaaatttaatcagttcttattcatactatgatgtggatgaacattaaaccattacactaagtgaaacaagacagacataaaaaaactattgtatgattccacttatatgatatatataaaacaggcaaatttataaagggaaaatttcattagctgttaccaggggtgagaaagaagggagatctgaaaaattatttttaatgggtacatagtttctgcttgggagtaatgaaaatgttttgcaaatagatagtggttatgattgtacaacattgccaatgtgattaatactactgaatcttacatgtaaaattgtatgatttatgttttatgtattctataacaattaaaaaatattttcagctgtgaacctttattgtttcacctttctttttttgctttttacttaatttcttttatctcactctatctcaacctctctttgtacatatactctttactgattttcaaatttttttcactaggtcagaaaaattttttgcataaagtaagttgtttggcattttacagtacaaatataactttagcaataataatcatttatataatacataaaatactagaaactctactaaatgctctctatatattattctatttaatcttctatgactattaggaggcaggtagcattattatgaccaatatagaaatgagaaattatagcacagagaagttaattcaattttacaagatcacacagctagtcactggtgggatgatattcaaacagatatattgaagtttcagagtttctgctttttttttcttctattgatacacaaaggtatgtgtgtatatatatatataagatcttatatatatactatatatataatatatataagatcgtgtatatataagatcttttatatatactatatattatatataagatcttatatatactatagatcatatataatataataaagtatatatagtatatatataagatcttatatatactatatctgtactatatatactacatatgatatatctatactatatatactatatatagtatatatagtatatatagcatatctatactctgtatagtatatctataccatatacactatatatactctgtatagtatatctataccatatacactatatatgatctatatagtatgtctataccatctacactatatatactctatatagtatatctataccgtatacactatatatactctatatagtatgtctataccgtatacactatatatactctatatagtgtgtctataccatatacactatatatactctatatagtatgtctataccatatacactatatataatctatatagtgtgtctataccatatacattatatatactctacatagtatgtctataccatatacactatatatactctatatagtatgtctatgccatatacactatatatactctatatagtatatctataccatatacactatatatactctaatagtatatctataccatatacactatatatactatagattatatatagtatatatactatctattgcatatatgctatagatatactatctatagtatatctatagtatatatggtatagatatattttgtattttttatgcatttggtagactcttaaccagtgattccatctgatcttagaattttctttgttggatgacattttattaatgacataattccactatttgttattggtctgttttagtccattctcacactactatgaagaattacccaagactgggtaatttattgaaaataagaggtttaattaactcacagttctgcaggcttatcaggaagcatgacagagaggcctcaagaaacttacaatcacagcagaaggtgaaggagaagcatgcaactttttcacagggaggcagcagagtaagagagggagggggaagtgccacacacttttaaaccatattttatgagcacttactcagtattatgagaacagcaagggagaaacccactcccatgatgaagtcaccacccactagggctcttccccaaaatttggaattaaaattccacatgagatatgggtagggacagagagccaaccatattattccacccctggccccttccaaatctcatgttcttttcacatgtcaaagcacaatcatgccttcccaacagtcctctgaattcttaactcattcctgcattaagacaaaagtctaagtccaaagtcttatctgaggcaaggcaagtctcttccacctatgagcttgtaatttcaaaaacaaattagttacttccaagatacaattgggatacaggcattgggctaaatgttcccattccaaattagagaaattggtgaaaacaaaggggatactggccccatgcaagtctgaaacacagcagggaagccatcaaattgtaaagcttcaaaatgatctcctgactccctgtctcacatctaggccacacggactcaatggatggtctcccaaaaccttaggcagctctgctcccgtggctctgaagggtacagctcccatggctgctttcacaggctggcattgagtgcttgtggctttttcaggcacagagtgcaaactgccagtatatctaccattctggggtctggaggaccatggccctcttcttgcagctccattaagcagtgccccagtgaggactctgtgtggggctccaaccccacatttctcctctgcattgccataatgaaggttctccatgaagattccacccctgcagcagacttctgcctagacatccaggcattttcatacatactctgaaatctaggcaaaggctcccaaacttttaccttctgtgcacctgcagacacaacaatacatgggagctgcaaaggcttggggctttcaccctctaaagcaactgcctgagctgtaccttgtccccttttaggcaatgcaaaagcttgagcagctgggacagaggacaccctgtgccgaggctgcacagagcaacgggaccctaggcctgacccaggaaaccatgtattcctcctaggtctccaggcctgtgatgggaggggaagtctgcaaagatctctgaaatgccctgaagccatttcatcattattttggctattagcatttggctccttgttagttatccaagtctatgaagccagcttgaatttctccccagaaaaaaagagagtatatattttctactgcatggtcaggctgcaaatttttcaaactttcaggctgtgcttcccttttaaatataagctcaaatttcataccatctttttcttcatgcatatgagcatacacttttagaaacagccaagtcgttcatgaatgctttgctgcttagaaagttcttccaccagatgccctaagtcatctctctcaagttcaaagattcacagatatttcgaccagggacaaaatgctgcaagtctctttggcgaagcatagcaaaagtgacctttactccaattcctaataaattcctcatctttatctgagactacttcagcctggacttcactgtccatatcactatcagcaatttggttacaaccatttgacaagtctctatgatgtttcaaacattagcacaacttcctgtcttcttctgaggcctcaaaactgttccatcctctgctgacaacccagttctaaagtcacttccacgttttggggtatctttatagcagcaccccactgtctgtggtgacaaatttctgtattagtccgttctcacactgctataaaaaactacccgagactgggtaatttataaagaaaagagctttaattggctcacagttcagcgggcttaacaggaaacatgactgggaagcctcaggaaacttacaatcatggcagaaggtgaagggaaagcaagtaccttcttcctaggatggcaggagagagagagagagagagagagagagagagagagagagaaagtgccacaaacttttaaactgtcagatcttgtgagaactcactcactatcaagagcaagggagaaatgcattcccatgatccaacctcctcccatgatgtttcttccccaaaatttggaataaaaattccacatgagatatgggtggggacacagaaccaaaccatatcatggtttgtccagattttatatttcttcctgattcagtgttggttggttatatctttccaggaatcaattgattttctttaagtttttcagtttatatcatatagctattgataacactctccattgaccttttgcattcctgtggcagtgttgttacaactgtgtttgcatttataattttatttgggttttctcttttctttcctcggttagtctagctcgtggttttatcaattttgtttatgtttctgaataattgactttttatttcattcatcctttgtatatttttaaacttactatttcttttcatatactaattttgagtttggtttgctcttgattttctaatttatagagatacattgttaaattgtttatttgaattttttatgtaggtgtttacttctataatcttttctcttagcactgtttttgctgtatctcacaggtttcaatatgttgtgtttctattttcatttgtttcgagaatttttcttttatttccacattatttattgatccaatattcactcagaaacatgttattttatttccacatatgtgtacagtttccaaagtttctctcctattgatttctagttttatttcatcgtggtttgggaaaatacttgatatgattttgtttattttagaattttttgaggcctattttgggtcctaacatatagtctgtcctaacatataggatattccatgtgctgatgagaataacatgtaatcttctgttattggagaaaatgttctgtaaatgtctgttatgtccatgtgatctcagatccctttcaaatctaatgtttcttttttattgttcctctagattttctgtctatgctgagaatctcttattgaagtcttgctattactgtattaaaggctctctctcttgatatcaaataacatttgctttatgaatctgagcactcaattattgaattcatgtgtctttagtattgctatatatagctattcctgttagctcttggtttccattttggtggaatatagttttccacctttttactctcggtctattatgtttctttaccggtaaagtgtatttcttgtatgcagcatataattggatcatttctttgtccattcagccatatatatattcttttgagatggagtctcactctgttgcccaggctgtagtgcagtggtatgatctcggctcactgcagccttcacctcctgggttcaagcaattctcctgcctcaggttcctgagtagctgggattacaggcacccaccaccatacctagctgaattttgtatttctagtagagacagggtttcaccatgttggccaggctagtctcgaactccaaacctcaagtggtccatccacctcagcctctcagtgttagaattacaggtgtgagccactgcacctggccagtctatatcttctaagtggagaatttaattaatttacattcaaggttattattgtttcgtgaggatttttccttgtcatattattaattggttttttttgctgttttgtacattctttgttcctttctttgtcacttattgtttgttattgtggttttgcaggtttatatagtggtaccatttgtgtctgttctctttctcatttgtgtgtttgtgtcaccagtgagttcagatttccatgtgttatcattacaataactgtggtactttctctttcatttaggaaggacaatattgctagacgtagtatccttgggtgaaaattttgtttacttttttcttatcactttgaatatatcatcccattctctcctgacctatatggtttttgctgagaaatccactgttagtctgatgggagttcttttataggtgaaacattttcttgtcttgttaagaattctctcttgtttttaactttagatagtttgactatggtatgctgtggagaagaccattttgtattgtgtctgtttggggatcactaaacctcctgtatctggatttccaaatctcttgctagacttcaaaactttttgtctattattttgttaaataggttttcaaacaccttttttcttctctcacttttttgcataccaataaattgcagaattggccatgttacgatgccccatatatcacaaaggctttaatcattctttttcattgaaaaagaataattttggtctgactgggttatctcataggacccgtcctcaagttgtgagcttttttttcttctttatctagtttattgttgaagctttagaataaattttgtattttattcagtgaattcttcagttcccaaattttcatttgaaaaatgatgtttatctctttggtaaatttcccattaatattctaaattgtctttctgatttgtttgtatcgttttttggaattcttttgtgtctcactgaatttctttactaccaaaattttccagaatttttaaattttttattgggatctcttgctggagaattgttgtgctccttttaaggtgtcattttttgtttgtcacattttctatgttcttttattgatttctacacattttttgtggtagtcacttctcccaattttttgaatttgctttcatacctgaggaatttttcctgaatatgtgtcagtggttttggttgggtagagttctttggcttttattctgggtgtgtgcagtattgtagtctctgtatgatttatttgcctctaaacagcatcagtgctatctgtaatttcttcagtggtttagggtgtagttattaataaatgtggtagtaaagttttgtccaggacacggatcctaggtgggccaatcttcaggttccagtggtggtggcagaggactaaacatctctgttcttgagcccaaggatggcatatactggcacttttttagtgggttcaggtgggtaaattcctgggcctccaggtgtcttgcttgagtgctggtagtgacagctgtgttcttggcaggtgggttctcaggcttctgagcagttgtggcatgaacaatggcaataccagggcaggatgatactcttggtcccaagcagtgcatacttatgttcatgatagctttgatgggctgggaagactgatctctaggctcctaggtgacttgtgtgggttggtgctgttggtatgttgctggcaggctggatgtgtctgttttcactttctcagggggagtacacataagccagaggtagtgaaatgggcagagaaatccccaggtactcaatcatgctcaggtactgaggtggtggtgtcaggcttggcaagtctcacctcaggccgcttgtggtgtgcaggggcataggcataagttgtagtaggtagaacatggtgatctgtagtagtgggtgtggataatatgacctcaggattcatgctaaaagacagtggttctactcttggtgtttgtgtggttgctatcagaaatcccctgcagacagctctcagactctggggagtgcacactttttctctgcaagcagcagtagccacagtggtgtgtgtgaggatcctgtattcaggacacatactagaatacaggggccttgcttctggcatgggtatggttggcactcagagccccaaacaggatgctttcaggttctgtgtagcacttgcttcggtttctagctgcacgatgactgcaaggttgtgcagagagacaaaggaaatcctgccttctgtgtttgggcctgaaaacagagaccttgccgccagggagattgttaccgttcacagccctggacatgcagctgtcagatgtggagcatgagtgacagcactgcacaggagggtagggacctcatcttctacacatgagttggagtgcagttgccactcatagctccagacaggcagccttccgactcactcactccagctcccagtggcagcaacagggctgctgtggctgtggcagtgtgcagagcagggaagcagcttatctttttccatataagcccaagaacagaggctgttatgccagtggggttggggttgctgatcccaggctcagacagtcagctctcaggcttgcctgcctatgctccctatggcagtaactgctgcagccatatgcggaatggggaaggtattctactcacctattacaagcctgggcacagagtttgtggcatttcagggagcagggttgcttctgaaaagcacatgctctggtttcctttgttccagtggccacctccttgctgcactgcactgtcctttccatggatattagtactccctgtgtggtagagtagtcaatactctgcagcacttttgggtccagccaggactgtgccattgtagccctccaggttcacactgggtggtgtcagtgggagctcttgaaatgtggagataaggaagctgtggtttccagggaaggatgcagtcccatgatggctgtgcttttacgatggcacaatgttgcaaccgcttatgtctcacagggagtgtgcaagctagaatgtattcctcgtctggtgcaatttccttgtggagacttcagatcactacccatggtagtgtttgtgtcagtacaagaaccctctcatgattagaattgcagcagtccatggtcagattatggaccactgaaggtctcttcacttccccttttcccgcagtagggaatctcttaaggctcctgttaatcttggacaagctggtcactcactttcttctccctctgttcatcaggtatttccggtggtttctcttttgtacagcaatgttctctcttagattttctattcacggtgtgattattcatagttttgattcttctttctggaaagggcaagtgtcgaatgtctctagtctgcatattcaacctatctcctcagtttatgctctttttaaaatattattttcattaaaggataactgaaaaataaaatttttatatatctatagtgtgctatgtgaagttttgatatatgtatacgttgtgatatgatgagatagactaattaacatatccattaactcatttttacttatcattttttttgtggtgagaacatttaaggtctaaactcttagcaattttcaagcatacaatataatcttattaattgtaatcaccatgctgtatattacatctccagaacatattaattctgtctaactgaaactttgtatcttttaaccaatgtctctcaattccccagagactggggtggggtagtaatacagcctcaacctccagcaaccaccactattctttctgcttttatgagtttgactttcttgattccacatataagcaagataatctagtatttttctttctctgtctggcttatttgatttagtataatgtcctccagtttcatccatgttgtggcaaattgtaggagctccttctttctaaaggctgaatattacatatataaaatatataccacatatatatgtaatattatatatcatatatacacaccacattataacattttctttatcttggctattatgagtaatgttgcaataaatatgtgtgcgaagttatcttttcagcatattaatttcatttcctttgcatatatacccagaagtgggattgctggatcatatggtagttgtctttttaatttttgaggggtcttcacactgttttcaactaatagtgtttccaaccaacagtttacaagggttctaatttttccatgtccttgccaacacttatattttgtctttttgatgacagcccttctaaggggtgttaggtgataactcattgtggttttaatttgtatttctttcgtgaataatgtgtttgagcattttataacattcctgttggccgtttttatgtcttttttgagaaatgtctatttaggtctgtattagtcagggttctctggaggggcagaaccaataggataaatatgggtgtggtgtgtgtgtgtgtgtgtgtgtgtgtgtgtgtgtgtgtgaaagaagatttattagaggtgaattgactcacgtgaccatgaaggtaaagtcccacagctggccaactgcaagctgaagaatcaggagagctagtagtgtgattcctggagaggtcagtagtgtggcttccaaagaagctgctaatggggctcagcccaagtctgaaagcttccaaaccagggaaatgaaaaatgtagcttcaagtctgaggctaaaggcctgagttgcctataggaggcaactattgcaagttctagagtgcaaaagctgaagaacttggactctgatattcaaaaacgggaggagaaaaaggcatcctcctccagaagatagagaaagagaaagcaaaattgaggtgagtatccctctttttccacccaccttattgtgctcaggctcccagctgatttgatggtgcctgcccacactgaaagcaggtttttctttcaatccactgattccaaagtcaatcttcttgtaaacaccctctcagtcacagccagaaacaatgcatactagccatctgacaatttctcaaacaagtctaattgacacctaatcttagctatcacaagctcttttgcctatttatgtatcagattttttttcaattgagttgtttgagttccatatattttggatgtatatttattccttatacgatgtagattttgctaatgttttctcccattccataggttgtctcttgattttgttgattgtttcctttgctgtgccaaagctttttagtttgatgcagtcccatttgtctattttttattttatcaaaaattttggaggtcatatcaaaacatttttttgcaaggccatgtctttgttttcctcagatccagaatttgtgtgtttctattttatacaatttgtgcgtttctattttatacagttgtctccccttatacatgaaagatatatttcaagactctcagtgaatgcctgaaactgcagcttatacaaatccctatggatattgtttattcttatgcattcatatctatgataaagttgaatttataaattaggcacagtaagagattaacaacaaaaaacaaaaataaaatagaacaatcataacaatatgccagcatcattatgcttgtcattttgagtaattattaagtaaaataagggttacttgaacacaagtactgacatactgcaactgtcaatctgataactgagagggctactaagtgactaatgggaaggtagcatagatagcaggaatatgctgcacaaaggaaaatgattcatgtcccaggtgggacacagcaagatggcatgaggtttcatcatgctaagcagaatgcaacacaatttaaaacttatgaattttttatttctcaaaattttcatttaatatttttggaccatggttgaattcaattaactgaaaatgtggaaagaaaactcacaaataagtagggactactgtcgtttctatcttttaatttttgttcactattatttttctgattttttaatttgtctttctgttctcttgctgctcactgagcttcttcatgaaggttattttgaactctttttcgggcagtcaataaatcctcatttctttagggttggttaccgttgctttattttcttcctttggtagtgtcatgtttccctgattgttcatcattccttcagtcatgcactggtatctgcacatttgaagaaatatacacctatcccagtctttgcagactggttttgacagggaaaacccttcatcaataagatagtccagagattctgggcaggctgtcaggtggggtccacatgtagtgcttctattcaagtacttaagccagctgacctgatgcctgagtcagcaggtgggtagagctggcatctgagtctaaaggcgctggcctggggcttgggccttctgtgtagacctgaatcctgggtttgtggtgcaagcctagtactggagtccaccagagtggacttgtcaactggatctgtaggaagaagcctgaagcacatgtctttggtgtccatcctgaagcctgggtccatggggtcaggcctggttcagggatggtcctagtccctgagtccacagggattggcctgaagcctaattccatgggagctgactgggaactggggcagaattggagcctgagtttatgggattcagtctgaatcttggctctgcaaatgttagcctggaatataggtccttgggggttggcctataccctgatgctacagggattgttctggtgctgaggtgggcctgaagaatggctttgatgggtctaacctcggcctaaggtatactaggatgagcctggaccctgggttgcagaagcacaggatttcatgggctggtctgatgttcttccagcctgcagaccatatctgcaggagctggcctgtgggctgagtctatgagcactagcctggtggctgagtctgtgatatccagctgggaggtgaggccattgggtactgttctggcataaggataagcctagaacctgggtccctaagtgctggtttggagcctggggatgcaggggttggcttcatgctgtgaatgggcctgtagcctaaggcttcaggggtcagcttggagttttctgctgacgtggcactggatgggcctaaagcctttaagcctggagtcaccaaggcctgtatggagcctggtactgtgggggccagcttgaagctgatgtccacaggtgcaaacctagccctgaggtgggcctcaaagcacttagtttcaatgcctacattgctgatcaaaatatttcaaaaaatataagataaagcagtatatgtaaagaagattgtaaaatctaaatacaaatcaccaccactttaaaagcatgggaaaggcacagaagaccagaggccaaggcctgattggagatgtatgcattcttctctccatccatccgtccatccatccatccattctttctttactgcacacctattgtgtacctggctctattctagccactctggggcctacaaaaagaaacaaacaaacaaagaaacaaatctgaatcgtgttttgaaaagctgattcccagggattaaagtgactccatggtttcttaggtggtttgattcagttttaaaccagcatagaatcaattagttaaccatataatatgcttataggaatatgaagattaacataatagaaaaattcagtccttgcccttcagtagcatgagtgatgttaatatccctttactgaaatacattataaagcaaatgtggatcaaatacactggtattttattttccaaaatgaacaacagaattttgtcaaagggatttttacacgtgcaaaagacatgtaatgaggaattgcaagatggcttgagttatagaaactaaccaactgttccttccatgtaacagataccacattctgaacttcttgaatattcatagtcattgaataattgtttataaatagtctgaaatatttccctttccaagaagcacttgtgtctatatccttatgtaaaggaaacaatcttgtaataagccctgtgcattgatgttttttgactctcatgctatttgacctatgtcacctctgttgggactagtgttatgacggttttctctctcataatgactgagatatggagtttatgttcaggctgtgacattgtagaaattagaactggatgctaactgactcatgtaatcaaacttgtaactttatcctcattagtattataactgagataatcgacccagacatatggctatgccagttaattacaaacaaactaggtacctttctgaatctcaagggtaattccacagagatagtcatagcattaaacagttttaagcatttaaatatttattgtaaaagtaatttttttttgtttcaccattgcaaatactaatgtctagaagtagattttgagagtttgcttgtggcctagctctgagatctggtgggtcctagatctaccaacatcctagtctataacatcacttattccagggttttttaaagagctgaaatgtttgttatctattattatacagaaatccaccaaatgaggtcttgggaataatacaaagggtgaaattgaggaatagcatttcagtttataatatttacaaagaccttttccctaaactacaaaagaaataaatttttgtcagaagactactgtagttgaaaatatacatcttcaaataagagttttgtctctgatcattcatggacaaaaatgttattttgcctacatgttactgcatctttgcatattgattctctctctgtgtctcttttttctctgtgtctttctgtatttgtctgtctgtttccctctcttttacccccttttttccctctccctctttctctgtcactcttcctctctaattccctccgtctttcccctgtctctgtcacacatacacacatataaggcatcataagcagatagaatttttaaaaaaataaataatactaaactagtaactgattctctgcctaaagggtttcattttttttttcagagaaataaatgtttcaacccaagcaaacaggccagagaaatcaacagtgtataattcttttacactgaaattcaccccaggggtgttgatttgtcaatactccattaagagatgaccaaaaaagggttctgatgtggttgattgctacagttgtttctaaacacagggtactgtgtgcgacacaatgtttctggaggttaattttaaaaatcaaaatgagcgatgttaaaatgttttttggtttggtgctgatacttcttaaagctcaatatctaatctcgacctctcctgtgggctccagtcctgaattttcaattaaattcaaaggtatttccaccttctttctattttttcctattttttgtatgattcttccattgttctatcatccaagttcaatatcagccatcattcagctacaaaagccctatgaattcaacctccactgaatgctgaaaggtattcttttctttcatttccactgcttgtccacttatccagactattattacctatcatatccttagttacagttgccttctaagtggcctctggttctccatctccctctacttcaatctatgctataatctcctactaaatcaatcttactaaataatcaaattcatcttgtttaccctcttcttaactaaaattcttctgtgattttccatgcttaccaaataaggaatttactttttatcatggcattcaaaattctttatagcacaaatcaactcttcttttccagttttattacccacaactctcctttatattttccctactccagcaaattggactacttgccatttcctgaacttcctccacaccagcattatctttccctagttgaaaatcctcttcctcattcatgaactctaaatcctcccaactgtctaaagttcatagaaaatgccactttgttcatgttactcttttatactcaggattaatttgtcttgcagctgagttcacagaacttttaacattttcattttgttttgtttactgctcacatggaaatattgcttttgccattgttttagttacttgcatatttgtcttactttattctgttactaaaatgtaatcttcttgaaggaagcatactgggtcttcacatgtatgggtatatatcggaacagaagctgaagttcctttcatatatatttacaaaaataatattttaatttccatgaaataaaggtttcttgaattatttatattatagttgttatttcatgcatttgtaaggaaactgaaatgtttctgcctttctgtattgaggtttacttgatgtctattgaaaatgtttccttagttagaacataataatggattagaccctcaccaaattactaaaagtttactttgtttctattttatgttcttcttctactttaaaacaatgctaatgtcctttctttttctcttgttttggtcaattttctgtaaaacaattattcaataataaagataatataaataacgaaagtaaatacatataccaaattcccttttacttataataaagaatatagagtttttttgttacattggaaagttgagtgaagaatattaaactttaatttctgccatcaatttctgtactactccatttcccactgaaagcatcgagtgttccgataatatatcaattcttaacatgataaatcatggcaataataaggaaatatgacttcctttatcttccacacaagatcaaatttttatttatgtttccctctgtcaattgggtacttcacaatatgttcatagttgtgcttatattcaatggaaataaaaaatcacaccttacattttaaattttgcagtcattttctacattttgtacagtgaaatttaactaagtcctctccacttttcatgtgcctaatctttaggatctatttacattttactgcaatgtgaaaatacaagaaaaatttagccaaatgtaaaaggcccaagccacatcgtcaaacagaaggtttgacttaatttttaaggaaaagaaggaaatgaagacagaagaaaaatggggagagggagaaaatatgatttcctcttaaaacaagcagaattctacaagttaatacttttgcaaaataaaattgtataaatactcatctatccaaagtacagtcttatagtacatttaaatccctctgaaacccagagcactgtgtttataatagaatagcagacagacttgcccttcactggagggcatgtcatataagtcctcgctttctctgcaaaaacatcaggctggcagtagtgacagatgaacagcttaccattaatttcccctctttcatgctttcaatccaaatggtgcatattctccacggggaggcatcaaggtctctgcctttatttctcctgtatacccacattgacttataaattaagtgcagataagaagagagggcaaatatcaatctttatttttttttctcctagcctatgcccactggcacactactgagctttgactgaaagattcttcaaattgtcctgtgagtcacaggctagaaagttttcagtgaggacaaaacaacaaaggaaatctgagagggaaaatttgcatatcttggcttataatttagaaactttgccactgcagtattttaaaaattagttaccaaaaatatacacgtaagatgttatgaccactaaggaaagaaaaatctggaatataaagccatctgcattgttttagcatggtgaggaaaatagcaatctttaagtcatttctttagtcttattttccccctttatggtaaggggttggtctcttcataaaacttggagtatccacaataaagccctttgctatgactggtctgctttatttgaatcacagtgttttacaacagctttatgagtgaaatatttcatatactacattttaagttaaggatttgatatactgaggttttagcacatgactgttattactttgtatatatttttcaaattgtgcacggtaccttgtacatgataaatgcttaatagatattgtatttttcatatacactctggtactggatttattttttagtcatagtggtcattttatgctaatatttatgattgctgaggatgtctgatttttaaaaactttccgttgaagaaattataccctgctgcctttaaaaaatattcacagctttgctagtacattaaaaagagggaacatttggagaaaaaagagcattatgtaattcttttgacttttaacaaatcaatcttgaactaaaagtgcatccaaacctactagatgacacaatatcattttaagctcaaagaaatcgatattatgatcactgaaaaattataatttttttagctaagcatgaagtgttaatactattaaatgacagtaaatgttgatgttcaaggcttcctgctggccttttgcaggtgacatatctaaggatcagagctattccattttgtattccccttttttctttaaggctgcaagactcaactataaattacaactgatgacaaaagtggaagctaacagtggcaaaattaggcccaaaggcaaaataattatatatacagccttcagcagtgagggagagagccatcaatcagcccccaattattcactagttaatcagctctgcccttcctttattgaagggttacagtgtaattaagttggcagcatccttttaattcatcaaacatacaacacatggcggtgtttgctgcgttgagggacagcacctttgtgtgtttgacccctagcactgctgctgtagatgaggaaaacttcagaggtaagagagaatatgtatgcagctgcacgacagtggggtgttggtgttttcatatacagccctaagcttaaaacaactaagatttatgctatgtcaaggataaaacagatagggatatgaaagaagaaaaagaacatcgatgatattgcttgggtcacattatctcagaagagttaaaagaacaatatataagctgtttttcttcagctaggagagaacagagagttttttactatttcatagtaaaattggtaacacaccaacagacaatctggataaatcagaaggaaaaaattgtttcttccctttagaggcttaaattaattgttaagatgtcctttctttactagataacttctctatacttggttcaacattggcttcaaaggtgcacttttttgtccttcttagccaaaagtccaataacttggcccaataggagattttttgtggaataaaagaattagacttagaaaataataaaatataatggtccttgaaaatattagtgtttatgtagtgctaatatttccttaaattcagaaatacagtacaacactgttttaatccaacttttttcttttcttttcgtttctttttaggatttaaacatactgtgggtcatctcttatactgtaaatctaacaactcttagcagggaaagcctgagagaatacggtgaggatataaggcaggcggtcttcctgcctccctgcagcagggctataaaggattcccactgtttttctctttcttgttttatttgctataaaataggaattgacatttgttctctcataaagtaacttggtgaatgaattaaattttacaaaatatataaattcttcagtttcttttctgttgggactatagggtacaacagtatctcttctgatgtctcagataaggagagacttctatattttgaatgcccctgaaggaagaaaaacagtcttcccttattcacttctgattgcatagatgatactgcatgtaaattctgaacactcaacataataatcataacatttatataacattaacaatccctattataagcagtttcacatttattaactgatttaatccacaaataattctatggcatacgcataattactttcgttttacgtgtgaggcaaccaagtcaaagagaagttaaacaacttatctgaggtcacacagctagtggttgggaaagtgagagtataagaccaggcagtaggctccataaccacatttaactgctattttttttttttttgttgttgttgttgctgttgctgtttttgtttttttaattatactttaagttttagggtacatgtgcacaatgtgcaggttagttacatatgtatacatgtgccttgttggtgtgctgcacccattaactcgtcatttaacattaggtatatctccaaatgctatccctccccacaccccacaacaggccccagtgtgtgatgttccccttcctgtgtccatgtgttctcattattcaattcccacctatgagtgagaacatgtggtgtttgtttttttgtccttgcagtagtttgctgagaatgatggtttccagcttcatccatatccctgcaaaatacatgaactcctccttttttatggctgcatggtagtccatagtgtacatgtgccacattttcttaatgcagtctatcattgttggacatttgggttggttccaagtctttgctattgtgaatagtgccacaataaacatacgtgtgcatgtgtctttatagcagcatgatttataatcctttgggtatatacccagtaatgggatggctgggtcaaatggtatttctagttctagatccctgaggaatcgccacactgacttccacaatagttgagctagtttacagtcccaccaacagtgtaaaagtgttcctatttctccacatcctctccagcacctgttgtttccagactttttaatgatcgccattctaactggtgtgacatggtatctcattgtagttttgatttgcatttctctgatggccagtgatgatgagcattttttcatgtgttttttggctgcataaatgtcttcttttgagaagtgtctgttcatatccttcacccactttttgatggggttctttgttttctcttgtaaatttgagttcattgtagattctggatattagccctttgtcagatgagtaggttgtgaaaattttctcccattttgtaggttgcctgttcactctgatggtagtttcttttgctgtgcagaagctcttgagtttaattagatcccatttgtcaattttgtcttttgttgccattgcttttggtgttttagacatgaagtcctttcccatgcctgtgtcctgaatggtattgcctgggttttcttctagggtttttatggttttaggactaacatttaagtctttaatccatcttgaattaatttttgtataagttgtaaggatgggatccagtttcagctttctacatatggctagccaattttcccagcaccatttattaaatagggaatcttttccccatttcttgtttttgtcaggtttgtcaaagatcagatggctgtagatacgtggcattatttctgagggctctgttctgttccattagtctatatctctgttttggtaccagtaccatgctgttttggttactgtagacttgcagtatagtttgaagtcaggtagcatgatgcctccagctttgttcttttggcttaggattgacttggcaatgtgggctcttttttggttccatatgaactttaaagtagttttttccaattctgtgaagaaagtcattggtagcttgatggggatggcattgaatctataaattaccttgggcagtatggacattttcacgatattgattcttcctacccatgatcattcctaactgctacattgttaagcactgtgatctgctgacgtgacgttttaagggacttaggctagtgatttaaaacaaatattccttctttttattctatgatttaaaataatattgggagtttctttcatttcaatgttaaaataattctaacatttgtgggttcattaatcagaatgaaatttaatagatggtcacttgtatttgacactcagtgatgttttaaaagaaaagtagttacagagataggggataataaagatcctgtgtactgttttggactaatcagctaagcctacgagtaatgtttcaaactctgtctctttgctggccaaatgaagaatgaatttctttgttctgtactgtcctagtataatggaggttaaattcatgtttttaaaaatgttttatgactttaattgtatgtaacatataaaattgttatcagtgtggaagatttgttgaattattttcatacacaagtaaaatatggttatcttcgtcagttagcatgtaattatatatttttagttagcatttatgtagtgaagctaatggcataaattgtatggaagcactttgtcaatagcaattgttgtaataatatttttcttatctggaattagcctttttatttatctaataaactttcttacctttttatttttatttttattttttgagacagaatctcgctcattagcccagactggagtgcggtgtcgagatctcagctcactgcaacctccgcctcccaggctcaagccattctcctgcctcagcttgctgagtagctaggattacaggcacccaccaccatacccagctaatttttgtatttttagtagagatggggtttcaccatgttggccaggctggtcttgaactcctgacctcaggtgatccgcccacctcagcctcccaaggtgctgggattacaggcatgagccaccatgcccaccaactttcttaacttttaaacatgtctcttactgtgcagttttcttaatgtaacacaagcagaatgaagcattcaaataatgattttgtggatcttaaagtgtttcttgggatgagtggattatcccaggttactataaattgcaactaatgggacacaaagatagtgctgaaaaacatgtctctcgtgcatcattttgcacctactatctaatctcttagaacacttagtctttcaagttgtcattctcttcttcgattttattgttcttaattgatcctcatgttttttttaatcaaagaatatcgtgtacttgaagtcctctaggttgcctttcatttagtttttattttctttaatttatcttatctagacacccaatcagtaaacaaatataaaaagtgttctatgtataaggttttcatctaggcaccaggcaataataaaggccatatacattatgattcttgacttcctgacttatcttcataatttaattagactgataagtggtatagaagttctttgagaatgctgatcatgccttatattttgcacagtatttttaaactacattatatccttaataaggactaacatcttttacattgctggtggaaatgtaaaatggtgtgctgcagtggaaaacagtttagcagttcatcaggaagttaatcatagaattaccatatgacccagcaattccatttctaagtatatactcgagaattgaaaaaaagtgatgaaatacaaacatgtagatgaatattcataggagtactattcacaataaccaaaaagtggaaagaatgcaaatgcctatcagcagaaaaatggataaataaattgtggtatgtccatacaatggactattgtttaaccataaaaaagaatgaagtatggtacatgcttcaacatagatgaaccttgagaaaattatactaagagaaagaagccacacaaaaaaggccacatattttactattttcttcatataaaatattcagaagaggtaaatccaaataaataaaaaatagattagtggttgggggaaatggtggaagaaagaccaggacatgactgcttaatggatgagaatttttggggggaggtgattaaaatatttaatctagatagtggtggttgttatacaacattgttaatttacataatgccactaaattttacacttcaaatgataaaaaatggtaaattttatgtcaggtgtattttaaccccaataagaaatttaaaaatacatataaccactgatagctacatgaggcagtataaacaccttctgcatccagacagtttaaggaaaatgagaattctagtaggctatgttctagcaaaggttttacacataaatgtttttaggggcaagctggtaacaagcgtacaatggaaaatggtggggactttttgaaaacttactaaaaagtttttcaaattttattgctataaggtatgctggatttttatcataaatgagtgctagatttggttattttgtttcatcaattgatatgatcacatgatgttttcttcttaagcccgtggatatgctgcattaaattgattgattttcaaatattgaactagccttgaataactggactatatcctacttggtcatggtgtataatttcttttatgcatgattgcatttaatttcctaatattttgttaataattctaataacagactattttgttagtaatattttatactgtacttttctcattgtcatgtaagtgtaatactagattcttaattggaaactattcttttattttctattttctgcaagtatttgtgtaaaattctcgtcaattctttctgaaatcatctgtagaattcaccaatgaaaccattagggcctggagatttcatttttgaaagccttttagttacagatttaacttcttcaataattaaatgactattcagatgatctattttatcttgattgaattttagtagtctatgcttttagaggaattggtccatttcttctatgttgtcaaatttatgaataaaaatatttgcagtattttcttatttttcatttaatggttgtaggatcctcagtgatagctcctgttacattctaggtatcagtggtttttttctttttcaatttttgtcagtttttctacagattcatacattttatttattatattaatacaacattttgatttaattggagtttattttgctgctcttgcttgcttttattcaatttcatcaacttttgcccttatctttattatttctttacttcctctctttggtttatttttatcttattttcctagtttcctaatatagattaatattttgagcctgcaagcttgggcaacatagtgagatcctgtctctagaaaatattgaaaaattagccaggcataattgtgtgcacctgtagtcccaactactccagaggctgaagctggaggatcacttgaggccgcactaagccatgattgggacactgcactccagcctgggtgacagaataagaccttatctctaataacataataataataataataataataataataaataatgtgatgctatagtatactatgagacatactgtgactataagattaataataatcatgaggcccaattgaacatctcataggacctaccctacgtgttaactaataatatgaaatatcctagctgggggattttcagcactatagccctgaagattactcgttctctttcacaatggggccaaaaaacactggttgccctagagaaaaggccacctcagcacagagtcaactttaagaaccttagaacaaagcgtatctgtataagaatagcttaaactgcctttatgaaagaaacacttcgtaactgacccagactgaatacaagtgtaagaaaggggaaatattcctctaactctcagaatgttctccagttggagactcttctggtgaggcagtcatcagatccctgactgtaactggtccataccactggcttgttcccactgtccatcttataagtgtactgccagaataaactgcctgaacattaggtgttgcctaagatccatcattgacacgattggaccatagggaaaaaaaattgcctgtggggaagctggccaaatgggccaacccaagacccctgaacacaatagaggcttttccacttttaaaaatataagtacttagtgttatgcattttcctttcagtacagcttttaatatgttttattttcatttattttcagtaatagcatatttaaaattttcctttgcgacttattcttgatccataaattatttcaaaatgtgttgtttagttacatggataagttctttagtggtgacttgtgagattttggtgcacccatcacctgagcagtgtacactgtacccattgtgtagtctcttatccctcatcccctcccacccttcccccaacacagtcttttggagggtgaagggtgggaggagggagaagattaggaacatctgaagttaaaagttttttaaaatgtagaataaagttcttaaaaatgtattgttaatgttccaagtgtttagagatgttctgttgtctttctgttactggattatagtttgatttcaccaagatcagtaaacacacatagatcaatgaaacagaacagagagcccagaaataaagccacatacctgcagccaactgcttttagacaaagttgacaaaaacaaacaatgaggaaagaacatcctattcaataaatggtgctgaaaaaactggctagtcatatgcagaagaatgaaattggaacccgatctctcatcgtatttgaaaattaattcaagatggattaaagacttaaatataagacataaaatggaaaacatcccagaagaaaacctagaaaatactcttctagacattggcctaggaaaataatttatgactaagacctcaaaagcaaatataacaaaaataaaagtagacatatgggacttaattaaactgaagagcttctgcacagcaaaataaactatccacagagcagacaaacaacctacaggatgggagaaaatatttgcaaagtattcatctgataaaaaaatcatatccagaatcaataaataacttaaataaatcaacaagcaaaaaacaaataatctagttaaaaagtgggcaaataatataaacagacccccctattttttttttttttttttttgagatggagtttcactctattgcccaggctgaagtgcagtgccacgatctcggctcaccacaacctccacctcccaggttcaagtgatcctcctgcctcagcctcccgagtagctgggactacaggcgtccaccaccatgccaggctaatttttgtgtttttttttagtagagacgggctttcgccgtgttggccaggctggtctcaaactcctgacctcaggtgatccacttacctcttaaaagaagacattccaacagccaacaaacatataaaaatgctcattgtccccaattatcagagaaatccaaatcaaaaccacagtgagataccatgttatatcagttagaatggctattattaaaaaagaagtcaaaaaacaacagatgctggcagccttgtggagaaaagggaatgcttatacactgcaggtgagaatataaattagttgaacccccatggaaaacagtatgaagatctctcaaagaactaaaaagagaactatcattcgacccagtaatcctactactgtataactatcctaaggaaaataagttgttttatcaaaaaacacttgcacttatattgtttattgtagcattatttataataacacagtcatagaatcaacctaagtatctatcagtgattatttggataaagaaaatatggcatatatacaccatggaatactatgaagccataaaaagaattaaattatatcctttgtatcaacatggatgagctggaggtcattatcctaagtggaataattcagaaacagaaaatcaaatatcacatgttctcacttataagttagagataagcaatgggtacacatggacataaagatacaaataataggcactggggatcccagaaggggtgggtagaagcggcacaagcgttcaaaaatttcctattgggtacaatgttccctatttgggtgataggttcactaaaagctaaaacctcactattacacaatatgtccacataacagacctgcacaaatatctttgaatctaaaataacaaaagaaagaacagatcagtgagcacagcatataattttaattattttgcaatttttgagatttttgttatagcctaaaatatgattgattttggtgaatattccacaggctcacacgtacacaaatgtatattctgctagttttttttgtgtgtggaatgctctatgaatgttaatttattcctgtaggtttactgtgttgtttagatcttctctttccttgatgatgttctgtctaaggagttctatcaattactgtgaataagatgttaaaatcctcacatataattatagatttatctattttttcattttagtttcatcagtttttctttatgtattctgaggctttttttggtatgtacactggatcattatacagtcccagtagattgataattttataattatgtgacatctctcttttacactaataattatcttttccctataatctacttttatgatattattaataatatagacatttttaatttttaaaatatttgcatggtatatatttctccaatgttttactcatacatcccctgtatcatatttgacatgactttcttcatctattcataatagccttttagaatttgtggaatagatggaaatactctcaacttaaaaagttgcatctataaaatactgtagcagggatcaaaattaatgatgaaggtctgaatgcttttcttaagatacagaagaagcaaaacatacctgctcttactagtattattcaacatagtactaaatgttttagccacgacaaggcaagaaaaagaaaaggcacagaggttggtaagtaagctagtaaactaacttagtaagtgagtttagcaaggttacaaaataacagatcaacataaaaaagattattacatttctatatactaataattaatgtgcagacattgacactgtaaccacagcatcatttataattactctagattgttgcagtgagaaaaaatacttatgtacacaattttaaaaacatgtacaggatctataggctgaaaattattaacttgaaaagaatttttttttcttttgagacacaatttttctctgtcacccaggctggagtgcagtcgcacgatctcggctcactgcaacctccgcctccctggttcaagttattctcctgcctcagcttcctgagtagctgggaccacagttgcgtgccaccacgcctagcaaatttttgtgttcttggtagagatggggtttcaccatattggcttcaggacatattgttctcgaactcctgacctcatgattcacctgcctcggcctcccaaagtgttgagattacaggtgtgagccaccgcgcctggcctgaaaagaatttgtaaaactctctaaatcgaggcacaaatcaagcacatgaattagaagccccaaaatgttgaagatgtcaattcaccctaaatcatctgtaggtttaatgcaatttctatcaaaatcccagcataatttccttgtagatatagaaaatgtttttataaaatttttatggtaaggcacagaatctaaaagagttaaaacaatcttaaaaaagtatgaagtggaagaaataattcttagtacataatcaagtcaatattgaggcttactatatagctatattgatcaaaacaatgaagcattggtggaggaatagactcatagatcaagagaaaataacagaagacatagaaatagactcaggtgaatattactgatttttgacaaagatgaagaagcaattaatgcagaggatagcataacctattcaacaaatgggctagaaaaattgtatgtttataggtaaacaaacaaatctaagtctaagtctcaacctaagtctcatacctaatacaaaaattagctcaaaatgggcatagtcgttcatgcctgtaatctcagtgagttgggaggcagaggtgggcagattgcttgaactcaggagttcaagaccagcctgggcaaggtgtcaagttcctgtctctaaaacaataaagtgagctcaaaatgtatcacagactaaaatataaaatatagatgtataaagttgttagaagaaaacacaaaagaaaatcttcagagtctagggctaggtaaaggatacttgggcagaaatattacccataaaagaaaaaacaacaaatcatatttcatcaaaattataaaatattctgcctttgagagactttgttaagaaaacaaaagggacaacttgctgtctggaagaaaatatttgaaatccacatagccatcaaaagactaatgcctagaatatatgaagatctctcaaaatgcaacattaaaaggggaaaaaagccaattggattagaaaatgaaaaaataacatgaaaagacatttcgctgagaaggatatacaaataccaaataagcacattaaaaagtgttcagcatcaatagccatcaagaaaatgaaatttaaaatcacaatgagatagcactacattaacctttcaaattggcttataaataaaaagaacagtggcaacaccaaatactgtcatggatggacataaactggatcactgacagaatgctgatgagaatattaagaagtacattttacttttgaaagtttcctattaaactaaacatgcaattttcatacaacccagcaactgtactcttgaacatttatcccatagaaataaaaacttatgttcaatcagaaatatgcacgcaaatatcaaaaagcaacagattgaatctctctgtatttttattataactacatgataaactgtaattactctaaaataaaaaggtacaaaaggttacactagttatataaagcatatttgttcactgactgtgaccagaaactcctttctgaagattcctgctttattcaagattttatgccatttgaaggaagaaatttgatcttttatttatttatttatttatttattcattattattatactttaagttttagggtacatgtgcacaatgtgcaggttagttacatatgtatacatgtgccatgctggtgcgctgcacccactaattcatcatctagcattaggtatatctcccaatgctatccctccccctaccccccaccccacaacagtccccagagtgtgatgttccccttcctgtgtccatgtgttgttctcattgttcaattcccacctatgagtgagaatatgtggtgtttggttttttcttcttgcaatagtttactgagaatgatgatttccaatttcatccatgtccctacaaaggacatgagctcatcattttttatggctgcatagtattccatggtgtatatgtgccacattttcttaatccagtctatcattgttggacatttgggttggttccaagtctttgctattgtgaataatgccgcaataaacatacgtgtgcatgtgtctttatagcagcatgatttatagtccattgggtatatacccagtaatgggatggctgggtcaaatggtatttctagttctagatccccgaggaatcgccacactgacttccacaatggttgaactagtttacagtcccaccaacagtgtaaaagtgttcctatttctccacatcctctccagcacctgttgtttcctgactttttaatgattgccattctaactggtgtgagatggtatctcactgtggttttgatttgcatttatctgatggccagtgatgacgagcattttttcatgtgtttttttggctgcataaatgtcttcttttgagaagtgtctgttcatgtccttcacccactttttgatggggttgtttgtttttttcttgtaaatttgtttgagttcattgtagattctggatattagccctttgtcagatgagtaggttgtgaaaattttctcccattttgtaggttgcctgttcactctgatggtagtttcttttgctgtgcagaagctcttgagtttaattagatcccatttgtcaattttggcttttgttgccattgcttttggtgttttagacatgaagtcctttcccatgcctatgtcctgaatggtaatgcctaggttttcttctagggtttttatggtttaagtctaacatttaagtctttaatccatcttgaattgatttttgtatgaggtgtaaggaagggatccagtttcaactttctacatatggctagccagttttcccagcaccatttattaaatagggaatcctttccccattgcttgtttttctcaggtttgtcaaagatcaggtagttgtagacatgtggcgttatttctgagggctctgttctgttccattgatctatatctctgttttggtaccagtaccatgctgttttggttactgtagccttgtagtatagtttgaagtcaggtagtgtgatgcctccagctttgttcttttggcttaggattgacttggctatgcgggctcttttttggttccatatgaactttaaagtagttttttccaattctgtgaagaaagtcactggtagcttgatggggatggcattgaatctataaattaccttgggcagtatggccattttcacgatattgattcttcctacccatgagcatggaatgttcttccatttgtttgtatcctcttttatttccttgagcagtggtttgtagttctccttgaagaggtccttcacgtcccttgtaagttggattcctaggtattttattctctttgaagcaattgtgaatgggagtttactcatgatttggctctctgtttgtctgttattggtgtataagaatgcttgtgatttttgtacattgattttttttttgtatcctgagactttgctgaagttgcttatcagcttaaggagattttgggctgaggcagtggggttttctagatatacaatcatgtcgtctgcaaacagggacaatttgacttcctcttttcctaattgaataccctttatttccttctcctgcctaattgccctggccagaacttccaacactatgttgaataggagtggtgagagagggcatccctgtcttgtgccagttttcaaagggaatgcttccagtttttgcccattcagtatgatattgggtgtggatttgtcatagatagctctaattattttgaaatacgtcccatcgatacctaatttattgagaggttttagcatgaagggttgttgaattttatcaaaggccttttctgcatctattgagataatcatgtggtttttgtcttcggttctgtttatatgctggattacatttattgatttgcgtatattgaaccagccttgcatcccagggatgaagcccacttgatcatggtggataagctttttgatgtgctgctggatttgttttgccagtattttattgaggatttttgcatcaatgttcatcaaggatattggtctaaaattcccttttttggttgtgtctctgcccagctttggtatcgggatgatgctggcttcataaaatgagttagggaggattccctctttttctattgactggaatagtttcagaaggaatggtaccagttcctccttctacctctggtagaattcggctgtgaatccatctggtcctggactctttttggttggtaagctattgattattgccacaatttcagatcctgttattggtctattcagagattcaacttcttcctggtttagtcttgggagagtgtatgtgttgaggaatttattcatttcttctagattttctagtttatttgcatagaggtgtttgtagtattctctgatggtagtttgtatttctgtgggatcagtggtgatatctcctttatcattttgtattgcatctatttgattcttctctcttttcttctttattagtcttgcttgaggtctatcagttttgttgatcctttaaaaaaaccagctcctggattcattaattttttgaagggttttttgtgtctctatttccttcagttctgctctgattttagttatttcttgccttctgctagcttttgaatgtgtttgctcttgcttttctagttcttttaattgtgatattagggtgtcaattttggatctttcctgctttctcctgtgggcatttagtgctataaatttccctctacacactgctttgaatgcatcccagagattctggtatgttgtgtctttgttctcgttggtttcaaagaacatctttatttctgccttcatttcgttatgtacccagtagtcattcaggagcaggttgttcaatttccatgtagttgagtggttttgagtgagattcgtaatcctgacttctagtttgattgcactgtggtctgagagacagtttgttataatttctgttcttttacatttgctgaggagagctttacttcccagtatgtggtcaattttggaataggtgtggtgtggtgctgaaaaaaatgtatattctgttgatttgggttggagagttctgtagatgtctattaggtccgcttggtgcagagctgagttcaattcctggatatccttgttgactttctgtctcgttgatctgtctaatgtcggcagtggggtgttaaagtctcccattattattgtgtgggagactaagtctctttgtaggtcactcaggacttgctttatgaatctggatgctcctgtattgggtgtatatatatttaggatagttagctcttcttgttgaattgatccctttaccattttgtaatggccttctttgtctcttttgatcgttgttggtttaaagtctgttttatcagagagtaggattgcaacccctgcctttttttgttttccatttgcttggtagatcttcctccatccttttattttgagcctatgtgtgtctctgcacatgagatgggtttcctgaatacaaaacactgatgggtcttgactctttatccaatttgccagtctgtgtcttttaattggagcatttagtccatttacatttaaagttaatattgttatttgtgaatttgatcctgtcattatgatgttagctggttattttgctcgttagttgatgcagtttcttcctcatctctatggtctttacattttggcattattttgcagcggctggtactggttgttcctttccatgtttagtgcttcctttgggacctcttttagggcaggcctggtggtgacaaaatctccagcatttgcttgtctgtaaagtattttatttctccttcacttatgaagcttagttaggctggatatgaaattctgggttgaaaattcttttctttaagaatgttgaatattggcccccactctcttctggcttgttgagtttctgctgagagatccgctgttagtctgatgggcttccctttgagggtaacctgacctttctctctggctgcccttaatattttttccttcatttcagctttggtgaatctgacagttatgtgtcttggtgttgctcttctcgaggagtatctttgtggcgttctctgtatttcctgaatctgaatgttggcctgccttgctagattggggaagttctcctggataatatcctgcagagtgttttccaacttggttccattctccccgtcgctttcaggtacaccaatcagacgtagatttggtcttttcacatagtcccacatttcttggaggctttgctcatttctttttattcttttttctctaaacttcccttctcgcttcatttcattcatttcatcttccatcgctgataccctttcttccagttgatcgcatcggctcctgaggcttctgcattcttcacgtagttctcaagccttggttttcagctccatcagctcctttaagcacttctctatattggttattctagttatacattcttctaaatttttttcaatgttttcaacttctttgtctttggtttgaatgtcctcatgtagctcggagtaatctgatcgtctgaagcctccttctctcagctcgtcaaagtcattctccatccagctttgttccgttgctggtgaggaactgcgttcctttggaggaggagaggcactctgctttttagagtttccagtttttctgctctgttttttccccatctttgtggttttatctacttttggtctttgatgatggtgatgtacagatgggtttttggtgtggatgtcctttctgtttgttagttttccttctaacagacaggaccctcagctgcaggtctgttggtgtacccagctgtgtgaggtgtcagtctgcccctactggggggtgcttcccagttaggctgctcaggggtcggggtcagggacccacttgaggaggcagtctgccccttctcagatctccagctgcgtgctgggagaaccactgctgtcttcaaagctgtcagacagggacatttaagtctgcagagtttactgctgtctttttgtttgtctgtgccctgcccccagaagtggagcctacagaggcaggaaggcctccttgagctgtggtgggctccacccagttcgagcttccaggctgctttgtttacctaagcaagcctgggcaatggcgggcgcccctcccccagcctcgctgccagcttgcagtttgatctcagactgctgtgctagcaatcagtgagattccgtgggcgtaggaccctctgagcaaggtgtgggatataatctcctagtaggcggttttttaagcccatcgggaaagtgcagtattcgggtgggagtgacccgattttccaggtgctgtctgtcacccctttctttgactaggaaagggaactctttggccccttgcgcttcccgagtgaggcaatacctcaccctgcttccgctcgcgcacggtgtgcgcacccactgacctgcgcccactctctggcgctccctagtgagatgaacctggtacctcagatggaaatgcagaaatcacccgtcttctgtgtcgctcacgctgggagctgtagtccggagctgttgctattcggccatcttggctactccctccgaaatttgatcttaaactgttttttttttcatttgcaacagcaactagtgcaaaactagtgggtgtttttttaatagttactgatagatgttgtaaaattaagaattcatttgccttagataattaacttgccattgaatgcctactccatgtcagatatcttggttacagaataaataaaaagattcttgagtttctggtagtattttacatcctagtagaaaagatagtcttgcagacagaaaatttaaaccatgtgatgagtcctaatagagatgtacacaagtgctgtgggaggcttatatgcaaatgaatgtattggaaagttaagaaaagctttatggaaacagtaaaaagaaacttgaaggatgagtataaattctgcaggtaaagaaaaaggggaaaggcgtccttggtagggaaacaatacaggcatgtgaaagaatcatgaaacaaatgatatttgctgcaatatttgaccagaaataataaagtacagctagagtgtacctgcctgatgtagtttggctctatgtccccacccaaatctcatctccagttgttatccccccgtgtcaagggagagacctggtgggaggtgactggattatgggggcagtttccccagtactgttctcttgataatgagttctcacagatctgatggttttataagtggtggtttcccctgccctctctctctctctctctctctctatcctgccaccttgttaagaaggtgcttgcttcccctttgccttctgccatgattgcacgtttcctgaggcttccccagccatatgaaactgtaagtctattaaatctcttttctttgtaaattacccagtctcagggaagttctttatagcagtgtgaaaatggactaatacactgccagaatagacactagaagaaacagaagagctaagcagaaactttgtactacaaagtcttgtattccagactaaaaaatgtgaattttcattttataaaaactgagtagtgattctgattgtgagcaggtttaaaacaggataaatgacagtcctggttggccagggactatcctggttttagcactgacagtcccatgccatggaaattatctcagtctcaagcaaactggtacagtttgttttctgctgtgagagtaccaaagttgtattttagaaagaaaactcactatagctttaatgataaccctcttgtaggggaataagaaagattctgaaagcaggaagatacttgcaatttcaatgtaggatttcctcttcaataacctcaattgagtgagaatcattatagttaattgttaacagtgctctgtcacacaattcaagatattatggccttaaaaagaagcaaccaaacaatacaactttaagagagattatcctgtatttaaaatcatgtttattatttctgatgagtggttaggactttgctttcatttctccaaccttcctgaagggcatattataacactaacttttccatgtctaaaaattgcataaactttttcaccatgtaaatttgggtaaattcaaaacgtgaggaatttcataaatatgagaatgtactttatagacagaggagtgtggttacacacagagttttcacaaaaatacaaatttgccttgttttgtttttcacttttatctggaatagggtttttttttgtgtttactgaaataatagtgcccataaagtcttataaaagaatgaaaatttaaaagatttgaagttgtaaaaatgaggcagattaagctataatttcaggatatggataagctctgagaactaaatggtttagtggtttaatagagactcaaagaagaaaaagaatcttgagcaacttctttcaaaggtggaacttttataaggttccatgaagagcaaagtataatgacaaacatatttttagtaatattaaaaactataatgtaattcaagctcatggtaaaaagacaatcacacattatagaaggatatgaaattagaagtaaaactcacccccagcacagttctacaccttaagggaaataactataactttccagaaattgtacttggattatacagacatatctatgtatattctcttattttcacaaatggaactttattccatgtactattctgcaaaagaaggctttcttttagcattctagttaaaacctgggcctcatttgaaatttgttccttgtgtattaagtttcacagactgaatatttaacaagcttagattatgaatagacagggccatgaatcagttatttttcagtggaaattgctgttttcctttttctcatcttactacctaatccctaagcagtcaaatggaccagctgtgcaataaatctacattagctaaaaaagatagtcaaaaacattattttggctcctttttgatctggtacatttttataaatagaaatgaccacaataaatgcattcattcattttacaaatgtttattaactacctactgtgtacttgacactattctagatgttggggataaacacaaaaatttatattaataatacaatacattaataataattataattacattcattattatagtcacatttttcagtctacattatcattccaaaaaatataaaaactgttttttgttgctcggggattcacttgaaattcatatttactttgagccaacattttctctgagttctaacatcttttccatgttaatatcaactaccatccagttcttagtatttttattaattaaaggccatagtttatttaggtttccttagtttttacttaatatccattttcagtttcccaatctcatccatgaagccacattatatttagttaaaatatctctttagattctccttagtcgtaatattttatttttaaaaatatgttattgagaaagaaatcacataacagaattaaccattttaaagtgtccaattgaaaaaaagggcaagatgaccaactagatgcagctaggaagtgccactctcactgacagagactgggatttggactaaaccactgtaatttgagaagatctttagagataaaatgccaaatgcaaatggagaaaagaggcatatgttgaggctgaagagggagaaattgaggaaccctatgtggggggcttgaatgctagggctgattcctggacctgaatgatcctggggaagggaacatagctggaaatattaggaaacacaaaagagccacgtggttgagtaagagcctatttagcaacaattgctcttaagtgctgtctacaggtaacacaggccaaactaacaacagcaaaaaacacttcgctacatcaccccccatgagacaccaagatcaaaaattcaaaaacaaagaccttgtatagaggcttgaaatggaaccaacttactgtactcaatttgcactgcagctgaaggaacaacagccctcccaaatgagaaacaatcagtgcaagaactctgtgaattcaaaaagccagagtgtacccttacctccaaacaagcctactagctccccagcaatggttcttaatcagtctaagataactgaaatgacagacatgaaattcagaatctggattacaaggaagctcacggagatcctggagaaagttcaaacccaatccaaggaagccaagcaatcattataataattctagagctgaaagatgaaatttctattttaagaaagacctaaacttaaccttttgagctgaaaaattccctatgggaatttcatagtacaattggtagtattaagatcagaatagaccaagctgagaaaagaaactcacagctcaaagactagttctttgaatcaactcattcagacaaaaataaagaaaaattaattttaaaaaataaacaaaaccctgaagaaatatgggataatgcaaagagaccaaatctataacttcttggcacatctgaaagatgtgccattttatgctagataaggcctggggacatgtgaaattagctccctagctatgcaaagaatgttataaagaaaagatattttatataaaaaaggatcttgtatggtaaattcttgtcctaaaataaagtgattggttctttaaaaaacgggatgtttaggacaagtcagaaaatctaagcatgtcacagatggtctgtgtaagttgtgaaaggatttctgaaagggaatttatgcaagaaatgttgtacaatttgaaggttgtgaggcctcctaaatgtttcataaaatgccactatgactcttaactgtacaacctacctgctttacagctagataaggcctgggaacatgtggagttagccacaccccttagctatgctggaaagagtcagactttatctgcacttttgactggcatcctgggttacacacctggtacataaataaaatcacttacaaaccaggtttttcaccaaaagtaatagttgctaagagttaacagtgtaacatgtatgtgagactactgaagaaacagttttacaaacaagccatgtaaggaaagtagaatgtgcttttggtaaaagatcatgtaaagatggcctggcacagtggctcacgcctgtaatcccagcactttgggaggccaaggtgggtggatcatgaggtcaggtgttcaagaccagcctggccaacatggagaaaccctgtctctactaaaaatacaaaaattagtttggtgtggtggtgcacgcttgtagtcccagctactagggaggctgaggcaggagaatcgcttgaacccaggaggtggggcttgcagtgagcctagattgtgccactgcactgtagcctgggtgacagagtgagactccatctcaaaaaaataaaaaataaaaaataaaagattatataaaagcatgggaatatgaatttctcatctaagttcagagggttaagttgtgttaagtgaggcagaaaaaatataaaggtttaagcaagttgtggtaggtttattttaaaaattacggtgtataaatatattggctaaagttaaaggagtattattcagtttttccataaattgaacattggaataaaagcataacagagttttttacaacattgttctgctgtttaacaaaaaaaattgtaaaagtttataaaaggtttatgaaaatcttaccttatcatcaaattaattaaaactgttactaaaaatgttattaaaactaaatttagcattaaagatgcacaaatgcaaacataaaatatggttttctattttgaaaatgatttttatgtaatattaaaagataatgaaaggtttttgtttgccttttaagtaaactaaacaaaaaagtatgaagggagagagaagagagattctggtggccttatactatcttcattgagtcttattgtttggaaagctgagtcccctctctatcagagtaaaagtttctcctttttttaaatttttgagttatcagtttggttaaatgaatgacttatggtgacctgggattctattttgtgaaatcaagtgtttcaaacacaggaagcactatcaaatataaaattgtttttaactttctatgggttatatttgtataaagaggttagtagtatgtgttatgaaattgtataagattcctataattctgatatgcctcagtatatgctatcagtaataattaaacttgttatgttaaattattgtgtgccacagaaataacaaattttcttgtcaattgtgtctctaactgtggctgccttaaaatgttcttttcgtccacagacaattgttgtgttgttttgttttggtcatctttagaagatgatttcacaatcagctataaaacattgacaggagctcttgaatgcaagtttcttagataactcgagattgtgacattagaataaaggaaataaactctcaggactgtcatggaaagctaaaatgttcatgaatatcaagcagaacaggagttgacttaatggactgagctgatagaaaactgaagtaacctttttttttttacttttatgttttgctaaaaactttgctgatcctttttgtttttttcagagccaaggaaacttattttttgagctatttacaggttttaacaactgagtaaagtatactgctctgaagaaaattagaggcatatttgcttctctctatctgatttccccagaatttggaaactatgtgagtattcttaaattatggcaatatagttatttgcataaatgcaataagaatgttttcttttacaacagaacacaatcggagaaactggttattttaccaagtctttgactagaatggtgtgttgtcctttaaggaatcaaatttgacttatagagcaaataaaagcccattgggaaaactggcctcataccttgtctatgcagttcctatacagagttcctgacctgtggtaagtaaagaatgtcactttctaacaggcccaggagccccaagttatcttgaaacctcaagaggagaagaatttttacccaactcataggtatttgagggtaaaaacccatggcttgacttggtttcttaaaaagtcttatctgagattccttatgcaacagagttccatcagagccaatttaaaagtcctatgtgaaaaataattactcttgctgcactctatgcaaataatcaggctaagtataataaaactaaagtttattttgcaagtaaatcagcagtataatgactttttttaataaaaataaagactgggagaaaaaaattgtttcaataattatagtacacctgttgttagttgtttttgagtctttattttatttttttctgtacaagtcagattaaatatttttggctgcctacaagttatcaaacaaatgctttaaatctttaattttaaaaccagaaattgcactcgttatcctagaactcagtatttatagtacactgtccacttaaatgctgtattaaaactatagatgagaatactaacacctttgtcatgaaagccttggaatcccagcctggtctgtgtgagcaagctcagacagctgcaaaacagttccacgtctctcaccttggagtcaacccctacccccaccatgcaccctgtcagcaggaagaagccagagcaattgatagcctttctccatcttcattgtccataccttaagaataaggtgctataaaacgaaaaagcaggaattgagaccacctttgaaaaaattataactgaggaaatcatgacagtgatagagatcagacctaatcaactccatcttgtttctcttttttattttattatttatttttttttgagacagagtctcgatttgttgccaggctggagagcagtggcatgatc

SEQ ID NO: 60145 - DNA, 406 bp, Homo Sapiens
ttttagagagatgttcttactgtgttgtccaagcttgcctcaaactcctgggctcaaggaatcttcctgcctcagccttcccactagctgggaacacaggcacatgccaccaagccctgcaccaatgaacttttcagggaatttttatgagcctttctttcagtgcctccatgagaagaaaactttatttcctgtaaataaatcttccttaggagcaataggatgtaaaaatcaatctttaaattttttttttcttattttaacttcccacactacattcatgcatttaaacattttttttacttactttagaaattcagctatattagtgtgcctggtttgtgcatgccgattcacacatgcagatccagcatcttgttccttccattcaaagccttccctgaca

SEQ ID NO: 60146 - DNA, 429 bp, Homo Sapiens
ttgtgaaaaacaattatgggaaattatttttgcttttccaaaattatgacaacaaagaaaacccaaatttcatccccagcccccctaaaaacataaatgatttcgatcacttttttttttttgaggaagagatgcatcagcttttaaataaatggtgaagagcaataacatctgatggagaggggccacctgggctcatttcacctgtgcagtggattcaggtggtgggccatatccatcccatactgcagtttgtggttgctgttgttaggggtgccatatgtctttcccttgttctttgtccactgatattcactagcctgtttgtcctcacccctgaagcagataaacacatgtagatggaggaaaagtgacaggcaggtgggttcatcagtgggctcatcccaaaggtgacccatcccttggatt

SEQ ID NO: 60147 - DNA, 258 bp, Homo Sapiens
tctggattcaccttcactaggtttgacatgcactgggtccgccaagctacaggaaaaggtctggagtgggtctcacttattggtcctgctggagacacatactttccaggctccgtgaagggtcgattctccatctccagagaatgtgccaagaattccttgtatcttcaaatggacagcctgagagccggggacacggctgtgtttttctgtgggtgaaataaaggtttcggagcccgttttagataggacgtctgg

SEQ ID NO: 60148 - DNA, 652 bp, Homo Sapiens
cagagctcccaatcgtcttacgggcagcagtcctcctaccctggctatggccagcagccagctcccagcagcacctcgggaagttacggtagcagttctcagagcagcagctatgggcagccccagagtgggagctacagccagcagcctagctatggtggacagcagcaaagctatggacagcagcaaagctataatccccctcagggctatggacagcagaaccagtacaacagcagcagtggtggtggaggtggaggtggaggtggaggtaactatggccaagatcaatcctccatgagtagtggtggtggcagtggtggcggttatggcaatcaagaccagagtggtggaggtggcagcggtggctatggacagcaggaccgtggaggccgcggcaggggtggcagtggtggcggcggggcggcggcggtggtggttacaaccgcagcagtggtggctatgaacccagaggtcgtggaggtggccgtggaggcagaggtggcatgggcggaagtgaccgtggtggcttcaataaatttggtgtgttcaagaaggaagtgtatcttcatacatcaccactcctgaaagcagatgtgcttttccagactgatccaactgcagagatggcagctgagtcattgcctttctc

SEQ ID NO: 60149 - DNA, 486 bp, Homo Sapiens
cggattgggatcggacctacttgattcacttctgggaaatcaaggatctacgtaccatggattttcaggtgcagattttcagcttcctgctaatcagtgcctcagtcataatgtctagagccaactgggtgaatgtaataagtgatttgaaaaaaattgaagatcttattcaatctatgcatattgatgctactttatatacggaaagtgatgttcaccccagttgcaaagtaacagcaatgaagtgctttctcttggagttacaagttatttcacttgagtccggagatgcaagtattcatgatacagtagaaaatctgatcatcctagcaaacaacagtttgtcttctaatgggaatgtaacagaatctggatgcaaagaatgtgaggaactggaggaaaaaaatattaaagaatttttgcagagttttgtacatattgtccaaatgttcatcaacacttcttgattgcaattgattcctcgag

SEQ ID NO: 60150 - DNA, 364 bp, Homo Sapiens
atgtgcaataccaacatgtctgtacctactgatggtgctgtaaccacctcacagattccagcttcggaacaagagaccctggttagaccaaagccattgcttttgaagttattaaagtctgttggtgcacaaaaagacacttatactatgaaagaggaaaatatataccatgatctacaggaacttggtagtagtcaatcagcaggaatcatcggactcaggtacatctgtgagtgagaacaggtgtcaccttgaaggtgggagtgatcaaaaggaccttgtacaagagctaaagaaaaggaataagccctgcccagtatgtagacaaccaattcaaatgattgtgctaacttatttcccctag

SEQ ID NO: 60151 - DNA, 473 bp, Homo Sapiens
ttttttttttttttttttttttttttgcttccataaaagttttatttatccccacaacaaccctgtgagggagggggatcagggcatttgaaaatgaaaaaactaaatctacattacttgttcacggctttactgcatagtaaataaaaaaaaattaaattgagattttaaaatgtccatgactttaatattgattcacgtggaaacaaggcagaaagaatattaactcccccctaccttaatgccaaaaggacactgccttgaaaaatcccatttcaaaagatgaaagtagtatttcattgcttatttctacaaaaatttataaaataaaaaaatagtgaaatattttacagataatatatataatggtctcattcagggacatgtcctttagctatgtatatggtcaactattccaagtcctagaaatgcaaacccttaaaaaatatgaaagacaaaaatgataatgagca

SEQ ID NO: 60152 - DNA, 491 bp, Homo Sapiens
tttttttttttttttaagtctattgatctggcagaaagaattcaatagggataatatgttatagggtcaaaagtatctataaatattatgaagttgtatcagatagacaaatgatgtgttattatccctattttagagtattctgtaaaaaaaaggttaaacatctttcatttcaaattgtaatgtaactgtaacgtgaacaccactaatggccagaaattatctcaggcatcatgagactccctctctgtcacctctgagattagcactaagctttatccagcttgctggtgggacatttttacagtccacttagacaacttagcttcactaataattttaggatcttttattagaaaataaaaatctagcctcatattctcaaagcactattttatgagggatctaaggctatttttcaggtcggatgattactgcccctggctctgtaaaaattctttttgttgagaaacctttgtaaagttgtattt

SEQ ID NO: 60153 - DNA, 268 bp, Homo Sapiens
tctggattcacttttgaagattctgacatggagtgggtccgccaacctccagggaaggggctggagtgggtcgctggtagtggtgtaaatggtgataccacagattacacagactctgtgaagggccgactctgcatctccagagacaccggccagaactccctgcatgtgcagatgaacagtctgagaggcgaggacacggccttgtttaactgtgcgagtccctttttgcagtagtggtagattctgcgattttggtgcgacatgg

SEQ ID NO: 60154 - DNA, 1996 bp, Homo Sapiens
atccccagcaagcaccagggcccgtgtgaccaggccccgtccccatgcctcggggtgcagtgtgcatttggggcgacgtgtgctgtgaagaacgggcaggcagcgtgtgaatgcctgcaggcgtgctcgagcctctacgatcctgtgtgcggcagcgacggcgtcacatacggcagcgcgtgcgagctggaggccacggcctgtaccctcgggcgggagatccaggtggcgcgcaaaggaccctgtgaccgctgcgggcagtgccgctttggagccctgtgcgaggccgagaccgggcgctgcgtgtgcccctctgaatgcgtggctttggcccagcccgtgtgtggctccgacgggcacacgtaccccagcgagtgcatgctgcacgtgcacgcctgcacacaccagatcagcctgcacgtggcctcagctggaccctgtgagacctgtggagatgctgtgtgtgcttttggggctgtgtgctccgcagggcagtgtgtgtgtccccggtgtgagcaccccccgcccggccccgtgtgtggcagcgacggtgtcacctacggcagtgcctgcgagctacgggaagccgcctgcctccagcagacacagatcgaggaggcccgggcagggccgtgcgagcaggccgagtgcggttccggaggctctggctctggggaggacggtgactgtgagcaggagctgtgccggcagcgcggtggcatctgggacgaggactcggaggacgggccgtgtgtctgtgacttcagctgccagagtgtcccaggcagcccggtgtgcggctcagatggggtcacctacagcaccgagtgtgagctgaagaaggccaggtgtgagtcacagcgagggctctacgtagcggcccagggagcctgccgaggccccaccttcgccccgctgccgcctgtggcccccttacactgtgcccagacgccctacggctgctgccaggacaatatcaccgcagcccggggcgtgggcctggctggctgccccagtgcctgccagtgcaacccccatggctcttacggcggcacctgtgacccagccacaggccagtgctcctgccgcccaggtgtggggggcctcaggtgtgaccgctgtgagcctggcttctggaactttcgaggcatcgtcaccgatggccggagtggctgtacaccctgcagctgtgatccccaaggcgccgtgcgggatgactgtgagcagatgacggggctgtgctcgtgtaagcccggggtggctggacccaagtgtgggcagtgtccagacggccgtgccctgggccccgcgggctgtgaagctgacgcttctgcgcctgcgacctgtgcggagatgcgctgtgagttcggtgcgcggtgcgtggaggagtctggctcagcccactgtgtctgcccgatgctcacctgtccagaggccaacgctaccaaggtctgtgggtcagatggagtcacatacggcaacgagtgtcagctgaagaccatcgcctgccgccagggcctgcgaggggctatcgagaggagctcactgtgggatggggttgacctctgccgcctgcctgggtatctgggcctggccatggctgtgttcttcatgtgttgattttatttgacccctggagtggtgggtctcatctttcccatctcgcctgagagcggctgagggctgcctcactgcaaatcctccccacggcgtcagtgaaagtcgtccttgtctcaggatgaccaggggccagccagtgtctgaccaaggtcaaggggcaggtgcagaggtggcagggatggctccgaagccagaaatgccttaaactgcaacgtcccgtcccttccccacccccatcccatccccacccccagccccagcccagtcctcctaggagcaggacccgatgaagcgggcggcggtggggctgggtgccgtgttactaactctagtatgtttctgtgtcaatcgctgtgaaataaagtctgaaaacttt

SEQ ID NO: 60155 - DNA, 363 bp, Homo Sapiens
cttttttttttttttttttaaaggcatcacaaagaacaagtctagacactggttccattccagcaatagtcaactgacaagtcctttcaaatggcctaagctatatgatctatttccccttctacaaccaattctgctcacgaaaacctcagagtgtttttcggaagaatttaattttttttttttcagtgggactatcaatttgcaaagcatgagtagtagcttttcagttaaaacctattgctgcagggagggtgtgaaactgcagcgtggtggtgttctgtcacatgcttcctgccctgcacccaccccatccagtcctacacacacatggcacacacggcacgtgcacacacacacggg

SEQ ID NO: 60156 - DNA, 470 bp, Homo Sapiens
tttttttttaaggaaaagggaaaaacagatatcttgaaaagaagcctcaaatctgagagattggggtctctcatcctgtccaaaccctgctctagggaaggtcaggtggaattctgacaaaaccccttaccccagaattgcatgaatggagttaagatggctcgtaatgtaatgaagtgaaaaaagcactggacagaggcaggaatctcagttttgagtctagatctgccacaagcaacatgttgccttaaacacggaacttcctttaatcagactgggttcttcactcttaaaatgaagtaaggtttccacaattctatgaatctagattttatcaccctctctctttatttctatgtgcttctcctttaaagtatacagagaattcctacgtctactcatataacagaaagtctgattttacacaaaggcataattttagcatctgaagaaacttgcaagcctagaga

SEQ ID NO: 60157 - DNA, 453 bp, Homo Sapiens
  misc_feature (405)..(405): n is a, c, g, or t
aataaacacagctgtgtacatgcgtgcataggcaatatagaactaatagagagaaaagagcttccaagaaaacatttgcaagcaataaaggagagaaaaatctagggattaatgaatttccatcccacctttcatttttatttcaaacacatgaaagttcactaaacttggtgctgtgaatatgctgtacattagatattatttccaaacaaccatttattaaatggggaactttctcccagtgggggcagaagagtgagtcagtctgatgagaagccatcgacaacctgactgttctgtgatgtcgtccttgcggaggtccaggaaccagctcggagtcttccaatctctagctgcacaagtccctgtgcacacttggaaaggcaagaaaagaacagaaatganaagtagtagcatttatattctgaaatatcttaacagagcctctccctg

SEQ ID NO: 60158 - DNA, 530 bp, Homo Sapiens
tttttttttttttttttaacagagccttaatgaggcatggtttagttacataactaaagctagccaaccaagttctatgccaacctcctaagtctcacacacaaaataattaaataagcgcaagctaagacgaaatgactttcccagaaacaagtcagaaaaaatgcaagcaagtgatgaaatggaatactaaggaaggtgttgatacctgtagcttgatggtaacttttaacaaaacccaatagcaataaaaagaagccaaagcaaatatatagtaatcaaatttatatagcatctagagcatattaatgaaaatattgaacaaaaatatttaaaaggcaccaaagtaatgagaactgcatttgaccatgctgatttcacttccattacagctctaagcttctgaaaccgcttgctcttctcgcagctgtgtacactgagcctgattatcaggtcatttctgtacttctttatatagccacgttatttgtgctcctatgaatggtttttaaatgagtttgaaatgtaac

SEQ ID NO: 60159 - DNA, 424 bp, Homo Sapiens
  misc_feature (3)..(3): n is a, c, g, or t
ttntttaaacaatctggagtttattttttctcatttaataattggggagtttggcaattgctcatcttgatttgggtgttcaacaatgccatatcagggacccaggatccccttaatcctccttcagttctatctctgaaatgtaactttcattctcacatttgctgtttcatggttgtttgatggcagctgcacctttaggcatgctgttggccagaaagaggagaaagaggcaatgactgttaccacacaaagctctgattttttaatttgaaaggaaagcccttctcagtagggttctgttcatttcattcaatttctcaattgcagtagtcacatatcaagtactcaatatcacatatggttagtagctaccacaatagagagacagaatggatggttgatttccttcactgcaaaaagt

SEQ ID NO: 60160 - DNA, 478 bp, Homo Sapiens
tttttttttgagacggaatttccctcttgttgcccaggctggaatgcaataacgcgatctcggctcacctctgcctcccgggttcaagcaattctcctgcctcagcctctcgagtagctgggattacaggtgtgagccaccgtgtccagccaatttttgtattttttttgtagagaaaaagttttgccatgttgcccaggctgatcttgaactcctgagttcaagtggtccacccaactcagccccccagagtgctgagattacaggcgtgaaccactgtgccaggcccatagctgaattttcaaggacagaaggacaatcaggcactttgatttggaccttctctgtcctttcctctgctccagttacatgtagttaagtctgggcaggtttgaacagttaataaaacaaactgttaatgaggccatatttaccaatccgatccttatagagaataagaaaaatatgcatcactggc

SEQ ID NO: 60161 - DNA, 4117 bp, Homo Sapiens
gtttagaacagcctacagacccagtggcacgagacgggcctctctcccaaacatcttccaagccagatcctagtcagtgggagagccccagcttcaacccctttgggagccactctgttctgcagaactccccacccctctcttctgagggctcctaccactttgacccagataactttgacgaatccatggatccctttaaaccaactacgaccttaacaagcagtgacttttgttctcccactggtaatcacgttaatgaaatcttagaatcacccaagaaggcaaagtcgcgtttaataacgactactgaacaagtgaaatttctctgttttctgttgagtggctgtaaggtgaagaagcatgaaactcagtctctcgccctggatgcatgttctcgggatgaaggggcagtgatctcccagatttcagacatttctaatagggatggccatgctactgatgaggagaaactggcatccacgtcatgtggtcagaaatcagctggtgccgaggtgaaaggtgagccagaggaagacctggagtactttgaatgttccaatgttcccgtgtctaccataaatcatgcgttttcatcctcagaagcaggcatagagaaggagacgtgccagaagatggaagaagacgggtccactgtgcttgggctgctggagtcctctgcagagaaggcccctgtgtcggtgtcctgtgtcggtgagagccccctggatgggatctgcctcagcgaatcagacaagacagccgtgctcaccttaataagagaagagataattactaaagagattgaagcaaatgaatggaagaagaaatacgaagagacccggcaagaagttttggagatgaggaaaattgtagctgaatatgaaaagactattgctcaaatgattgatgaacaaaggacaagtatgacctctcagaagagcttccagcaactgaccatggagaaggaacaggccctggctgaccttaactctgtggaaaggtccctttctgatctcttcaggagatatgagaacctgaaaggtgttctggaagggttcaagaagaatgaagaagccttgaagaaatgtgctcaggattacttagccagagttaaacaagaggagcagcgataccaggccctgaaaatccacgcagaagagaaactggacaaagccaatgaagagattgctcaggttcgaacaaaagcaaaggctgagagtgcagctctccatgctggactccgcaaagagcagatgaaggtggagtccctggaaagggccctgcagcagaagaaccaagaaattgaagaactgacaaaaatctgtgatgagctgattgcaaagctgggaaagactgactgagacactccccctgttagctcaacagatctgcatttggctgcttctcttgtgaccacaattatcttgccttatccaggaataattgcccctttgcagagaaaaaaaaaaaacttaaaaaaagcacatgcctactgctgcctgtcccgctttgctgccaatgcaacagccctggaagaaaccctagagggttgcatagtctagaaaggagtgtgacctgacagtgctggagcctcctagtttccccctatgaaggttcccttaggctgctgagtttgggtttgtgatttatctttagtttgttttaaagtcatctttactttcccaaatgtgttaaatttgtaactcctctttggggtcttctccaccacctgtctgatttttttgtgatctgtttaatcttttaattttttagtatcagtggttttatttaaggagacagtttggcctattgttacttccaatttataatcaagaaggggctctggatccccttttaaattacacacactctcacacacatacatgtatgtttatagatgctgctgctcttttccctgaagcatagtcaagtaagaactgctctacagaaggacatatttccttggatgtgagaccctattttgaaatagagtcctgactcagaacaccaacttaagaatttgggggattaaagatgtgaagaccacagtcttgggttttcatatctggagaagactatttgccatgacgttttgttgccctggtatttggacactcctcagctttaatgggtgtggcccctttagggttagtcctcagactaatgatagtgtctgctttctgcatgaacggcaatatgggactccctccaagctagggtttggcaagtctgccctagagtcatttactctcctctgcctccatttgttaatacagaatcaacatttagtcttcattatctttttttttttttttgagacagagtttcgatctattttaagtatgtgaagaaaatctacttgtaaaaggctcagatcttaattaaaaggtaattgtagcacattaccaattataaggtgaagaaatgtttttttcccaagtgtgatgcattgttcttcagatgttgaaaagaaagcaaaaaataccttctaacttaagacagaatttttaacaaaatgagcagtaaaagtcacatgaaccactccaaaaatcagtgcattttgcatatttttaaacaaagacagcttgttgaatactgagaagaggagtgcaaggagaaggtctgtactaacaaagccaaattcctcaagctcttactggactcagttcagagtggtgggccattaaccccaacatggaatttttccatataaatctcaatgaattccctttcatttgaataggcaaacccaaatccatgcaagtgttttaaagcactgtcctgtcttaatcttacatgctgaaagtcttcatggtgatatgcactatattcagtatacgtatgttttcctacttctcttgtaaaactgttgcatgatccaacttcagcaatgaattgtgcctagtggagaacctctatagatcttaaaaaatgaattattctttagcagtgtattactcacatgggtgcaatctttagccccagggaggtcaataatgtcttttaaagccagaagtcacattttaccaatatgcatttatcataattggtgcttaggctgtatattcaagcctgttgtcttaacattttgtataaaaaagaacaacagaaattatctgtcatttgagaagtggcttgacaatcatttgagctttgaaagcagtcactgtggtgtaatatgaatgctgtcctagtggtcatagtaccaagggcacgtgtctccccttggtataactgatttcctttttagtcctctactgctaaataagttaattttgcattttgcagaaagaaacattgattgctaaatctttttgctgctgtgttttggtgttttcatgtttacttgttttatattgatctgttttaagtatgagaggcttatagtgccctccattgtaaatccatagtcatctttttaagcttattgtgtttaagaaagtagctatgtgttaaacagaggtgatggcagcccttccctagcacactggtggaagagaccccttaagaacctgaccccagtgaatgaagctgatgcacagggagcaccaaaggaccttcgttaagtgataattgtcctggcctctcagccatgaccgttatgaggaaatatcccccattcgaacttaacagatgcctcctctccaaagagaattaaaatcgtagcttgtacagatcaagagaatatactgggcagaatgaagtatgtttgtttatttttctttaaaaataaaggattttggaactctggagagtaagaatatagtatagagtttgcctcaacacatgtgagggccaaataacctgctagctaggcagtaataaactctgttacagaagagaaaaagggccgggcacagtggcttattcctgtaatcccaacactgtggaaggccgaggcaggaggatcacttgagtccaggagtttgaaacctacctaggcaacatggtgaaaccttgtctctaccaaaataaaaattagctgggcatggtggcacgtgcctgtggtcccagctacttgggaggctgaggtgggagcctgggaggtcaaggctgcagtgagccatgatcatgccactgcactccatcctgggtgacagcaagatcttgtctc

SEQ ID NO: 60162 - DNA, 4003 bp, Homo Sapiens
gagctccctctctggcaccaagctccctggggtgagttttctttttgaagagtccaggggaacaggtaagcagtggggaagcagggagtccatttcagggacaggaattcccggatgaaaagtgaaaggagagggacggggcccaagctgagggtttcttcctggtttctcggacagctcctggaccaagactcagggaacattgagacagagcgtttgtcacaggaggagcggggtcagggcgaagtcccagagccccaggcatggctctcagggtctcaggccccgaagcggtgcatgggctggggaggtgcagcattggggattccccatctccgcagagtttctcttctccctctcccagcctgcgacgggtccttcttcctggacactcacgacgcggacccagttctcactcccactgagtgtcgggtttctaggaagccaatcagcgtcgcgcggccccggttctaaagtccccacgcacccaccgggactcggagtctccccagacgccgacgatggggtcatggcgccccgaaccctcctcctgctgctctcggggaccctggccctggccgagacctgggcgggtgagtgcggggtcaggagggaaacggcctctgccgtgaggagcgaaaggtccacctggctggggcgcaggacccggggagccgcgccgggaggagggtcgggcgggtctcagcccctcctcgcccccaggctcccactccatgaggtatttcagcaccgccgtttcctggccgggccgcggggagcccagcttcattgccgtgggctacgtggacgacacgcagttcgtgcgggtcgacagtgacgccgtgagtctgaggatgaagacgcgggcgcggtgggtggagcaggaggggccggagtattgggacctacagacactgggcgccaaggcccaggcacagactgaccgagtgaacctgcggaccctgctccgctactacaaccagagcgaggcgggtgagtgaccccggcccggggcgcagatcacttactccccgctccatgcctcacggacggccctggtcccctgagtctccgggtccaagatcgaccccgaggctgcgggacctgcagagatcctcgacccgggagagccccaggcgcctttacctggtttcatcttcagttgaggccaaaatctccgcaggttgctaggggccgggccagggctcggtgggcggggctgaccgcgggaactgggccagggtatcacatcctccagggaatgtttggctgcgacctggggcccgacgggcgtctcctccgcgggtatgagcagtatgcctacgacggcaaggattacatcgccctgaacgaggacctgcgctcctggaccgccgcggataccgcggctcagattacccagcgcaagtatgaggcggccaatgtggctgagcaaaggagagcctacctggagggcacctgcatggagtggctccgcagacacctggagaacgggaaggagacgctgcagcgcgcgggtaccaggggccatggggagcctgctcgatctcctgtagatctcccgggctggcctcgcacaaggaggggaagaaaatggaaacaccaccagaatatcgccctccctcctgtcctgacggagaggaatcctcctgggtttccagatcctgtatcagagattgactctgagggcccaccctgctcttcctgggacaattaagggatgaagtctctgagggagtggaggggaagacaatccctggaagactgatccgcggtcccctttcaccccacagcaaccttgggcaccaggacttttcctcccgggccttgttctctgcctcacactcaatgtgtcggagtctgactccagctcctctgagtcccttggcctccactcagatcaggaccagaagtccctgctaccctgctcagagactagaactttccaaggaataggagattatcccaggcgcctgtgtccaggctggtgtctgggctctgtgctcccttccccaccccaggtgtcctattcatcaggatggtcacatgggcgctgctggggtgtcccatgaggaatgcaaagtgcctgagttttccgactcttcctttcagaccccccccaagacacacgtgacccacccccctctctgaacatgaggcataacgaggtcctgggttctgggcttctaccctgcggagatcacattgacctggcagcgggatggggaggaccagacccaggacatggagctcgtggagaccaggcccacaggggatggaaccttccagaagtgggcggttgtggtagtgccttctggagaggaacagagatacacatgccatgtgcagcacaaggggctgcccaagcccctcatcctgagatggggtaaggagagagatgggggcggccatgtctcttagggaaagcaggagcccctctggagacctttagcagggtcggggctgggtcctggaggtcagaaccctcacattcccctcctttcccagagccctctccccagcccaccatccccattgtgggtatcattgctggcctggttctccttggagctgtggtcactggagctgtggtcactgctgtgatgtggaggaagaagagctcaggtggggaaggggtgaggagtcgggtttgagttttcttgtcccactgggggtttcaagctccaggtagaaatgtgttctgcctggttaccgggaagcaccatccacattcatgggcctacccagcctgggccctgtgtgccagcacttactcttttgtaagcacctgtgacaatgaaggacagatttctcaccttgatgattgtagtgatggggatctgaccccagtaatcacaggtcaggggaaggtccctgctgaggacagaccttaggagggcagttggtccaggacccacatctgctttccttgtttttcctgatcctgcccttggtttgcagtcacacatttctggaaacttctcgaggttccaagactaggaggttcctctaggacctcatggccctgctaccttcctggcctctcacaggacgttttcttcccgcagatagaaaaggagggagctactctcaggctgcaagtaagtatgaaggaggctgatccctgagatccttgggatattgtggttgggagcccatgggggagctcacccaccccacaattcctcctctagccacatctcctgtgggatctgaccaggttctgtttttgttctaccccaggcagccaaagtgcccagggctctgatgtgtctctcacggcttgtaaaggtgagaccctggggaggctgatgtgtgtgggttgttggggtaacagtggatatagctgtgctatggggtttctttgacttggatgtattcagcacatgatgggctgttcaaggtgtgacccctcactgtgagtgatatgaatttgttcatgaatattttttctatagtgtgagacagctgccttgtgtgggactgagaggcaagatttgttcatgccttccctttgtgacttcaagaaccctgacttctctttctgcaaaggcatctgaatgtgtctgtgtccctataggcataatgtgaggtggtggggagaccagcccacacccgtgtccaccatgaccctgttccccacactgacctacattccttccccgatcacctttcctgttccagagaagtggtgctgggatgtctccatctctgtctcaacttcatggtgcactgagctgtaacttcttacttccctattaaaattagaatctgagtataaatttacttttttcaaattatttccatgacgggttgatgggttaattaaaggagaagattcctaaaatttgagagacaaaataaatggaagacatgagaaccttccagagtccacgtgtttcttgtgctgatttgttgcaggggaggagagtagatggggctgtgccgatgtgtgctcaggccaccatgggctttatgtggtcacagctcacctgggtcactt

SEQ ID NO: 60163 - DNA, 837 bp, Homo Sapiens
gccatggtgaagaagagatgatccctggatccgttctgattagtgatgctgtttttctggagttggtcgatgccctgaatcagtactcagatgaggaggaggaagggcacaatgacacctcagatggaaagcaggatgacagcaaagaagatctgccagtaacaagaaagagaaagcgacatgctattgaaggtatcgagaactaacagagatgtcagaccccaatgcacttccccctcagtgcacacccaacatcgatggccccaatgccaagtctgtgcagcgggagcaatctctgcactccttccacacacttttttgccggcgctgctttaaatacgactgcttccttcaccgtgagtggggctactctgtttgaaatgctctcctctcttccatccccagccaccatttccttctctttgttctggtttctcgtatagagttcctggcttctgttctaacgttttacaaagggccagttctattttcccttgctcaattatagtgcaacaatgctttgcatgatagggacagactaactagcaacttatctgtccctcagtaacctcttagctttgaaagcattgtgttgatgtcagaaatgactgaattttgtgcaccctgatggtagccgtttaatatcgaattctaactcctaaaaatagctctctaaattcacttttgtttctccccaatctgctcaagtggatagaaccactggcaccaggaccagttttgtttcccaggctattcaatgacaaccccttaagtgtattataaacgcaaggaagtacggaaattcgaggatggaaccggtaaaaataaaaagaaaaa

SEQ ID NO: 60164 - DNA, 494 bp, Homo Sapiens
tcccttttcttttttcctttttcattttctcaatatgtattttgactaggttaattttttcctcaattcagttatactatagacctttctttggaattttttcttttttaaaaaaaagaacagctaaacaaggaaggaaaagtcactatacttctctgccttctctttatagtagtcattcaaaacttcctgtaagcgattgctgtccacttgaatagaaccttccaattctgcattatccagagctccaatttcatcatcatcatattgctcataaaacttgaatataaacagagaaaagataccatgaaaagcaaatgtactcagtaagactacacacttaaaaatttttttacattaactttattcttacacaatagttattcaggtactatcacaattaccattaaaatatcagtagggatttaatgcaacaataggatgtggaagatatttctgctcagtactttaagacttacatttagcctaaaaat

SEQ ID NO: 60165 - DNA, 286 bp, Homo Sapiens
  misc_feature (1)..(1): n is a, c, g, or t
  misc_feature (4)..(4): n is a, c, g, or t
  misc_feature (282)..(282): n is a, c, g, or t
ncanaattacactgcacctgttccttggcaaggtgcagcctgggattcaagttcaaggggctgcgaaacttctattactcatcactttagatatgaaagcattttaaatgttttttttaaatccattaaaaaaaaaaaacctctgttactaattgttagttgcttcttgcagggttatatcagttcctagcttgaggttttccacgggactttaaaacctcagcaaagaataagttttaaggactcctcccccatttccattaaagcagatgggagcatagncaca

SEQ ID NO: 60166 - DNA, 552 bp, Homo Sapiens
ttcggcgtccagcacattgtttgggtccacgtacacgtacacccagagggtgatcagggtcacctgagcagcgtggaggtggtgtcagggtagagtccaatgagccctggccatgcctgggcacccagagccctggaggcagggacccagccctgtgccaagcctcaccaggaaggggctgcacatccaggtgaaggtggttgtggtgtggaggtaggccgccgagcgcagcagctgtagctcaccctgcctgatgccctccacctgcttcaggaagctgggctcccaggcgtacagcttcagcaccttgatgccgttcaggatctcactcatcagctggatgcgcgagtccttcaatttcattagctttacctggaaggcgcgcatcttcacggccacagctccgttgagtggaatcagcaagaccatgaaagcgactccagccaggacagagggacctaggttctgccagtagaagtagatgcccaggatgatctgcatgggtgctgaccacagcagattgacgaatggggcaaggtccatgaagcgctg

SEQ ID NO: 60167 - DNA, 473 bp, Homo Sapiens
  misc_feature (284)..(284): n is a, c, g, or t
  misc_feature (292)..(292): n is a, c, g, or t
  misc_feature (350)..(350): n is a, c, g, or t
  misc_feature (376)..(376): n is a, c, g, or t
  misc_feature (384)..(384): n is a, c, g, or t
  misc_feature (445)..(445): n is a, c, g, or t
  misc_feature (456)..(456): n is a, c, g, or t
caggatatgggttgggaatcatggcctgaagcaggaccctgcctgcttcagtcccagatatcatttgtatgtgacgagccctgcagaggtcctcaccagctgggagtcactggctggtcagattcacgttggcagcacctgacaggatgtggctacaaatgaccagagcgggttctgtcgtcaaacttgggacccgtactttggagcataacggggaagaaagtgcttaaaggattgctcattgcaggatctcaagtttcccagcaggaactcgccatgcgggngtcatggngggcgcagggaccggaagggaaagggccttaaccgtctggtccggccgtaaggccagngggggtaaggaagttctcccttcctnggggccantccttaagaagagaaaaggggggaaggaaaagcttgggccgaagaaagggaaacaagcccnttgagaaagcngaggaaaaaagaagaga

SEQ ID NO: 60168 - DNA, 432 bp, Homo Sapiens
tttttttttttgagacagggtcctcactctgctgcccaggctggagtgccgtgctgcaatcataactcactgcaacctcaaactcctgggctcaagcgatcctcctacctcagcttccccagtagctaggactacaggcgaaagccaccatgcccagccacaggtacgtctctttaatggttagcaacgtcttctgacaaagtttttcttgaaattatcattctgactctaaagcagttcctcttcctttctccctatctctgcaacagaattcactaatttattaatatataacattctggatactggactggtggaaaggcaaatcgaagatttttacttttactccaaaagagtagctatattcttctgtaaaattggaactgtgtgaaataagtaggccactggatagactggaattctgagatatct

SEQ ID NO: 60169 - DNA, 582 bp, Homo Sapiens
tttttttttaattattagtaaaatatgcttgtgtccaatggagaagataaggcatgaacctaaataccataaaactcagaacaaagtacctaacgcaatccccggtgctgagcagaaacttggtaaataatttctgaactactgaaagtggcaactgactgtaccatagatatggtccaccccactcccgccatcgctcctccctggctttggtgatcacacctgagagcatgtcataaacttatctgtttgctcactgcttatttgccccactagagcaaaagtttggtgacagcaggaactttgtcatattctccacactatcccccgaattttgcacagtatctggcaaacggtcggtgcttgtttggtgaataaatgaatgagtgaatgtctagcacaacatgcaacagatgtatgtgctccacaagtttctgctaatttattattgttggaaggggcttaaccaaagaaaaggtaagtgctgtggaaattcaaagaagtatgactgtttccacaagggcaaggacagcttcgtggaaagattatgatgagctgggcgttcaaagaaggctgttgtgt

SEQ ID NO: 60170 - DNA, 536 bp, Homo Sapiens
tggcttaagacgatttattgcaactgtaaaaaaatgcgcccccccccttttttttccagaaaggaagcgtggattgcattaatcaagctaaagacttttatacttctttacagtctgacacaaaaacagacagtcataaagataagcccgaatcatcaagaaagtgcacagtagtattttgcaaacccaatttagggaatcagggaagagtaaaatccacatggataaggtttccccttacttcccattcgtgatggtacagtgagttcatgttatggaacgcccactgctccaaacacatggcaatgatggacaaaatataaaaaggtaaactcaaaaaggcatggccaagacaaaacaaacaaaacaaaacaaaaacaaaagataattgtctccatgttgaagtactaggcttgttgctctggaagcaaaccatggtaaccagaagctaagctcctgcaatgtatagcggttccaaagtaccctgagcaagatggaagacaaaagccatactcacagattaaagcccaggacta

SEQ ID NO: 60171 - DNA, 1862 bp, Homo Sapiens
ggcctttttttttttttttttaaggcatggacaagctgaatctaaaatgtttatgacaaataatctataacagccaaataactttgaaagaacaaagttgaaagatttaaatcatatgacttcaacatttattataaagttatagtaatcaagacatgtagtaatgccaactaagatagacaaatcagagagtccagaaatagaaccacacatctatgataaatggtcaactgatttttcataaagtgaaaatgcagctcaggagaaaaagaatagttttttaaacagtgctggaccactggatacccataaacaaaaccaaaaattttaaaaactcattttggctgagtgcaatgccttatgccctgtaatcccagcactctggggaggcagaggtgggaggactgcttgaggccaggagtttgagacctgcctggtcaacatagtgaaaccccatctctacaaaagaaaaaaattagtcaggcacggttgcatgtgcctgtagtcccagctacttgggagcctgaggccaaccatcacttaagcccagcagtttggggctgcagtgagctatgatcccatcactgcactccagccttggtgacagagtgagaccccgtgtcaaaaaaaaaaaaaaaaattttgagcattctccaagtcttcgccttttctggttttaatttaaaacaaacaaacaaaaaaaacaaaacaaaacatagtgcatatgtagtttttgtctgcccagaatccctcttttctgcagaaaactgccttactcccactccacgtgttcctagtaagataacaatcacagtgccctttcagctacctggctctgggagtgggttcagtatcaacctattctttcagttcttctaaagtaaactgctgatggaatatttctttagtctttcaagagggcagagccatgcttcttccttaatatgtgtgttcatgacataaaacccttcaaacctctcctaatcttaaaagtattaaatgtttacatcttcctcaaacataatacttgattgacagtcaaggagttccaacacaaaactattaatatggcgagacagcaaacaccaacccttcttatccactcaattatactatgaaatgagttatggttgaatcatcagaatgttctggaatggctgggtacagtggcttacacctgtaatcccagcactgtaggcaggtggatcacttgagtctaggaggctggtcttgaaccctggaggcagagtttgccatttgccattgcattccagcctgggcaacaagggcgaaactccatctcaaaaaaaaaaaaaaaagactacagaccaggcatggtggttcatgcctgtaattccagcactatgggaggctgaggtgggaggaccacctgagcccaggagtttgagaccagcgtgggcaacaaagtgagataccatctccacaaataacaaacaaaaaacaagaaaacaagattgagaaagaggttgccataatctctagtagtctgtacagtcttcctcttcttctttttttttttttttttttttttttttttttttagacagagtgtcgctctgttacgcaggctggagtgcagtagggcaatcttggctcactgcaagctccgcctcctgggttcacgccattctcctgcctcagcctccaagtagctgggactacaggtgcccgccaccacgcccggctaatttttgtcagctggtggaatgtgcctgtggtctcagctactcggcagactgagatagatcactggatcactggagctctgggggtcaaggctgtagtgagccatgattacatcactgcactccagcctgtcagcagagggaagaccctgcctc

SEQ ID NO: 60172 - DNA, 457 bp, Homo Sapiens
tttttttttttttttagttgataaagtgtttttattttggagagttaataacttactctaaagtagattttaattactagaccttgctaacaactgacatatgaattaattactttaaatcactatcaagttcaatctccatacaagtttcaaggagaactgcacagcactcaaacataaaggaaatattaatgacataaatgatggaacacaatcaagtctattattcattagtatgaatgaaaacaaaatacagtgagcgataaagacagactagaactaatatcatttgggtttacaaaaaccatctcaagtccaaacatgttcttgtccaaagtccttgcctcatttcaggaaacaaccccatgcctcacttgtgagattagagtaccatgttttctttctttccacatgtggaagtggggtaaagagatgttttggccaaaaaatacattct

SEQ ID NO: 60173 - DNA, 398 bp, Homo Sapiens
  misc_feature (308)..(310): n is a, c, g, or t
  misc_feature (313)..(313): n is a, c, g, or t
  misc_feature (353)..(353): n is a, c, g, or t
ggagtggtgtgcagtttattttatgaagtgagaacttttttcaaaacaagacgctatctcccctcctcccaaacacacatatggcacaataaatcagcatttaccacttctgttcatggggaaatgcttggaaatctctctctaggttactctaggaaatgacaaagttgcccttttcaaggatatacccaaacagctagcaccaggccacttttgatctgtgatgtctacaactccaggccaaatcatcatacagattgtgtgtgtgtgtgtgtgtgtgtgtctgtgtgtgtgtgtgtgtgtgggtnnnggnattattttttaattgaaagaaaacctgtttattaagtgtnacgctaattttggcctaaaagtcacagccttatttttaatcccaa

SEQ ID NO: 60174 - DNA, 492 bp, Homo Sapiens
tgtagagatcaagtttcactatattacccaggctgatctccaactgggctcctctgcctcccagagtgctgggacagggtctcactctgttgcccaggctggagtgcagtggcatcgtcccggctcactgcagcctagacctcccaggctcaagtgatcctcctgcctcagcctcctgagtagctggaaccacatgcgtgcaccaccacacgcagcgaactattttgtagagatggggttttgccttgttatccaggctggttttgaactcctgggttcaagggatctgccctcttcggcctccccaagtgctaggactacaggtgtgagccaccgtgccccgccagccatctgtgattttgaccaacttcccattttatgatcctaatcaaagttccactgatgatttcggcccaggcccagtgactcatgagtaaccttgaccagtgttctcattagtgaccctaatgatccaccagtgatcttttagtg

SEQ ID NO: 60175 - DNA, 535 bp, Homo Sapiens
agagatggggtttcaccatgttgcccaggctggtctcgaattcctgggctcaaacgatccacccacctcagccttccaaggtgcggggattacaggtgtgagccaccgtgcccagcaccaccattattaactgtagttaccatgttgtgcagtgttatctcaaaaaatgtattcctcctaacactgtacactttgaccaacatcctaatgatttgcttaggataaactcttacatatggaattgcttgatcaaaagtgtccatgattttaaggattttgcatactgtcaagactgctttgattcaatgaccaatagtacaacagagtgtccattttactacacgggtattataattaatttctcattttttgccaattctataggtgcaaattgagcttacatttgactactaataagtttgaacatatttcctatcttcaatggcaatctgcattttgggggggtgaatttttcattgttagcccatttttctattggtatctgtggctgcttctgattaactcatatgcaaga

SEQ ID NO: 60176 - DNA, 531 bp, Homo Sapiens
aatttgcctagcattgataaagtatcagctgaggctgaaaaccaccaattttaacaaaaatcagcatatttcttcagtattgtgtggtgcttatctccttgggagcagaaagcagagactggattaatccaaaatcagggataaactgaccaggaggagcagaggaataatgggccaagagtactgaggatgcaagtaaaagtgctcaaattactgtattgaccttgtaatcccaagctgatcggggaaggaaaaaaaaaaaacaggagagggctggaaaattgtcacaggtaatgacagaggatcagatgtgctatagaaatgtgctgttgaaaatggtagactaagcccctctccaattatactgtggaatgagccgtataacatgttgtgattattggtttctcccttctggacctggagtgtcagttcttctaaagcagagacttccctttaatctctgtttaaacttggtgcctaggacaatgtaatggcatccataaaatatctaatggaatgagtttaacatgt

SEQ ID NO: 60177 - DNA, 829 bp, Homo Sapiens
  misc_feature (1)..(1): n is a, c, g, or t
  misc_feature (18)..(18): n is a, c, g, or t
  misc_feature (24)..(24): n is a, c, g, or t
  misc_feature (26)..(26): n is a, c, g, or t
  misc_feature (203)..(203): n is a, c, g, or t
  misc_feature (280)..(280): n is a, c, g, or t
  misc_feature (374)..(374): n is a, c, g, or t
  misc_feature (391)..(391): n is a, c, g, or t
  misc_feature (468)..(468): n is a, c, g, or t
  misc_feature (479)..(479): n is a, c, g, or t
  misc_feature (501)..(501): n is a, c, g, or t
  misc_feature (547)..(547): n is a, c, g, or t
  misc_feature (553)..(560): n is a, c, g, or t
  misc_feature (578)..(578): n is a, c, g, or t
  misc_feature (584)..(584): n is a, c, g, or t
  misc_feature (586)..(589): n is a, c, g, or t
  misc_feature (592)..(592): n is a, c, g, or t
  misc_feature (597)..(597): n is a, c, g, or t
  misc_feature (602)..(602): n is a, c, g, or t
  misc_feature (608)..(608): n is a, c, g, or t
  misc_feature (611)..(611): n is a, c, g, or t
  misc_feature (617)..(617): n is a, c, g, or t
  misc_feature (619)..(620): n is a, c, g, or t
  misc_feature (627)..(627): n is a, c, g, or t
  misc_feature (638)..(638): n is a, c, g, or t
  misc_feature (649)..(649): n is a, c, g, or t
  misc_feature (652)..(652): n is a, c, g, or t
  misc_feature (655)..(655): n is a, c, g, or t
  misc_feature (657)..(657): n is a, c, g, or t
  misc_feature (670)..(670): n is a, c, g, or t
  misc_feature (682)..(682): n is a, c, g, or t
  misc_feature (684)..(684): n is a, c, g, or t
  misc_feature (692)..(692): n is a, c, g, or t
  misc_feature (697)..(697): n is a, c, g, or t
  misc_feature (701)..(701): n is a, c, g, or t
  misc_feature (706)..(706): n is a, c, g, or t
  misc_feature (722)..(722): n is a, c, g, or t
  misc_feature (735)..(735): n is a, c, g, or t
  misc_feature (738)..(738): n is a, c, g, or t
  misc_feature (746)..(746): n is a, c, g, or t
  misc_feature (763)..(763): n is a, c, g, or t
  misc_feature (767)..(767): n is a, c, g, or t
  misc_feature (771)..(771): n is a, c, g, or t
  misc_feature (774)..(776): n is a, c, g, or t
  misc_feature (778)..(778): n is a, c, g, or t
  misc_feature (781)..(781): n is a, c, g, or t
  misc_feature (783)..(783): n is a, c, g, or t
  misc_feature (787)..(787): n is a, c, g, or t
  misc_feature (792)..(792): n is a, c, g, or t
  misc_feature (794)..(794): n is a, c, g, or t
  misc_feature (797)..(797): n is a, c, g, or t
  misc_feature (804)..(804): n is a, c, g, or t
  misc_feature (807)..(807): n is a, c, g, or t
  misc_feature (814)..(815): n is a, c, g, or t
  misc_feature (820)..(820): n is a, c, g, or t
ncctcttcccctttgccncttttngnattgagatatttgctggaggagggtagggtttgaagcttagaccaggaccggtggggtacaaaggggcccatgcaggagatgccctggccagtaggacctccaacaggttgtttcccaggctggggtgggggcctgagcagacacagaggtgcaggcaccaggattctccacttctnccagccctgctgggccacagttctaactgcccttcctcccaggccctggttcttgctatttcctggtccccaacgtntatctagcttgtttgccctttccccaaactcatcttccagaacttttccctctctcctaagccccagttgcacctactaactgcagtccctttngctgtctgccgcctttngtacaagagagagaacagcggagcatgacttagttcagtgcagagagataggtgaggcccagctcgagatctttatnccactcttgtnttggacaaaaggctagcacagngctaggacccaataaacgggaatcagcttggacttaccagctgatngaaaannnnnnnncttccttctccacgtctncctgtnannnnctnccttnccccnggcttnccntcgtcncnnccccctncccccccttcnccctcccaccnccnccncncccccccttcctntctccccccccncntccccccntctcncccnccccncccctccccccccccnctccccccccccnccncccccccnctccccccccccccccncccncttnccnnncntcncncctnccccntnccnccccccnccnccccccnnccccnccccccccc

SEQ ID NO: 60178 - DNA, 383 bp, Homo Sapiens
tttttttttttttttttgctttttcctgctcactctttcacagatgggaaggtgaaaagcaaaacctgagtgcggccatgggctgcactcagtaaaagaaacacctgcggcggctccgcgcctccctccctccctcccaggctcacctcctaccttccttacttcccttgtaaaggcatagccaggggacattgtcccccagcttcacatccacatgtctcctagcatggcacatgcatatcctgcccaaggagcatgaagtcagaccagcaaactgaacacgaggcacagtcctgcatgctctgggaccgagcactgagggggcccacaggtgacaaggtgttggtccttcagctctccctccctctggcttcacgagcaga

SEQ ID NO: 60179 - DNA, 523 bp, Homo Sapiens
  misc_feature (236)..(236): n is a, c, g, or t
gctttgatggggaaaattatttcaatgaccagatatttctcattctaaagtttttttttctcatatacactgttctgaaaactttagcactgcttctgcttgaggacactacaggctgaaaattgaatgaagaattagaaaattcaaaacatgaacagaaagctcagagctagtcagccgtgcctagctcagtcgcttgtcttcctgctgtatacatgttctcacggctgtgattntatgctgcatacatgtgacagattcaacttttcagcttgtgaaaccaaaccctgttcaaagtacacaacaaagcatgttgacatcttgtgtcattctgcaaagagcactatgacttctgggtttccctgagtcaaactggatcatcgtggcctaattagtgtggtgccagcccattcccaaccatctgccagatgcctccaagccccaatgtggcagtcacgtaaccataactcaatagctgtcctcaagtccctggaatcttggcaaagccgaaactcatgcaaga

SEQ ID NO: 60180 - DNA, 447 bp, Homo Sapiens
ttttttttttttttttttttaacaggaaattcagttctttatatgcattctcctaatttttaattggtggcaactgattttaaccatttttttgaataggcaaacaccaaaatcaaaacttttaaagaacagtgaaaaggatacctctcaccccagatatccaccattctcaaatttgtgtttatccttccagagaatagtaatgtctttttcacatagataatagcataccacatatatttttctgcatttggctttcatatcttggcgatgtttccacaccaattcataaagaactcttaacccatttttacaacattatagtattccatcatatggttgggctataaaggaataaaacccagatcaataatcacttgggttctttctaatcttttgctgtctcactgtgcagtgactaaccttgtacatttatcttttctttct

SEQ ID NO: 60181 - DNA, 544 bp, Homo Sapiens
ttttttttggtaatctgggtataagatttcaagctttcctatggaagtccaggagctgaagaattatactctcttcttacttcttctgacagtcactgtgacctttagatggccatttaaatggcccactcatttccatcttagattacaaaacttccaactaccacatgctgagcatcctaagcccaacactcacatcagccacagtaatcatcagttccatgaaaggcccatatatttcctagtgaagtgaaattcttgatggaggtatgatggcaaataacagtgttcactttcacttctccgaaaacaaaatacagtaggctagactgtgagttcctataagagagccccagagatggcacacccagctcgccattggggaaaagagccgggggaaaacaagcaccagtcaagaaaaaagagtcatagtgatgatgcctgaaatgctgtacagtggaaagaccttcagtggaaaataacaacgactcaggaaattctagagttttaagtccacctgtaagacgtgctccaatacattaag

SEQ ID NO: 60182 - DNA, 464 bp, Homo Sapiens
ttttgagacggagtcttgctctgtcactcaggctggagtgcagcggcgcaatctcagctcactgcaacctccgcctcctgggttcaagtgagtattttgtatttttagtatttttagtaaattttgtatttttagtagagacgggatttcaccatgttggccaggctggtcttgaactcctgacctcaagtgatccacccacctcagcctcccaaagtgttgggattacaggtgtgagccactgcgcccagcctatagttcttatttaaactaataatttgacctaaaaaccttgtaggttcatggaatgaatgaatattcatagagtgaatgaaggggtgtatatgtattctgatttcaacagaggtaggaggttcttatttctatgcaactgaaatccatcttgtagccatcaccatccactttaatttttcctcataggaagtgtggttaagagtgctggc

SEQ ID NO: 60183 - DNA, 552 bp, Homo Sapiens
  misc_feature (534)..(534): n is a, c, g, or t
  misc_feature (541)..(541): n is a, c, g, or t
tttggtttgtttttagctactctatactatattcagatttctgtcatttttacctaatgttctttttctgttcctggatcccatcctggatcaggtggtatgcattcttataagtgaaatattaatatatcaaaattactcattttggcaaatcagtatattttctgtatataattatagaaagttcacattgttcttcaaatttacttgtaaaaaattattttccatttggcactaaagtttattctcaaggtgttcaatctatgtcagtttttatttgaagttgtgtgatctctctaaaataaacattagtaattacttacaaaatgctccttagaatctcaatctggtttattgttttaaatcgcaatgttatacttatgtgcaaaaatatacttaaggtatattatggttgtaggttaacaattgcattggcaagattcatttttcctgtatgtttttactgaatgatctattttccaacccaaggaaagtatgaatatgtggcatgatgacacaacacctttcctaganatgtgtntactgactact

SEQ ID NO: 60184 - DNA, 419 bp, Homo Sapiens
ttttttttttttttttttcagacagggtctcactgtgttgcccaggctggagtgcagtggcaatctcagctcactgcaacctccacctcccgggcccaagaaattctcatgcctcagcctcccaaggcgctggaactacaggcatgcgccaccacgtccgggtaatttttgtatcttttggcagagacggggtttcactgtgttgatcaggctggtctcgaactcctgacctcaagcgatccgcccacctcggcctcccaaagtgctaagattacaggcgtgacggaccgcacccagccctggggcccatgttcttatcctcagcccacttggttttcccatccctagggagctagtttcagttctctatacttcttagccacaggctgggctcctgctaaacagcaggtcacccggaa

SEQ ID NO: 60185 - DNA, 448 bp, Homo Sapiens
aatgttttgcttttagctattttctgctttcctatcagtccaccaagtttacttagactttttttcttcttctcaagatatttattgtggtacaatactttgtgggaaaacttcataattttcacaggactttctcttttttcccactagttttcttttactgctctagggcatgatccacatgacaaactatgattaatgccatccatcttcctggccctcctcagtacttaaaatattcagacttttaattttttttttttttttttttagagatggagtctcatgatatttcccaggctgaagtggctcttcacaggtgcaatcatagcacaccacagccttgcactcctgaacttaagcaatcctcctgcctcagcctcctcagtagctggaactacaagcatgcaccactgtgtctggcaagaatttttattttatgcctcac

SEQ ID NO: 60186 - DNA, 470 bp, Homo Sapiens
  misc_feature (467)..(467): n is a, c, g, or t
tcctttataaactacccagtttcgggtatgtgtttattagcagcttgacaacagactaatacaggcaggtttccagaaagcattttacctgagttcccagaattcatgctggggggtgtacggggagagaggtgggagatggtcatgggtggttagatcattgatttgagatcaaatcttttcagtagctaaatgaagacctaagagccagaataacctagattatataaagagattataaaaggaaataggcatttctaaaaatgtattacatttaaaattgaaacccataatgaagaggatgattgttttttacctgtggatagaacacagggttactgatgattacacttggctattgctgtcatttggttcttttgatcttcactttgagtcaatggaactgttcaggcattctgtaaggaggacagacaccagcgtgacactgcctcagcatttctttgttngaa

SEQ ID NO: 60187 - DNA, 500 bp, Homo Sapiens
acaatttttcacaatatcagtttaataaatactaataacaccaccaccatgcatttgtgaaataattgaacgcttcaaggtactttcataagatatttattacatgcataatcttacttccttttcaaaataaccttggaaggtaggtaaagcaggtatcggttttacagagcacggaactgaccgggatcctgaggctggtaactgaccctgaacctaaaacccaggattgatggtctttctctgcatggcatcccccttgatctactacaaaatcaataatcaggcaaagaaagccttaagggagcagaaggctgtctgttgctaccatttcttcaaattctactgcctaattccaatgttactcacaggccgactttcaccaactccttccttagggacaaaaggtagggcttatgtacaagccttatgggaaagaatggtgattctaagtgttatataactgcatgtagaaaaaagacatagattccctttcacca

SEQ ID NO: 60188 - DNA, 835 bp, Homo Sapiens
cttcagcgaggagaacagtccgaaatggggggactgttggtctcggcctgcggaaggttcaggaacaagtgcatcccactctctcagctaatgaagagtctctctattatatgaagagctgatttttcagctgcttaataaattatgcatggcccagcaaggactgttcacgatgtaagaggagcgagttcagaagacctttcctcacccaattgataaatgggccattgctgatgcacaatctgtatagaaaaacgaaaacgaagaaatcctcttttactgcctgtggacaaaatccatccttcgttgaaggaagtattagggtacaaagtggactaccatgtatccctatatatgtggtgtactagagtatatctcagctgatattttaaaatggctggtaattatgtttttaatatccggcattatgaaatatctcagcaggacattaaagtgtcaatgtgtgcggataaggatatcgaaaagatttttagtaacatttcagatatacatgaattgactgtgaaatttaggttgattgaagacacagttgaatgatgatgagagcagctcatccttagtggagttgtttgacgatttggagaagagcaagatttgatcttatgaacattatcacggaatcttttccagagttctgaactttcattaatgatggcagactgggtggttatattaggcatgggggtaagaggagcgaagctccaggtttgtgggcggttcggggcattgttaagcatgagttgtgagaaaaaggattgcctatggctaaacggagggagaaaacagggatgtgtttaaaaggtattaaaaaggg

SEQ ID NO: 60189 - DNA, 331 bp, Homo Sapiens
ttttttttttttttttttttccataaacacccattaataaaatcatgtttttattatcaagtgaaaaaaaagtgcaaaatgggattatggtagtctatcttttgtgtagtaagggggaaaataggaatatattatcacaataattttcatttgcataaagacactctggaaggacacaggagaaactaatcacaatggtttcccctaagcacaacggtgagaccaggagaggtggagacagtgtgagagaaagatctttttactttatatatttttatagtttcttaaaagcatgtgaatgtatttattttaaaaataaaaaagatagctg

SEQ ID NO: 60190 - DNA, 494 bp, Homo Sapiens
  misc_feature (9)..(9): n is a, c, g, or t
  misc_feature (447)..(447): n is a, c, g, or t
  misc_feature (476)..(476): n is a, c, g, or t
  misc_feature (485)..(485): n is a, c, g, or t
tggacggantcgctctgtcacccaggcacgcaccaccatgcccagctgatctttgtatttttagtagagacgggttttcaccatgttggccaggatggttttgtactcctgacctcaagtgatctgcccacctcggcttcccagagtgttgggcttacagatgtgagccaccacacctggccaaaagatttccttttaagaaaaatgtgggattttttctacgaaggctctttaaccacacaagcacagaatactagtttatgcaactacattatacgacaactccctaattttaatgcagaaacatccatcttatttttctttttgaggcagggtttccgctctttcacccaagctgggagcccagtggtgcagtcacagttccctgcagcctgggaccttctgggtttcaattgatcctcccacctcagtctcccaagtagctangactacaggaagcacaccatgacgggctnggctaaganttctaattt

SEQ ID NO: 60191 - DNA, 442 bp, Homo Sapiens
tttttttttttttttttgaaaatcaaattattttattgtaaaaatttatataaaataactcataagggcaacagttaaaaacaagttaaacagaactaaccaaatatataagatatttcaaataaaaaagtaataataaaagccttgctagcttgtttgaaagtatatataatactttatttcctagacttaaaattgtgatttccattacacttaattagtatacaaaatattatttttaaaagacaggttctcaaactcaaggattaacaaatatttgcaaagtgatcaccaaagtctttgtatatttgttaacaaaaacacaaatccagaatataaaatctatctgaaattatctaagccaacatcaaattatttaaatatgactcagcttgtataaagagaaaattaaaaatcttctttccttaccaagttttggaca

SEQ ID NO: 60192 - DNA, 435 bp, Homo Sapiens
cttttttttttttttttcttttttttacggagtctcgctctgtcgcccaggctgaagtgcagcgatctcggcatactgcaacctccgcctcccgggttcaagcaattttcctgtctcagactccggagtagccgggactacaggcacaagccacgacacccggctaatttttttgtatttttagtagaaacggggtttcaccatattagtcaggctggtcttgaactcctgacctcaggtgatccgcccgcccgggcctcccaaagtgctggaattacaggcgtgagccaccgcacccggccgaaatcagtttcttaatcttaaactgagttcagtttaccaaggtgaagcttgagtgatttctttaaatctaacaccagtttactagaagaacattcatttaaataggaaagcaatttggagttgcgtaaagcg

SEQ ID NO: 60193 - DNA, 596 bp, Homo Sapiens
  misc_feature (491)..(491): n is a, c, g, or t
  misc_feature (515)..(515): n is a, c, g, or t
tttgtggaaactatgaggtcattgttttccagagtctttactataggaaacagctgtggggactacacaaacagagaacactgccttatttagtagcccctcattgtgacgagtgtatagatggggacaggaaaaatccatcaagccacgcacaaatagaacaaaagtagcagagtcaaactaaaaactttaagtcacacaaaggaagacataaaacaactaactcaggaaaagcatctatatgattacagctgttatcttgatttaagagatagttccatgtttagactagatcagttcctttctacatgggtcaccaaaaacttaaatgattcacattgcacagtacctgaaaatggtaacattcaataaatatagcttttaataaaagttttcttgggattcttaggttcaaatactgtatgacccaaccaaaacgaaacttatccacccaccttcagaatggctttccattttatttttccaatcgnaagagtgcctccccaaacaccgtntaaaacctctacgtatttcatctctcctcctatccctctccacaccataagctgcaaacctgcacactgctctacaacatt

SEQ ID NO: 60194 - DNA, 517 bp, Homo Sapiens
tttttttttttttcatatctaaaatttatttacgttcatgatcttttacacagagtggtagaaaaaaagtatatttagagtttatagaatctattttttatcataagcaacactgttcacaatgataaatgacctggaaatacccttgtgcatgcaggggcacaaagaaacatttgtggcctgaaaatgtgtaacacaggcacattcatgttcatgtacacacagcattatattagcctcattattttcttttttttttgtttttcccatttcttctcatctgcttttgactgctgttttctttttatatcttatttatcttcttaagtggctttaaactcttctagaacaagatggtatatagtcaataaatattgcttaatacatattcattacaagtcaccctttacaaagaatgattgcaatgagacttggaactttttaaaccaaaactgttttgctactttctttatacaaatatttacaaatgtggataaactgtatctgctatttttta

SEQ ID NO: 60195 - DNA, 623 bp, Homo Sapiens
gaattatatgtggtttcatccatggttctgtcctggccaagttgcttatgtcatccatagacaggataattctttcttcaatcacaagtaggttaatgttcttatttgagaagttgataattgtcaggtagtaattcacactggtagtaaagatgtgcttttgttttcttaccaaatatttttatgtgtttccagagttcttttcaatagaaatattttcaataaagtgttaatagtgtaagataaaaaaaaaaaaaaaaaaaaaaaaaaaaaatgttgggggggctgggccgaggaaaggtttttaaaaacccacttgcgtgtgtggcgggggggggcccaaggttggtgtacgtgggcgacacttgcggtacataacggtggtccccaaagaggagaacctccgggcgcatggcacatcatcggtgcgcgtgtgggttctccccccatataaaaaaaagcgccgggcggggaaacaccgagacgttgtccttggacgcaaatctcacaggatggaggggtcagagggggcctatcagcggggagttccttatccaacagggggaggtcaaagggggaggggcagaaaattaaaatagcccgggacaagggggggggagcgg

SEQ ID NO: 60196 - DNA, 520 bp, Homo Sapiens
  misc_feature (437)..(437): n is a, c, g, or t
tttttttttttaatgtagccacaaaagttccattttatttggaaaaagcaaacacaagtaaatccaacattttccatgctagagcaatggattatcggatcggaaatatgtatttcaaaataatatatgggaagaattttctattgtagttgtttttctatttttcctacaacaaacataatcattatatatttaaaaccaatgccagggggagaacaaccagaaggggattaatttcctgtgctcaaaggtaaagtatttctaggtaaatggaaacataagacggcgatacagattttactttcaaccaccattcgaagtgggtcattagaacaagatcaaaccaagttcccaaatcagttaaatgctgttactttcttcacttatttgcagtagtatctgcaatacttggtaaaggcaactaaaaagtgtaagtncctagcatactgagaggctaggtctaccggaccaggttctttttatgccgggtctaggaaaaggacagcagtaattaggtgct

SEQ ID NO: 60197 - DNA, 503 bp, Homo Sapiens
tcaattcctaaccttttttaaagtttcctggtctccactggacacagagctttggagacggaggatcccagagggcagtctcagttgcaatcagtgtgtgcccagcctgggcagacaggaaattcctcggatacattattttttctttctttcatagctgtgtctcaaaaaggacccatttgtggctctttttcacctcaaaataagatcgatggtatcttgtaaaatgagggtagtgccacttcttagtatttttgaaagctgttttagattttttttttttttccttttctagccatctaaattgactcttccaatataggtctcagaaatccaatatttggagtacaatttcttttaattccaaattacacctgccttacaaagcaccccctccttgttcccctctgtttcctctactcagttgggggagaaactcacagctcctccgggatacatatgtgccctcagcagcagctcccaggtgaagttaccagacccct

SEQ ID NO: 60198 - DNA, 421 bp, Homo Sapiens
tgtaattacaattatttttatttttttgtttctctacgtaagtacaatttataaatacagatatgtatttgtagatattaatttcacatttacatataacaatagctaccaattcattccttaaactattttttttttttttgcagcacacatctagttactaggaatgcagcaatgggggaaaaatatgtccccactctcccaagctttctggtgcagaggaccagaagaggacctcaaaggtgtcttggcttgtcttttctttgagatggagatttgctcttgttgcccaggctggagtgcaatgacacaatctcggtggctcactgcaagctccacctcccaggttcaagctattctcctgcctcaacctcctgagcagccgggaccacaggcatgcgccaccacgcccagccaattc

SEQ ID NO: 60199 - DNA, 460 bp, Homo Sapiens
ttttttttttgcagaatgtgtcaacaaaaaatactttcttaatggcatttgtgttttaagaaaaatcagtcacatagtgtcagtgttaagaaaaggttgtaggtttacaggttgcccccagtggccatactttgaattgtgattctcacgggtttaaagatgtgatttttaaaaaatcagtgttttaccatctagttatttgatcttgtccacttttttgtgttcaacaaaagtgtaaaactggaaagcaaagaaaaaaagactattttcagtaaacatgtagttttgttttgtctttattgatagaatgtaatgggcctttgggatcttaagtactacttatgttacctttgttattcagatgctgaacttaagcagtgaaataatagaaactaaaggatgttattaaggggtttaactattttaagtcaacatttagcttatccatcatattggtttc

SEQ ID NO: 60200 - DNA, 262 bp, Homo Sapiens
tttttttttttttttttgggggggtttctttttgctttttaagggtatcatgacccctctttccaggggaagcacaagaagtttatgtgcccagctagatgtcccaagccaggaatgagagctgtgacatctgaacccgggttctgaaactccctgcctcagagcactgcctgctccatatgacctcaaggaaggccagactggagggtcattcacctttgccaccacgcttacaccaggccctgcccaagcactggggaaa

SEQ ID NO: 60201 - DNA, 419 bp, Homo Sapiens
  misc_feature (11)..(12): n is a, c, g, or t
  misc_feature (89)..(89): n is a, c, g, or t
  misc_feature (296)..(296): n is a, c, g, or t
  misc_feature (333)..(333): n is a, c, g, or t
ttgtaaatttnnttgacaatatggttattctaaggattaaatatttcacgtgttgaacacaatgcctggcacatagtaagttctatttnaaatgtatattgaataaaacataaataggacgttaatgtgattaagacaaacagagaaaaggatttaaagagagaagaggccaggagacgcgggagaagacaatgctaacaggttgtcttaacaacacatggaaagctcctcactgcacagcccccagatgcctcactccacgagtgaaatccctgcacggcggccgagagcgtggngtgcagcagtctgcctgacgtgaggagccatgtcatncacatgatctaggaagggtaaggggtacctccggtttctgggaacacacaatgtagggcacatttcgctgggggggctccctgtta

SEQ ID NO: 60202 - DNA, 471 bp, Homo Sapiens
tttttaatgctgacattggttcttagctactttcattcttatcttctctcttatacttagtgcctaggtagttggctccgattaatttttctttatgacctttatgcttccaaaagtgacagattattgactgttaaaatattagtgaatatatacacttggatatacatccaagcagataatattaaatttttgaaggaaaattacacatttttagagccagtaccatcatcttctaatgtaagtatctagaaacccgtgtctgcattaaaaaaaaaaaaaactgcacacgctcctcattcttttctcagtagggttccttttcaagtatgttatgagtcgtgtagttaccttgaaaaacaaaacttttcataagaaaaaaatccctgagttcagacaaccaactttaagcatttagggcaccttattaatatttgtaagtcaggatatgccttcattcataaaatcagg

SEQ ID NO: 60203 - DNA, 499 bp, Homo Sapiens
gatttgaatcaagttctgatgttaaaatggaagattctggttaaagcttgtattttcaaggaatacttataaacatttttatcaggcatcttcctgtttctcttaaatacttccttttttgacttaaaaatgttagccagtgaatgcttgacaaatttgtgtttttgtccttttcagttgtcactcagcccagtccatcagtttctcagcccagtacttctcagagtgaagaaaaagctcctgaattgcccaaaccaaagaaaaacagatgtttcatgtgcagaaagaaagttggtcttacaggtattacaaaacacaagacaatgtatgttttacttctgcagttaacaaggagcttttggtcactccctaagagactagttggtcttacacataaaaaaaaaaaaaaaaaactcgagggggggcccggtacccaattcgccctatagtgagtcgtattacaattcactggccgtcgttttacaacgtcgtgactggg

SEQ ID NO: 60204 - DNA, 471 bp, Homo Sapiens
ttttgagacagagtctcactctgttgcccaggtagtggcacaatcattgctcactgcaacctccacctcctgggtccaagtgattctcattcaagtgcctaagcctcccaagtagctgggattacaggatcccgcccccatgctcagctaatgtttgtatttttagtagagatgggggttcaccatgttgctcaggttgatctcgaactcctgacctcaggtgatccacccgccttggcctcccaaagtgccgggattgcaggcgtgagccaccactcccaaacagaacaacatttttttgatgtggattttaaaatgcctccccttctttcaacattaagtcccttctacatgccaggcactgtatgtgtgaaatagtcccaactctcaatgagtttaggcagatacacaaacaaaggcttaaggaggtcagttttctgagaccatactgctggacagtatatgaacctg

SEQ ID NO: 60205 - DNA, 465 bp, Homo Sapiens
  misc_feature (256)..(256): n is a, c, g, or t
tttttttttcagttattttgcattaaatctatgtttcccatggtcattttcccctcatagctcatgagtttggtttataactgctaaggattgggtaccagtggattaaagcaaaagactagtttaagaatggaagttctgttgtgagtaatttagaaactctcttttgctataactacttggtctatggtctggcccacatttattttttcagacagggtctcactctgtcaccgctggagtgcagtggcacgantcacagcttagtgcagcctccaactcctggcctcaagcaattccctcccacctcaacctccaaagtcctgagattacaggtgtgagccaccgcattcagccagtccacatttaaatcaaagtttagaaggctaataattttatgtccaataagtaaataaacatataataaaatatggtaaaggcaactagataaattagcaagtagga

SEQ ID NO: 60206 - DNA, 575 bp, Homo Sapiens
aagtaaaaaaaattatttgtgtagagatagggtcttgctattttgcccatgctggtcttgaacccctgggctcaagccatcctcccaccttggcctcccaaagtactgggattacaggagtgagccaccgtgtcccgccagcaaatgaatttactgactcttctgtgctgtgtgaccttaggcaaactccttaactctctgagccttaacttctccactggggtgagaataggacctggtgcaaagtcaggatcaacacatacatgttgtatgaccgaggcaacagtgcttgactctcagattcagtggggatcacgcacacatcaggaatcatgtcttatgattgttagaattctgcctctccccttaaggcaaaaaaagatgtggctatgctcattttcttgatgaggaagttggacaagagaggtaatgaaacttggcattggttatacagattaactgatagctcgtgttttatttcacccacaacattttaaaaacctttttaaaaaattagtttctctgcttgttattctgcctttccccacaacttcctctccctgcatggggccctg

SEQ ID NO: 60207 - DNA, 581 bp, Homo Sapiens
  misc_feature (278)..(279): n is a, c, g, or t
aaatgaaacagtcactctgttacccaggctggagtgcagtggtgtaatctcagctcactgcaacctccacctcctgggttcaagtgattcccatgcctcagcctcccgggtagccgggattaaaggcacgtgccaccacgcctggctaatttttgtatttttagcagagacgtggtttcatcatgttggccaggctggtctcgagctcctgggctcaagtaatccacgcaccttggcctcccaaagtgctggaattacaggtgtgaggcagcatgcgnncctactttcataaatgcaaagaaaaaggcctgaaataacaaactgcactgtttaatgtatgtgtgtgtttcactgggggccctgggggaataggagaagagggtgaggactttagacctgagaatgtactcacaaagctgctcatgaaataaaaagatcaaagaaaaattcacatccttcacagatgaattcaactaattatataggacaggaattaactagaagcatctttccaaaggcaatctaacctcatctatgatagattctcagacaatatcaggagagaaaacccttcattatta

SEQ ID NO: 60208 - DNA, 496 bp, Homo Sapiens
gagacagagtctcactgtcacccaggtgggagtgcagtggtgcagtcttggcttactgcaacctcgaactcctggactcaggagatcctcccgcctcagcctcctgagtagctgggactacatgtgtgcaccaccatgcccgcctaatttttttgattttttgtaaagacagggtctcgctttgctacttagtctggtcttgaacttctggcttcaagcccttcctcctcagcctccaaaaacgctgggattacaggcatgaactgctgtgcctgggcctcagcaatttttaaaagaacttttcaagtaattcagtcgttgtaaagtcatttaatgtggagcataattaacactttccttaaaaagtgtgcctcttgaggataaagcaaactttaaataaatttcttaaagcatatactaacaatcagaaactgagtgtaaagacctattatgggtacctaagtattagcagcacgcaatagagatactagatttg

SEQ ID NO: 60209 - DNA, 515 bp, Homo Sapiens
gtatttttagtagagacagggtctcaccattttagccagcctggtcttgaactcccgaccttaggtgatccacctgcctcagcctcccaaagtactgagattacaagcgtgagccgctgcacttggcccatatgttaatctggatatattacaagttcaatgaaaatatccttaaagagtaactacaaaaatcaaagctattattcctattatacaggagtttacagtatacaaagaagagaaggtatgcaaacagggcatttttattaataatacaagatactatatatctcaaaatagagcagtgagtggtaaagatagtaagtattgctatggtgaaaaaaagaaaaagcaaatgtggactcaaaggagataggggaacttgactattcctaaaaatcaggatttgaaaaaaaagtgaaggacagcattcttagcagggcaaagaacaggagaatgatgtagctgtgaccatatgaacaacattttcagtggtcagagtagagacaacatat

SEQ ID NO: 60210 - DNA, 256 bp, Homo Sapiens
tttttttttctcttaacaatttttattgaagaaaaaataggctgctttgcaccttaagtgtcctctgtcttctctcctccctccaaccaacccctgccagccccacactctcatcacaaaatgggggaatactgcagtttttaagatccataaattaattaccaaataatacacaagacctgggtgaggccacatgagaacactttggagaagtatctttttttttttttttttttttttttttttttgagacgga

SEQ ID NO: 60211 - DNA, 409 bp, Homo Sapiens
gctacatgtaaattatactttattaaagaaaacaacaaataccaagtatctattaacacatctttggacactttaaaagagcaaatagtgatcaacagaagtaaagcatatcactaagaaatcatttccttttttggcaagggaatttcaaagacagacgacacctgctgttatgaattttaaagacctcttttgttgaattcaggttaattccattctgcaagaccacaggggggaaactatgaaatagatatactgaaactctacgatataccaggctctttgcaatagctggatgtttataaggtggcaaatttgaatcaatttgacaaaactgggaagggagtatgtattccctaacttaaggagttcaagaaaaggtaagccatgattctcaaactcagctgca

SEQ ID NO: 60212 - DNA, 493 bp, Homo Sapiens
tttgagacagtgcttgctctgttgcacatataagtgcggtggcaggattgtagctcactgtaacctccaactcctgacctcaaatgatccttctgcctcagcttcctttgggaatagaggtgtaagtcaccatgcctagcccattttctttaaacttataatttatctttcctttttggccctgatttatagtttaacggctatacaggtcccagtccctcattttggccactcatgggcccactaattgggactcaaaggctttctgctcaaaggcatagatgcagaggagcacacttccactaggcatgcatttaccacctggtatctctgaagcagtggcttcccttcaaactctgcgggcaccaccaggacttgaaagatggacatacagcacggtggtatgagggctgtatcctctacctctaccatgctctgcctctaggtcctgctgaagcttctcctggaagtacttgatgctgagctccacagc

SEQ ID NO: 60213 - DNA, 1032 bp, Homo Sapiens
  misc_feature (884)..(884): n is a, c, g, or t
tagagccaggtgtggtggctcacacctgtaattccaacaactccagaggccaaggcgagaggatcatttgaacccaggaatggagtgcagtggtgtgatctccgctcacggcaacctccatctcccaggttcaagtgagttcccattcctcagccccagagctgggaccacaggcgcgcgaatttttgtatttttagcagagacggggtttcactatgttggccaggctagtctcgaactcaagttggcctcaagtgatctgcccaccctggcgtcccagtgttgggatttcaggcatgagccactgtgcctggccatgtaatagagacttttaatataggagggtgtaccagaagcaccagtttcctgtggccaaacagaattattcctgctgtatttgtaatctaggtgccacgaggtagcccagatcccttcagctctgatggcaagagcattgcttcaggcgtaaatggacacctggagaaacttgcaccgatggatagtctccctcagctccgtgccatcgctgcaagaggctgtcactggaccatcactgcagaccagtgagatctctctcctggtctccaacaatatgagattggcttcatgtatactctcctggttataactttggccttctagcaatgcagagtactttgcaaaagccagcaatccagtcctttatcttcccatctgcttgggttcctcagatctttcctctgatgggccgctgacctccattgcactgaccctctggccagtcctattgtggtgaacacgtgaagctgtcctgccagattgtatccccagaagaatatcgggacgacacaatggggccatccgggctgttgaccatatcaaaacatcggccagggttaaggcantggcgcaacgctacattaggttgcgcacaattcaccgcggcctgaagggcaagtgaactatatacacaaaacttggaagatgaccactatttagccctaaatacacattggagagcaatcggaaacacattaagtaagtagagaacca

SEQ ID NO: 60214 - DNA, 449 bp, Homo Sapiens
ttccacaaggaaaggaatttattggttcttgtaactgtcgaatccaagattgggactagcttcagaagtgctttgattctgaggctcaaacagtgccctcgggatctgctcactcacatgcactatctccttcaccttctgaagtttgggtggaggaaggagtagctccagatctcaaaccctctcagcttcggtttcatgcctctcttctcacatgttctagtgatattgcacttcattggctctacctaggtcatgtgcccacccctaaaaaaatcaccgtgaccagggaaatgtgaaggcagtaaatggcccatgtcccatgctccacccaacctcctctcaaagcacagggcagagtgaccaagcagtggagtcccagagaaagtgggattcagttgtaaaacaagggggaggggatacctggctggaaattatcctaattacat

SEQ ID NO: 60215 - DNA, 482 bp, Homo Sapiens
tttttttttttttttttaggtggcaaatggtgaggagagaggaataagcatctatcattttaagcatcaaatagtacaaaaagtattctgaactgaaaagaaattactaccaattatagaatatttaatattaaaacacattttactcttccaagatacacagagtagagaaaattaacattcctggcacttactatgtcacatctggaaatatctcagagataaaagatccattttacagattaatgaggttcaacccaattagtaattgcgccaaagtctaagtgtgaatgccagagtgatgaattgaacccaggtttgtctacaaaaccactgttgcgactatggcattcctttgtacttgaaaatatttaataagatcaatttccaggtccaccaatgtttgttaggtaaccaatcaagccagagtgttagaaaaggaataggagttggcatgcctaatgaacaccaagctagtggga

SEQ ID NO: 60216 - DNA, 426 bp, Homo Sapiens
gcgtcgactttctttttaaattcagcctgtccaaatctgaacccagagcattccttttcaaaccttttttatatgttttccagttcaaaatgacaccatcatctcttcagttaatttaccgtaaattcttagttttatcttagaatttctcttccctaggcagtcatcagaatcttcatttttttgttttttgagagacagggtcttgctctgttgcccaggctgaaatgcactggtgccatcatagctcactgcagcctcaaactccagggctcaagcgattctcccacctcagcctcctgagcagcaggaactaccgggtgcacactgccaagcttggctaatatttttattttgcgtagtgccagggtttcatttgtgttgcccaggctgcacattctcttaaatctcatcactaaaatgtct

SEQ ID NO: 60217 - DNA, 431 bp, Homo Sapiens
ttaagtttaaaaaagaactttattgacaaaagtaccggtaccagctaaaatagacattctacaagatataaacagattattggcctctaattttctacaggcagaaagcaggttgaagaacccatttatccaccaaaaagggcatattctctaatgtcctttgcaagtgactaaggaagatgagggaaaaagaatgatccctagagtgtagaacaaagagctgtggaggatagactggaaagtcatttttaaggagcagaaacagtgcctaatcatgaaacacaattccctccaatggaggaacctgacaaccattgtccaatgagttttcctaattgttatggaccagtggctgtgatctgcttccatttctcccctttgtgaataagagtatttttttgtggttattattgtctctattccatcatttg

SEQ ID NO: 60218 - DNA, 536 bp, Homo Sapiens
cctattgtcatttcaatttttttcttgtttaaaagagtactttgtctattattgacaaatatttgttgcatatatttcaggtattttcttccaagtctattttgaatattgatattacgttattatgtacttaagggtttttttttttttttttttttttactggacaaaagactctacatttgatataatgtctttttaaaaaaaaatttaaatttctgggtctctagatttgcttaagaagctcctgccaatccatacattttttatatatagtagcccagattttcttttaagacttttgttttcatttttacacctaagccttgaattttgggggaatttcatacatggagtaacctaaggattcaaattcattttatcccatatgatagtcaattgtgcttgtgctattaaaagaaggagagagaaagggaggaaaggaggaagacacccttctcagcaaacagtgaaattttatctttgccatatattttatagttctgcattatctagtctctctaaccctgatttctg

SEQ ID NO: 60219 - DNA, 613 bp, Homo Sapiens
tttcctttcccctcctttatttttactaatgaattggccactgatacacaaatggtgggtggacaggctctcatttctcaactagttttatagaaattaaattaaaaattattcctgtggaacaatgctcattgcccacttctgattcattaggaaaacacatcctattttgaagccagtgttttgaaagacagttgaagttccatttcaaggactaagcatcagaagcactccttatgaattcacacacacacacacatacacacacacacacacaaattgacaaggcagcactgctgacaggctattaagggaaaccggatatgctagtatttgttgaaatgatcattaatttgcttaaatgctgaaaacttcagatatgtaaacatccacactatttgaacattttttagacatcaaaggattttcaagtgcttctctctggcttgcatttgctaacattgcagcagcaacagcgctggagtagttgaaaagggatgcattaatcatttgtaaaatgagagagcagaacaagattatgctttcttaagcagaaatacatgagccatggatggcttcagggtctttggatcctatgaagccatcaaacaaa

SEQ ID NO: 60220 - DNA, 547 bp, Homo Sapiens
  misc_feature (381)..(381): n is a, c, g, or t
gacgcagggtcttgctatgttgcccaggctggtcttgaactcctgggctcaaacgatcctcccactttggcttcccaaagtgctgagattacacgcatgaggcactgcacctggccagacttttccaattttaaacttctactgcaaaatcctttttaaccattcctgtcattaaagcagctatgaaaatttgatgagtaacaccgtgggatatacaatgacagactggagtaacatttttaaagttttccatgtataataaatatatcagaactaacattagatgtcagccttggtaatgcttatgaaagaatgtgttagcattctaccttgaaagtgtattgccctaatacctacatgaggggttggtaggtgcagcanatcaccatggcacccatttacctatgtaaaaaagctgcgtactctgaacatgtaccccagaacttaaaataaaaattttaaataagatattttattaattcattgctagttacgtttgaaaatgttttctgctgatctgcatattatgtttttatttatggtatct

SEQ ID NO: 60221 - DNA, 473 bp, Homo Sapiens
tttttcttcccaacaccaatttcatggttgttaatgggttgtgacctttagttaaaaaatgctgacagacatcaaggaccaaagaattttaattagaagactttcaaaacagaagataccaggccacttaagataaagtctactgtttaaatgtgggggaaaaaaagcacaaaataactgccactaaaaaattattaatttttagctagcaatatttgtaatatgcctttcatttggattatagtttataggccatttaggattctacaagttttaagatatctaatgttaaataaaatttagaactttcaacatggtttgattataataaaattattctgggaaagttgagtctgtctagttgaagattcagtcaaactctagttttataaaaacttcatagtttaggcatctgtggaactctagatgattagttatttaagcctaaacatcaaaataatcaagatttgaga

SEQ ID NO: 60222 - DNA, 485 bp, Homo Sapiens
  misc_feature (470)..(470): n is a, c, g, or t
tctttttttttttttttgcctcttctattcattggagtgttttcacagggagtctgaacttaggcacaagagaccaagagtccaaaatgtttgctcttagcaaaggctaagaacctgttatcagcagacagaatccatagaagaagactacatgatctgcaccacacaagcccaatggctgagggttctggctgcggcaaagccttgggtggtaaagaaaggagaatttcctgagcttgttctctgtgcagaaaacttcccccaggatctgtctagctgaggctcactgtacttaaggaaactgttggtcaaggacttggatgttctagattatggctcctggacatttctgtctcctcctctgccctccatactcccctcctcaccccacagagaacagccaagcctataactttcattttctggaaagaaattagtgacaagaatactgggaactttgcatcaggganaatgaagttttacac

SEQ ID NO: 60223 - DNA, 662 bp, Homo Sapiens
ctatgacgtcgcatgcacgcgtacgtaagcttggatcctctagagcggccgtctactactactaaattcgcggtcggtcgactttttttttttttttttttgcctcctagtaagtgggtgggtgtaatgactaggccatcttgcaaccatgaggaaaaaggcaagaaattttagaatcctcaccactgacaactagccagcaaccacctactattgacttattatgtgacagaaaaaaaaaattaccaacagggtcaaggtctaaaagccagttgataactggctattctgttacatgcagctcttctgttacattcattactgatgcattgctcctcaacacatatgtgaaataatacaaaacaaggacaaaatacacagcaaacagccacagaggctgactcataatgcactacacacacacacccacaaccactcacacacacccacaccccaccttctttcgtgatagtccagcttctaaaagagccaaatagaaaaatatcacctacactatataagggcaagagaaggacgtcgacgcggccgcgaatttagtagtagtagtcgacccgggaattccggaccggtacctgcaggcgtaccagctttccctatagtgagtcgtattagagcttggcgtaatcatggtcatagctgtt

SEQ ID NO: 60224 - DNA, 541 bp, Homo Sapiens
tttttttttttttttatcgtggagattagattggttaaagttttggaaaactcctgaattaaacttcttgcaaagtttactcttcttgtaaagagtagcttctttgctgttcgttgggcttggctcctgaaaaggacttggtttcaccttgatgtttccttgaagacaatgctctaaatctctgccagaaggatcgtcagtgaacaacgcaaatccagactgcgctggtttcctcattcctgtgtcctggttcaaagtattcaaaaattcttccactgtggtagatgcgtcaaaaccaactacctggtatatcccattcatgaagtgcacaggtatactaaagggcaaagaatggtgataagggtttcggagaagagttgaaagaatttccatccttgagggtcttgcttctctgtcaccattttgttgcgttctttctacacaacgctggcagtaaatggcatattttccaaattctgtcctggaatctgcattcctctttaggtgaagcctgaggagccacaggaaaggatgatggggg

SEQ ID NO: 60225 - DNA, 450 bp, Homo Sapiens
tttaccttgaaaatagcgaatcctacctcatttttgttagagggaaatggcataacttaccgtcagttttaaaattagagcatttacaagacttgtaccctctgcattttctcctcctcctctgccagcccatccctttctcccggactacagtcagacgcactctttttccgcagcctcagcatgcttacgtgacagaagcggttggatgcttctgtgttcctcactctgactctgccttagcttttcaaaagcggctgcagtagaagaatcccctttgtgtaccggaagctctttcaaacctgtttcctgagccatcaataaagtttataccctgcatatccctgcatgtaagtctagatttcttttgaaatcactgactcttcctaagaatcttctagaataaatagctttgaagtttctttgaatataagctcatctaatgttatc

SEQ ID NO: 60226 - DNA, 502 bp, Homo Sapiens
tgtttttttctaagatctaaaatgtgtttattttcctataattcataaagcactttataaagcagtaagatcttaaatttgtgcacttttaaaatataccaaaaagctatcttcacacacattttctcattggttcccacaaagatcccttgaagtcaaaaggagccgcattctcccatttgccagaggtgcagcctgaggatcaaggagggaggttaatgtgccaaagagggccacagactactaagtgaggattgaaactcagtgtcctgacttctaacccagtaagctcccattagttgacacgtaaacacctgagatatagtccaaagatgaagcacaggtgacatattgggactggatcttcttggtcaaaggatcaagctgagagaataaaactccaggactggaatctgggcatctgggatggtagttggggtcaagggtggtggcactgatcaattcccattacctggctgctcacccacgccagtggtggact

SEQ ID NO: 60227 - DNA, 533 bp, Homo Sapiens
tttaccattatcttacttctcattttcatattgcattcacccatcttgattatttactcttttcttcctttttagaataatgaacaccttttcccctttgctttcttggttaagtaatattcctccatgtgtctacatgttccaaatctatatgggttcttcaacactgttctctttcccctgctggctatcttgaccattacacatcctttcctttgccaataatgtttttcaataactcagttaaaatttaaattatgacattttagcctaaatgcaaaatacttaatctttgatgaaaaatttaaaaagagtataaatcatctcatgactcccaagagtactatagtacttacagatattttaatgccagtaatttaaagagatacggatcttcaacagttgtcagaggattgcgattgagaattctgaaaaatgcaatggaattaaaataacctgcattttcaatgtgtgaaactgcataagaagtttacattcattttttggtatggaacttgtgggtaaaaaaaaaa

SEQ ID NO: 60228 - DNA, 498 bp, Homo Sapiens
ttttaatgtccaagaccaagtgatgattttcctgtataggttctagaagcctaatttgtgtgtgcaactcaaacattcgacaaacataagataccaatctgctcagcacttactatgaattcaatgtgattgtgcataccaccttactttccaaatcaaggtatacagcagtggggataagtgatgttaattttaaaaatttaaatatttttatactaaaataaacattatggagtagcagatgcaaaatctgcatgaattcttaagataaaaatgaagactgcaaagaatcatagatttctcaaagggtcacattgaactatgccttcaggactcctggagtacaagcacatttgcccaaattgttctgtcattatgggtacactttatgggtacattatgggcagaagataactaaaaagtgtttttctctactgcaatgatccctcatgtagtatatttttttcctactactgtttataatactttacccaattt

SEQ ID NO: 60229 - DNA, 472 bp, Homo Sapiens
cagtatggaactattaatgcctgttgtttatctacacaaatacagagcagcctgggaactgtcctagtttctttgagagttatcaactgaagctaatgtttccttagagaactccactttgaaagggtactatgaacctggccagttttcattgctgtttagacagacacaagcacaatttgcagtgtgggcaacaccacctcttagatgcaatccgcctgtcttcaagtgagtctcccagtagtcctcactgtgttcgtttgctctgccaaaaataaacaacagcctctcccctagtaaacagcaggtaggaatgggtttaatcataaattctagtggatggcagtccagtaacaaagcagagctctctttggtggtagcattagcttctttctgccctgctcaaaacacccctaaagtacactgacttggacatgatctcattcaatatatgaagcactgtgatggttaa

SEQ ID NO: 60230 - DNA, 514 bp, Homo Sapiens
ttttttttttttagtatttggtgttaataatagactaaagtttatcaagcacttccattttacatagatcattcatttaatctttactacaactctatgaggcaactaatatttttccctattttaccagtgaaggaagtgagattcagaatggtttagtggctcgctacgggtcacacacctgcagttgtaacaatactgaattagaaatcagtctttatctgctaggtatcatccttgaggaagaaaatatcttgtcgtacctgtttgcactgtgtccatataagcagaattggcccatacataagaacttttgtgtccagatttatttgtgagtcctacagtccatgcatgatgggctatcagtgacccaatatggcatgagatcgaacttgattgtcctcttggatgtctaattcataggtgaggagcatgttgtcactcccttccttagttcccataccagttttcccttaatatcataaggcttctgttaatgtcagatttatattta

SEQ ID NO: 60231 - DNA, 682 bp, Homo Sapiens
gcacagacgagatctcgatcgaaggcgagatggcggacgtgctagatcttcacgaggctgggggcgaagatttcgccatggatgaggatggggacgagagcattcacaaactgaaagaaaaagcgaagaaacggaagggtcgcggctttggctccgaagaggggtcccgagcgcggatgcgtgaggattatgacagcgtggagcaggatggcgatgaacccggaccacaacgctctgttgaaggctggattctctttgtaactggagtccatgaggaagccaccgaagaagacatacacgacaaattcgcagaatatggggaaattaaaaacattcatctcaacctcgacaggcgaacaggatatctgaaggggtatactctagttgaatatgaaacatacaaggaagcccaggctgctatggagggactcaatggccaggatttgatgggacagcccatcagcgttgactggtgttttgttcggggtccaccaaaaggcaagaggagaggtggccgaagacgcagcagaagtccagaccggagacgtcgctgacaggtcctctgttgtccaggtgttctcttcaagattccatttgaccatgcagccttggacaaataggactggggtggaacttgctgtgtttatatttaatctcttaccgtatatgcgtagtatttgag

SEQ ID NO: 60232 - DNA, 492 bp, Homo Sapiens
taagcaggaaaaaagtaaatttatttaatcagggtcatgggtgctagtagggtttcactaaaacattaggaatcaagtatttaaaagtaagtagtaagtatttacactgaagttgttatacacttgaatcttgaacatggatttaaacttcaaacagtgcaattatatgcagattcttttctgcttccgccacccccaagacacaagaccaatccctcctcttcttcttcagtctaaacatgaagatgatgacaatgaaaactttcatggtgatccacttccacttaataaacagtaaatatattttccttatgatctcaataccattttttatcctctttattgtaagaattcggtgtataataaatatacaaaatgtgttaatagactatttatgttatcggtaacgcttataacagtagttataagtagttaagttttaagggagtcaaaagttatactcagatttttgactgcgtgtgggtttggcat

SEQ ID NO: 60233 - DNA, 564 bp, Homo Sapiens
ttttttttttttttttttttttaactgaaggcttttcttttattacatctaaagagctctacataaacaggtaacattcaataggtaaacaatttttttccaatgcatgtaataaatattttcacttggtacttttatacaaactgacattgtctactatacatttttaaaagccattttactggtttggcatgcggtatggaaattctaagagagaaagttttaaggcaatgaatcacagatttaagttcatggaatttatggtaactttatctgtttatgtacattttcccctttgttaaacaattaacagcagcacactctgggaccaccagctattttccctctctttctgaaatctaagctttgtatttaattaaaaaacagaattcaacatctattgataaaacaaaattcttactaaaataatttcaaatgtgctttaaaaagtcctgaagatcttgaaagttttatgtgtttaaaattgaaattgtctaaaaaaatgctctttccacattaatttagttaggatatattttcactccatttcagacacttgactca

SEQ ID NO: 60234 - DNA, 516 bp, Homo Sapiens
ttttttacaaagggacttaaaattgtcaggatgatggcatatcatcagtgagatgcttctacgttgatgtgcacttgtgtatgcatgtattatacataccctcatgatgggaactggagtcaataattttcttttctttctttaggacactttcctagatctttccactgttaacccaaccatccagatctcctaaactctcctgagaacttagaaattaactcctttcctcttccctatttggctgcgctaatagagcaggcatgcaatactaagcttcacagctaggtgtcctcataatgcaatgacttcctttggcagcctagtcattgacagctgactttgagtcaagaaagtaagttttctctctcctttatgtttaatttctatttagggagattccttatgagggatacttatgaaggccactttcctcctgctatgtgctcagagctaactccatattttcctgtaagtttataagtagcttgcaattcagttaggtgtccaccaatg

SEQ ID NO: 60235 - DNA, 584 bp, Homo Sapiens
ttttttttttttttttgtcctatctacatacttcagtctgtcaaattgagttctggggaagtatcattacaaaaattggtatatgaaactttgtaagcactgagaatttttacatacttccgtgtttgggtggagaaaaatggggagatgatggtgaaagtttacagaacctcagttagacaagaggaataagttttgttctgcttttctgagatctattgaacagcattgtgaatatggttaataatagtgtattgtacattacaaaattgctgaaaaagtaactttcaaatattctcaccataaaaaaatatttgttacctgttatctgttatatttattatcatttgaatacgttaattagtttcatttaattattccacatagtattcataaatcataacaacacctgatacctcataaatgtatgcaagtaaaatatgtcaatttacaataaaaataaagaaagtaaagaaaaatcagatggttttttaaagttaagtctgtaaagggacttattcatagttatccaaagctcctcctacaaagtagcagagttttctaataatcttgtggaagacatt

SEQ ID NO: 60236 - DNA, 474 bp, Homo Sapiens
tttttttttttttttttaaatttttaaactttcctctcctctccggtcccctggctctttaatctctttgggccagggtagtgctgacccagaaatcctcaggggttgcccagtctatgctacagcctggtgggaggcaagaggtgggcaggggatgaggacagtgggaagtggcactgactccaagcttgggaacctacgagggacatgaggacctagctatgcctcgccagatccctccccccaccataagtgagcacactgttgcctttgctcaagtgcctgtccttgctggcaatagcttaggtagggcggttccaggggccacggcctgggtggtagtccatgaccctcctggatgctgggggagcggctgtccaggagccagctgtaacaggccagcggtggagcaccagccactcctgctgattttatctgagcccgtcacaggcactatgggatggagaacctgtt

SEQ ID NO: 60237 - DNA, 514 bp, Homo Sapiens
ttttttcatagtaaacttttatttaactatgtacaacttcagttaaaaattatatttaatagaatctaaatgccactgaatcaataagattcaccatttcttatgtactgctaagaaaacaataacctgctaattaaaatgagtctatcaattgtaaaatatattccagtttcagagatgttaaataatgtgtagctcagagtaacatacaataactaaaaacatgtctttttttttctttcatgcctccaagacaagttcgaatttagtttatttttaaataatgtaaatgagtgttacaaatttcacaggaatcaacagcacttttaagatgagttgggcatcttgtccctccctatccaaacatatacattctcccctctcctcttaacccttctaaatatatctactcttcctagttttctgctccttattatgaaaatagccctccccatcttaatttctcttcatttcttagtccatttgggctattataacaaaaataccacagact

SEQ ID NO: 60238 - DNA, 367 bp, Homo Sapiens
tttttttttttttttttttttttaaagacagggtttcactctgtcacccaagttgtgcagtggtatgatcacagctcactgtagcctcagcctccctagtagctaggaccacaggcactggccttttggcttttgttaattcaagttaaggctctgacacctacaactagaagagtctggatctgtttcctaagaccatgtcttatacttcctttggatttctgcacagctttaaagtaatagtcatttaacaatctagactaaatactcaaattgtgatctttaaattagacaagctagttcttaagggtctgcgattgtctgaatgtttgtacctcctcaaaattcttattttgagtgatggaat

SEQ ID NO: 60239 - DNA, 575 bp, Homo Sapiens
ttttaacaataggaaagctgcttatttcccaccatcccatcacttctttgatataggagggtactgggtcagaaaataatttggccaacatttgttcaaaggaaaatcaccaatagggaagagttacgttccattcactacagacccttttccttccctaccactccccaactttgatttctcctttttcctcctggcctgatatggtgtaccctactagtgccccaagttctgcagctcccccacaccccactgcagggcccgacaccccaccttccttccctccctgcccatcatcaggactcaccatgtgtccctttcctgaagcgactgccagttcatctgtacttactcataatgccactaaagtaattactgacttagtagagccttaagctaaatgatgtggcactaatggcaatgtgtttagctgccaggcacttggggtgtacctcaaatcacctgtgtgggctgtgtgaggactttggcaggacagagtctgtccatgctgcctctcagaggctgtccccccaccagcttgcccttcctctagcttcatgggatagccatacagt

SEQ ID NO: 60240 - DNA, 520 bp, Homo Sapiens
  misc_feature (4)..(4): n is a, c, g, or t
  misc_feature (7)..(7): n is a, c, g, or t
  misc_feature (342)..(342): n is a, c, g, or t
  misc_feature (443)..(443): n is a, c, g, or t
  misc_feature (477)..(477): n is a, c, g, or t
  misc_feature (503)..(503): n is a, c, g, or t
  misc_feature (515)..(515): n is a, c, g, or t
tttntantgagactcactcactcactttttttttaaggtctcactctgtggcccaggctggaatgcagtgatgtgatcatagttcactgcagccttgaggtcctgggctcaagcaatcatccctcctgaacttcctgagtagctaggactacaggtgtgcaccaccacatccccagctccttctatttatttatataatatatttaaagaagtatatttaaataagtgcatttaaggaaataagtatatttacttagtctctgtaattctgttgtcttctcttttttattatctccttcattaaggcttctattggaaaatgggagggccctcttggggggntttatggggggatttaggcagggtagggattccttttcccttaataacctcatcaatccttaggcctggtaccccgaggaggactcaaggacaattagggnaactctacaattagggggacctggaaccaaaccnctcaggaggttaccaataattaaaantaaatttgggantgttt

SEQ ID NO: 60241 - DNA, 476 bp, Homo Sapiens
aagttcatttaaagcctaaaggaatagagactgcttctgaaataacttcttgtaaaatatacagtctttcagtgacagcaatttctccttatctgccttcttgacttcagggaaaagattaaaatctccattcttatctctaattatctcatttaaatgtctttcccccttattccaaaagattagcaaaatgtgatgtgtgatggaaagtgtgccaagcaggcagcctccattcactgtacaatgtcacccaacatcttcaggactcttccccatctccaaagcttgaccttttcacaatgcctccaaggtgttgtgaagtgtgtgttgatggaagtgtgggaaacccatgaggtatgaaaccactccagtcactgttctggctgcatcttaaagtgaataacggacttaacactacaattctttataatttgaggataaaataaatggaaatgacaggatatacgggacacagc

SEQ ID NO: 60242 - DNA, 534 bp, Homo Sapiens
tttttttattgagaggaaagcacatggcctgggctagattttctccaatgcctacttcttgcaaaccagggagatagtaaagtaccctaaaactctggaacattatttacttaaggcatgtttcaggagaatccagaaatcactatgaagcaccatattccaatctctttaaaattaatcctgtatgttactctaaatatagcagaaagaataagtcagtctaccaatagctgaaaaccattaaattgttacattataaatttatattctgtacagatctgggttaaattaaaactttcctaaaatggatatggcaatttaatgctcatggagagatacatttcttcaagtttaaatggaccataatgatttttcctctatcgaatttataatcacaaaaaaaaacttataatcaaagatgaatcaagaattatataaatgcattatgggatctacaaatctctgcaaataaaacagactcaccaatttgcctgaaattatttagaggaaacagggttcacagggcttatgatg

SEQ ID NO: 60243 - DNA, 468 bp, Homo Sapiens
ctgcacatttattttttaattgccggtaatggttgactcacagcattcacccaggatgacagctttcgtgttcatcgtctagcggttcaaggagatggatgtttcgttttaggggtggaggttaatagtaaccagtttcgaaagtttattttcagaaagtgtctttttaagccaatataatacttagtattcttttttgatgccatctctgttgttttatcagattactagtgaaatagagatgaccccttaatgttgctactatgttttaaaggcctggcttttcttaaaattatttgtggtgtcagctgtataaatgaccaagcaggaaacatttactaacatgagaagggtggagggaatatgtctatttgggaaagatccatttcattaaagacctaccttcgcctcacagcccatctttccccaggatcttacctccctgtgaaatcataagcccatattcgt

SEQ ID NO: 60244 - DNA, 86654 bp, Homo Sapiens
gatcctcccacctcagcctgcctagttgttgggactacaggtgtgtgctgccacgccctgctaattattattattattatttttgagacagagtttcactcttgttgctcaggctgtagtgcaatgacactatctcagctcactgcaacctccgcctcccgggttcaagcaattctcctgcctcagcctcctaagtagctgggattataggtgcccaccaccatgcccgccaccatgcctggctaatgttttgtatttttagtagagatagggtttctccatgttgatcaggctggtcttgaactcctgacttcaggtgatccacctgcgttggcttcccaaagtgttgagattacaggtgtgagccaccatgcccggcctgtttttgtgtttttttgtagagacagggtttcaccatgttgcttaggctggtctcaaactcctgagctcaagcgagctgcccaccttagccccccaaagtgctgggattataggcatgtgccactgcgcctggcttcaggtgaccttttaaggtctgttccaaactaaattatccatgaaactgttatttctttttataaaaagaaatacaaatgattttttatgttcactttagtcctaagttttattggtaggctttatgtatttcatagcttctttaaattatatgcaatatagcttaaaagcacagtggtaactactacatttatataagcagctttaattgctctcagttcggtttgtttcttgttgttttatttcttatgctttttctgggttatagactgctgttctatgtagatatttcttctttttctttttttgttgcagtgttggggttttgctatgttgcccaggctggtcttgaactcctgggctcaagccattctgccgccttgtcctctcaaagttctgggattacaggcatgaaccactgtgcccggccctgctttagacatttctaatagattgtgcagttcttttcaaatatttttccatagtcattgctgcagccatccttaataacaaaagtaacaattgaactcagagttaaaacatacacatcttttaatgtaaacactaaagtatcactttataaattcagaaaatccagagtagggaatttctggcccaaggccggagctttccagttgaagtctttattttgcatattctgtggcttttctgttttagttctacttgcttacatttatttttgctttccatagcttgacataatataaaactgaatatatcttagttgtactttgcattgactatttaattttttgtctttttaacttaaaatgtgaaataaaattaatcttgtcttcattactgtatctctgatagtttttgtttcttcatctgttgcttaaatttattccattgtattactgaaaccctaaaaaaaccaagacaccttggaccaagactagtacagtttttattctagtacagttgctgactgtgtgtttgtatgtgtgtttgtataaacttgcatttctgtgctgttacaagagacttctttttccaagattttgagcctactattggtctattgaattcatttttcccctggagatttgttgcccagagccccctgagtttgtcattttctaggcatgttatacatcttctgtctctgagctttactgctctccttgattagagctgttgtttccctgtattcgatcttctttattttttatctataccctctttctttgttgaagtccttggtaattttctaatactctcatacttgagtaatgatttggttttacatagaatccaaagttgaatatcacttttccttcaaattttaactcattgtttcttagccatctagcatttaatattgctgctgtgttgcctgatacttatataaggcttgctgcattgttaggttgcctttcctccaacccagtttaggatcttctctttaccttttgatgttctgaaattgcagtgatgtatctgcattagcctttcatttatttccctgggcacttggtgggccttttcaatttggagtgtgttctcttcaagtctgggaacttttcttgtgttttctctgcaaactcctggaagacagatgttggctggtgctttttacgtatttcttgtgtctttccaacattttgctttatgtctttctagatgcttattgccatattttccacctctttggatatttcattttgacaaatattttactgttgctaagaattctttcatgtattctctttattccatgtttttagtagtagtctattctcaaagggatatacagtaggctcttgaataatgtgggatttagggtcacagagcccccattctttgcattcagaaattcgcatataacttttatcttcccccaaacttaagtactaatagcctatgttgactggaagccttactgatagcagaaacagctgattaacacatattttgtacattatatgttacgtgtattatctactgtattcttacaataaagtacactagagaaatgtcatgaagaaaatcatcaaaaagaatatgtatttaatattcattaagtggaagtggatcattaaaaaagtcttcatcttcatcttcatgtttagtaggttgtggaggaggaggaagaacaggggctagtggctagtcttgctgtcgcacaggtggcagaggtagaagaaaatcgatgtataagtggaactgcgcagttcaaacccatgttgttcaagggtcaactgaataaatctctctttatatatagtctgaattaattttcctatttgtttattttgatctttctcatagtactgtgtgctttccccaaaggtcagattatttttggttggttgttaatatttacagtgaataggaaatctagtcaagttttgctgtgggataagtaggctttagatagatagcctgaggttattttggggaaccagggtgagaagtaccttatcattagatggtaactgtcctatttccttcagttcattcaatttaagttcagggttaagaaaatactttctcttactttgagttcaatgcttggttgtaggccttgctgggtattcaagtaggggaagagatgaggttgacctctcagtattaaagtattaaggctttcagttaatccttatgtctagcccagctcactacttataccatctatcatttcatttttagagattctaaaagttagacaaggttgttcacaacttcttaagcttcagctcctttggactctaggctatgactttttcatgctctgttttagtaatcttttctgttcagttttctcttcatctcctagaattgtatttaaatctttcatttgcttttggtcttctttttattcactttgttgttacaggtttttaccttctgtttcttctcattttaatgggatttgggggtggggagagaaataaagatgtacaaagtctgccatattgaaccagtgactcttttaattaagtcataataaatataaaatttctggcatccagtaatttttacttagggattttggaaccctctccgttgttaccttgatgtttatttcttttatggtgtgtttgcattactttccttgctttcagattttttcatctgttagtaatattaattttgtgttagtaataaagctattaacaaacttcactgagtttgcaaggttttccagagaaacagaaccaatagattttgtgtgtgtgtgtgtgtgtgtgtgtgtgtgtgtgtgtgtgtgtgtttataacgagagagagagggagagattgattgattgattttaaggagttggcttatgtgattgtggagactggctggcaagcccaaaatctgcagggtaggctggcaggctggagacctagggaagagttgatgttgcagtttgagtccaaaggcattttggaagcagaatttctcttattcaggggacctccatttttgtctctgaagacctttacctaattgattgtggctgacccatattgtggagagtaatcttttttactcaagtcttttggtttaaatgttaattatttaaaaaatactttcacagcagcatttagacttgtgtttgaccagatattggggaatcatggcctagccaagttgacgtataaagtgaacaatctctcaccacaaaaaagttgatgtgagttaatgcatgttaattaatttgatttagccattccacaatgtatacatatatcaaaatatgttgtacaccataaacatatattattgtcaactaaataattaaaaaatcaaattaaccatcacagtaaggtcccaaaaactcagaagatgataaattattctttgaactgctattttatatatgttgtcatgaaactagtgttaatcttaggatttttgagaaagtgatttcaagatgagtattgtaggcagatgcagcttaaaaagaaagcacccagctcttttctcttaagggattttatatataaaggaagttgaaaaaatagttaaaatgtgtggatgttaatgtaccaaatactgtgcaaaactactttgctagctctatcttactaaatcttcacgaaaaccttaagagctgtagatactacaggttgagtatcccttacctgaaatgcttaggaccagaagtgtttcagattttggattttattttttggtatttgcattatacttactcgttcagcaagccagcctaatctgaaaatcccaactccaaaatgctccaatgagcatatccttttgaatgtcattttggtgttcaaaaagttttgtattttgtattttgatttttgggttagggatactcaacctgtactattaatctcattttatagcccagtaaactgaagttttgagaatggttaatttcctgaggttattaatatgtaagtcatggtacatagattgcaatcattctaaattttttttgccttcaagtacataagttctgttaagatcagtgctctaaatcggttctcagatttcatttagctttgtagtcagcaagattaggatgttattttgtttttgtgtgtgtgtgtgtttctttttagttttgttcttgaaagaacaaagaagatagttctttttcctgtttaaagaatatatgtgtgtttgtaggaaagatgtgtgagtgcccaaaatggcgcttagttattaaagaccaagcaatttagacagaaaaatagtcattggccagtgattttgttaatcttgaataccagagacgtgctctaaagatgtgcctttgataaatgccaacaggtagacgtgtactgcaagctacttgaacccttctttatcagataaagttgattcaggatggaatgcaactagatataagaaaaaacctctaacttcatactcattttacagttgaagaaattgtggtttaggaataaacattaacttggataatttttttgtacaaattagctgattttgactttattcatttattgaatgtctgttatatgctaggtaatatgctaggcagtggacatacaatgttgagtaaaacaaaacttgatgatctcttcttaatggagcttaaagtttagtatagaaataatttttcttcttattttcccaggatgtttaataagtctagttatttaacataaacttactgggagaggttgtctgccatgagttttgagtgttcttgagctttcttgctcagcatggcaagaaagcaaggtcctgaccactcttttcctggaccatttctcagggtcataattgcagcaagcagcattgaaggatgacattacatttgctctctcacccctacctcttaactcgacaatcagcaggcttgcttactgctcactataaaaggcaatgccttttcaacaatgttgctctcctgtatttcaacccactgtgtttgtaggcatctgtataggcatatctgtgttgtccctgtggaacttgaggagacagggttatcttgtcatcatgctgcttgctgtgccatgggtgacagagttctttgtcttttacccagtacccttgtgtcttctgtcagtaaacatgaatcagtaatgggctagttcattagtttgtgagtagggtaaaaaatcccagaccctttacagttcttgcagttctcaacattactgtgtttaatcccaggaattattcatggaggtttagccatactttaattattaaagatatttaaataatttacctccaggaaggcagggattgcagctatgtatgttattcataccggcactagaatagtaggcatttagtaaattttgactggaaaaacgcacaagaaaaaagtgggaccagataatgagactagaagttaagaaaataaaatgtttgatgcaggtggggtacaactttgcctatcagatttatagcaattactattgaagaggaaacattccaaggtgaagaatacaatgtcctgaatgtaaaaacaaatttagtatctaggaaaaggaaaataatttttgacactaaaactggaaagaaatttcaaccagtgtgatataaaaaaatctttaacataatttcaatgaacatagggctttttcttatatccctcaatatatattccagtatgagcagtattacaggggctaacatcatggtctgactgatccaatcccaggtagattttaagttatctttcaaacagcctaccttggatatcagttctcactagattttttaatatattgataagaagatgagttatatgatactatctgagaactgttgagaatgtaattagccttttgttttcttttgccctatacataagttttattgatcaccagagctgggtatgagattgcataaatttaggctctgataggagtgtttcttagaataggaggctgttctgctgtccttgttgtagagcaggggtccccagactgtgggccatggactagtaccagtttggggcctgttaggaacccagctgcacagcaacaggtgagctgcgggccagtgagcattaccgcttgagttccacctcctgtcagatcagcggtggcattagattttcataggagcgcgaaccctattgtgaactctgcatgtgagggatctaggttgtgctctgcttatgagaatctgatgtgtgatgatctgaggtggaacaattttatcacaaaaccaccccctcatccgtggaaaaattgtcttccatgaaactggtcccgggtgccaaaaaggttgggggccactgctgtagaggacagggccaaaattttcctcaaaaagttattttggggtcctctttaatgccttaaatagacaggagaagctccacagcttcagacacaaaggaagatcattttggtataatttttgttttatagcccacatttaaagtaagaactagctgagtaaaattcatcaattttattttctttagttctagtgatttttctcgctgttttcttctagtcatgacaggattgcagaatcccttgttgccatttttactatagttgctgcctggattcttttggaactctgtagacctgtgtcttctccccttgtactcttttcccttccatatttattgcttagttggaggatcttctcaaaagatttctgatctggatctactggtattggcactattttctgccatctcttcctccctaaaatactgtctttccctaattttggtctttggtcataggtttttttatcatgtctttaagtgaatcgtgaatgacaaattagttatcaaatatgtgcttacataacaagaacgataaattgtcatggaatgattacatggaagtttcctgaagtatgagaatatccaaaatggtgacattgtttaaagcataattgatgtcatttctattttcctgctaaagctaattttctataaacagagtctgagattaggatgagagcattttactggttgacaactccagttggtaccaatctcagaagatacagtgtgaatagtccccttaagttgagtggacaacagcctggatagtttaaggaagtgaataaaaaaataattttgatataaagaatatcaaggatccttgagcaaatgttttcttaaccttagttttgacctccttttcctttgtctaattagcctcataattactaatttttttctgtcaggaagcaaagtaaataataaaatctctaaggtctttgctatcttttgaggacactgatcaaaaagaaattctgatgaaagatagagagctgcatcttgattcttacgggatctcaagatgagactggctaatttatagtggcccagaagtgtgattacttgtttcaaggccctatccttggttcgccttcactatcctagaaataggatagcttctgtacccgccagctacagaagctgaatttcataattccttggcagtggcagatccttgtttttttagagaagtaggaaagctggctacctagatttctccaaatcatagacctagacctccttagcctccctggctgtccatttctcatttcctcagcctcctgtctgaccccagaaacactttctgtactccagactttatattattttcctagtctctgttgccatcatggatttgcttcccataggttgtaatttactgagtcatcatcttgactcagaatttttggccttggttttagttaggattacactcagctaacagtgatagaaaactccagataacagtggtataaagaaagaaattgcagtagctcagaaggaagtgactgagagctagtatggagtcgcacagtgccagggacccaagctccttctaccttgcgctattatgtgtgatgactaatttcacctttattgcataatttgagatggccccttcagctattagatattgattccactcaataaaaaaggggagggaaaggtaatatctccttcatttaaaattgtatcttgaaagttgtatgttcatttctactcacatcccattggccacaccttagtaacctcatctatcagtaaggtagattgaaaagtgtcattttttttatgggtaaccatgtacccagctaaaaaataggaattccagtaaatgagggagaatggctgaatggttattgggcaacagctagcagtttcaagtacaatttctatagttcagtctgtgaggaatctgagatcagtaccttttcctagttcattggtcatcctgggacccaggtttgactactaggctttttttcagagcacatcctgcctcacttgtcaaagacttctagactgtatatctgtatttcctccctaacaagtggaacttgggaatcagataaagtccagttctctgttcatagagcatgatcatttgctcgtatcagaaattttagagggagattcaattcttgttttactctgaaggagatgggtgtcaaaattgctacttgtgtattggagatatttcattaaggtaagataaccaaacttttttgattgtgtaagtttatatataagacatttgagtgcacaccagtatttttacgtgtatttatattacttgtcttactgttttactgtattaatgtattttgtataacaaatacagtagatattaaatattttaaaatgttgagccatagataaaatatttatacttttcaaattattaactaaaattattagttgtataagaacttacttggaatgcattatgattgcacatgcttaattagttttggaaatttcatcttattttgataaaattttttacatatctggttccaagttgagcttgatactgggttttaatggctatcatagctgaaaaagataactcgattatacatacatttaaatggaagaaatttattgtagttattgtacaataactacaataatagaaatttattgtaagttataatcttagttttttttgttttaaatacagaaaagcttttattttagttaattagaacatttctgccatctttcagtgtgcttgttttttaaaactactaggaagtggttacattaaataattattactatatgagatcaaaattcactgaacttttttatttgggaaaatttttaaatgtccagattaaaaacattttttaagtgccacatttcattttttagccagataatacgtaacaatgaaaacatacctaaacatcaattttcttagcccgagttttttctttttaaagtaagaaaaagagtttctttcttatcactaaaatatcattttatctagaagggacagattaaaggtgtgtattttctcatatgacttatcacatctacttagaaaaggccagcacgtttctaacacttgtctcatttgtagaacatttattttgtaaaccaaaaatgtgtaatttattaagtataatagctcttttaagtcctttgctatgaattaatggataatttttttgtggcataaagattttaataatcacttcctgtttcattaaaattactgtttcgctttgtggtttttttttgttttttttttttttttttgagacagagtcttgctctgttgcccaggatggactgcagtggtgtgatcttggctcactgcaacctccgcctccggcttcaagcaattcttttgcctcagccacccaagcagctgggattacaggtgcctgccaccacacctggctaatattgttgtcttttttagtagagacggggcttcatcatgttggccaggctagtttcgaactcctaacctcaagtgatccacccatctcagcctcccaaagtgctaggattacaggcatgagctgctgcacctggcctaaaattactgtaaacagtctactgtttttacaaagtatttttagtataaaaggaactatatttatattaatgacattctgtaacaatgcaaagtgctgaaggcaaacaaaagggtgtcaactcctctctactttatggaatttttactctttcagtatccttccttttggataaattgactgacatgtattcatcaaggatactagtggcaatctgattaaatactagttaagtttgatttctttttaaaatttaggtagcagttaatcatagattgattgtcatgtctaccgctttagttatacacacccccttaggaaatgatttgcttaatgtataaagtctaataaaagctgctataaggatgtcttttgaaggagtgaccaatttagaggtagtacctttttaaggtatactgactgttttttcatgtgtttctccattaaagagctttgctgaatacctgacaaactttgacttttagtcttcatgagatcagggaacacctaatgaaagtaaatatttgtaacttactctgggtactgacattattcttgagttcatcttagtttcttacgtatatatatttacatatatatatgtggcataaagattttaataatctttaatatatatatatttgcttcgtgtttgtcagcattttttttttcttttaaaacattcccttatattgtagagtcattccgcggtatccataggggattggttccaggacttctccctgccacaataccagtatactcatatgttcaagtctctggtataaaatggtgtatatttgcatataacctgtgcacatcctcctatgtattttaaatcatctttgaattatacctaatacaatgtaagtgctgtgtaaatagttgtggtgaagtattctttagggaataatgacaagaaaaaaaaggctgtacatgtttcatacagacatcattgtccccctccttttttttttttttgagatggagtcttgctcagttgcccaggctggagtgcagtggtgtaatctcagctcactgcactgtctgcctcccgggttcaagccattctcctgcctcagcctcccaagtagctgggattacaggcacgtgccaccatgcccagctagtttttgtatttttagtagagacagcatttcaccgtgtttgccaggctggtcttgaactcctgacctcaagtgatctgcctgccttggcctctcaaagtgctgggattgcagaggcggggtctccttatgttgcccaggctggtctcgaacccctgggctcaagcaatcctcctaccttggccttcgaaagtgctgggattacagatatgagtaccatactcagccttcccaaatatttttgatatgctgttggttttattcacatatgaagaacccatggatttggagggttgactgtatatccttttaaaagacactttaaatatgttttggaacaaagtagactgtaaatgagatatatgctatttagatacctggttaaggatacttgttattttaagctttaaaaaaatttttaatttaattttgtattttgaaaatttaaaacatactgaaaaacaaagtacagtatactcacatttagtcatcaccaatattcaacagctgttaatattttgctatatttgttgtattaatttatcagtttaccagttcatccatccagtctacccatttagttgaactttatcatgtatcttcccaaaaaggacttatatataacaataccataactacacctaagaaacaatttccaggtatcatctaatatcctgtccatgttcaaattagtcatttgtccccaagctattattttcacccggtttgttcaactcaggttgtaatcaaggacctagtttggcatttagttgtatttccgaagtctctgcactcctttttccattgatacattttgaacaggtaagaccaaatgtctcttagcaacatcctgagttttagattttttaaactggattttctgcaagttggaaattaggtttaaaaacttgattagagtcaaacatatttggcattcggaaaacttcataggtgaagctgtataatgtcacatcttagaatgtttatcatctgactcttgatgttaaattggattactgggttaaggtagtgagagcaaaatctcttcttcctaaatacttgagatggcaagtaatctgcacagcgatgcagccttggcaatatgaaaatatttatttcctcatcagcctttttcctaatggttttatgcatccattgatgatattcgctggagtcagttgtagcaaaatgatggctttctaaatctaacttttcttttacatttatttgctgcattctggtaagggaaagttttgtttcattacctggttgcttacagttcctactgaagaggcagattagaaggaaagaatgaacatttcagagttaggagttggaggaatgatctttcagagtaaagagttttggtgaaatgatcactgctaatgccagaggtggcaaataatttttttggcttcctcctccctcccccttttttttgagacaggctctctattgcccaggctgcagtgcagtggcgtgatcatggctcactacagcctcgacctcctgggcttaagtgatcctcctgcctcagcttcccaagtagctgggaccacaggtgtgtaccatcatacctgctaatttattttttattttttatttttgtatagatggggtctctccatgttgcccaggctagtcttgaactcctgggctcaagtgattgtcccacatcggcttcctaaacctgggattataggcttgagccactgcacccggccctctttcctttttgatggttataatgagttcatagattaaaaaaatatatatgtcacagtgcttttttccttaagatgctcaaatttttttttaacccaatcacctcacaatgtagtcagtgagatgtacttttaattgtgtgttccattgcatagttttgttactgttatagaggcagaatgcttctaaaagtacttgctgattttttttcattctgcgatttttaattttggccttaggaccatattttcctctgttacgtgtataattacaatcaatttcagtataagatttcttgatatgcaacttcaaaaaagcatgtgaaatatgtaaaaggaggtcagcttggaaattaactgatcggttgtgagggtttggtagaaaatttttcccttatcttaaggctgaatgttgatcatgctttaaattaaatttgatacacactggtgacaggaaaattgtcaaataaatgaccttgattagtggacagatcagtcttggctttaatacagaaacattcttgtgatgatttagggaaataattattgtaaataaatcttcaagaaactgacatttaaaaaactatattgataattcttcctttttaaagcagtatagtgaacataatttagcttttaactgttgatttagtagtcttgggaaaccagtgattgtattattacttattagcaacatccttaggtactgtttttgtaggtaaggcttttggtccctgtattaactgggcctgggacaaatacactaggaaaaaaattgcttttgaatgatgtgtttctcgtctttttataataccgtcttaggaccttctagtttatctttctcaaacatctaaaatattcgatccattcgtctaattgtgagaggccaggaaacttgagttattagaaatatgtgaaataaaaataagggactacactcttaaaaaggtgtgtatatatgtaaaacacatggacaaataaaccatattaaagtagtttttctctgagggtttctatatacttgatttttcttgaggaaggctctagagttggaaagttaactgaaatgaacttgatgtaagggattacccattctaaactgttcataagaggccagagaaacttatggaagataacaggaagcatttactgacttctaaacctacattatagaatggagcaagatacattttactgctgtttcaaggctgaatacatataataataatttttttctcattaagttatgacctttacctaggtatgtttatcagaattgtgttttccaagttgtagtaattctcttatgtgttccaaatttattacagagttgacatttttttttctattaaggttcatatctttaatctctttaatatacttgatgaaagttccttttatagaaccgtttttatactcttaaaaggagactgtgattcttaggcatacaccctgaaaaatgctactaattggatctttttgagtgagcagctttttttgtagttatttggttattccatgtttggatgcttccttctcatctgtgctttctaaactgtcatcctaattctgacttctgcatgggttagtcaacactatgtgatggagtagaggtgttttttgtttttttgtttttttgcttttttgagatggagtctcgctcttaacgcccaggctggactgcagtggcgctatctcggctcactgaaagctctgcctcctgggttcacgccattgtcctgcctcaacctcccaagtagctgggactacaggtgcctgccaccgtgcctggctaattttttgtatttttagtagagatggggtttcaccacgttagccaggatggtctcgttagccaggatggtctcgatctcctgaccttgtgatccgcccaactcggcctcccaaagtgctgggattacaggcatgagccaccgtgcccggcggaggtgttttattctatttcttttgattgctgaggataacttcctgatttgagtctagttgaacatggaggttctcatctgttgagatagagccatgatatttttgtatgcactcatgcatttgttcatttaagctatgttttaagactgaatattttatgttccagctgctgttctagcactagtgatacatcagaaaacaaaagaataacaaattcctgctcttgtggagttttaattctatttagtggagcatatagtagcataatagtcttttcctgggctactacaaattagggctgtaaattgtttaactcagtttcctggcctcttttactgaaaaaaatatgtgattctctaagaactcttttggtggtcctgtttgtgtctgtttttttcatatatttgagtaaatggaactgaaatgttacagaatgaagtgcctagttgggaattgacttattagaatgtgaaactcaatgaataataatgagatccatattataagatggtcgagctgcttttttttttttaaacctattcctgttttacagtaacgtgattttcattaaataacattccagggatcagcagtttacaacaatcgtatgtaaggtataatgattttctttgagataaaagtgattggtactgtactgtttgtttaacaaatatttattgcatacctatcatatgccagactgtttccagtgctggaggatagagtggtgtttgagacaaagtccttgccctcatggagccggcaagtattaggttagtgcaaaattgattgtggctttggccattactctcaatgggaagaaacacgattacttttgtgtcagcctagtaaattgtaaggtgatagaaaatgtctaattgctttttggtggcagaggtcatggtttatttgacttgggctagttagggaaggcctctctcaaacattgagagtagctgcatgctgaggtactcgtagtggccagccttttgaaaatcctaggcaagtaaagtacattccaagcagagaaatagcaaatgaagggtactcaaaatgtttagttaatacttttatcagattaaagtaattcatggttactaaatagttctagtatctctgagggttgtgtttacatgcttacattcatatttacagttgttttgttttgttttgtttttgagacggagtcgtcctctgtcgccaggctggagttgcagtggtgcgatctcggctcactggaaccttcgactacctggttcaggtgattctcctgcctcagcctcccaagtagctgggattacaggcacgcaccaccacacccagctaatttttgtatttttagtagagatggggtttcaccatgttggccaggatggtcttgatctcctgatctcatgatctgcgtgccaccacgcccagctaatttttgtgtttttagtagagatggggttttaccatgttggccaggatggtctcaatcttctgacctcgtcgtctgtccgcctcagcctcccaaagtgctgggattgcaggcgtgagccaccgtgcctggccaatatttacagttttttaccgaaccaagtctgtaattagtgggctgtataaataaatgaactatgagacaataactttctcatgtgctattgcataaaaaaatctaagaaataaaaataatatttaaacaattaggaagcaatccataaagtattctccccttctccacagacacagatactcatattaacagagtgtatactttatgtcaccatagattttctaaaattggttagtgtctggccaagtgcctcctttctgcctgtttttatacacatagggcagacagagctaatcgaaatgaaaatttggaatgtgtatttttttatttttcttaatttcataatgttgcttggtaggttaaaaaacactttaatacatttttagcctttattataatgtcctatatttagatactcctttaatgaaattagaagatcatgttttatggttaggtttctactgctctgttttccacaggtatggtttgtggttacatgataggatatctactgttaaagcaaactaaatatgcctgagaaggactctacttctatatttgagtccttgtggatgagccgtaacctagcttaacagcagacagattagaaacctaacttgggagtatgtgcctgtaacaatagctgagtattggtcaatcccagccgccatacttgaaccactcagacttctgtgtgttcaaagtgtgttcacataaggcaaacaccaacctgtaaccaatccagctgtttctgtacctcactgccgatttctgtatgtcactttcccttcccttttttgtctataaatttgttctgaccaagaggcaccctaggagtctctctgaatctgctgtgattttgggggctgcctgattcatgagttgttcactgctcagtaaagctccttcaaatttatttctcctcaagtttttccttcaacactgtcttattctttgttttgtctatgcttgggatttttttttttaatgtcaacaatcttgtattaccaaatgtgcaggattaacactttaacatggctaacagcagaaacagcaccgctaacaagctcaagtgtggaggtgcagacccaataagtattgtctcttagaaaaggattgaaaagatacagatatctgcttaagtattttttgtttttaaataaaattttccagtgttgcagaaaaaatatcccaaagtgatttcagttcataaaaaagcagcattaggcagcctgtgctgccttataaaccccaactcaggataaccataggagaaaacccctgaaacattaaaaaaaaaaatcaccgtttcttctcgtccttctccagcttcaactgcttattccacgaaatacctaataacaggataagcaagacctagctcacttctgtcagcctcttgtctgtttgttaaggttaatccttcacatctacaacaatcagtaaattgatttctaatttctggctcagatttctagaaacttgcaaaacatgttttcttcaaggatggggctgagggttccttgaaaaatcaagggggcagggtacccgcctgagactggaatgcctcccagaccctttctaagcaaaagcatcccaataccttacaactgaaagtctaacctaccaggtaagaaaaagtagcaaatgggcaccaaactgtggctgtaccaaaaaggtgaatatctcctcctcttaactataaaggtaagggagttgacaggagccaagtatttcaccttatctgtctttagagtttgcatagtttgggctaaagccatattgcagagaaaaacattcagtcaaaggataggggtggcttttgctgtatctggtaaagctgccattcctgggcagccgaattcgttgctcttttatagaagctcttttgccttatacaaagtacttaagaattaatagggaaattttaaatttgacttaataactgacaaacttaaagatatacaaaaaggcggtgtataaatccacacagtattcaagcttttttagtaaccatgtttcttttaaaaatctgaaattagtgctagtgagttcttattgagacaatatgaagccctttgcactgtaaatattttatatttttggagagacatttgatgatatctaagagtaaaaatgaatatatatgtgtgtgtatatatacacacacacatatatatggtgtatatatataccatcttcaactcagtgaacctgtgttttaaaatgtatcgtaaagaaggaatagaagaggggaagaaaagcattatttatatagcattgttaatttttttcaaattaagaacatgataatatctacaaggataaattcattcccaaatagttaattgtatgtaacatacaactcgatgtagtgtatcatacctcagcctctttttggagtgaatctgttactcattcatgaaggaaagaactcttaccaacgggtggtcaagtagagactggtgatctcctgcgatgttagaggggtaaggtgtaggggctctgttaagaggaggtgttcacatattttcttactatacttaacacagcccctataaagtagatatctattctttattgttgtgatactgcacagatatgttcttttccccctcaagtctggtacttactgccaactttgtaatagaggaaataaccgacgtagaagtataatagttgagctaagtttgacctttgtgctgcctgcataattaacgcattccaaatgtgaagagtccctcctgttactgatttgtaattctccccctttgtatggtattaaagtgatttaaacaaatctctattgttgagcagtgcaataaatttaactctgaatggtttttattctctttatctcatttgtcccctttccaaaaagataggtttaaattacatagtctggagttaaaatagtatcaaggtcaggaggacttcacttaagcaagtttaattagggcaatttggggttgggatgggaggaatttgaatgtgatgtaaaatcaggctcgaagagatttctgagtatgatcatggattttatgccaaaatttcagaaccatttggggttaaatttattccatttctcaacagtagggattggtttaaatcactttaataccacacaaaaaggaaaattacaaggcaggactagtagggagtttttcacatttgttatgtgatgattatgctggcagcacaaaggtcaaactcagcttaactacttctagatcagttatttcctctgttataaagttggcattaagtttcagacttgggggtaaaaatgagaatggcacctagtacctagttctggaatataggtgggaagaaaaaacatactggaggtgcttctgttgttggggctcttgaatgttcagcatgagagctctggaaactctgaaggcaatgtagagcttgatttaatgtagaaatggatttttgagttgaaggaagtgtgttgtcaggaggagcaggagttcaaaaaaagatgcatgcttggaaatcttacctttgagaaacatctcaaatgcagtcttagttattctaattgtagattgttgaccaagaggttgttcaatgatagaacctcaagtcatcacttaccttccaagttattttccagcacatataaacatggtcagatctctgttgatttttccctcttctgtccccttccttctcttcactttcctccattaaacttaaaagcgactacaattattgtcattcttcatttacttacttcttaactccttctcatctgattctctgctttgtgtgtcaaactagtggatttctctcctttattcgttctttgtgtagcagttaaccttcctgattcccactactttgaaatttttgtgatgttgctttaccttgatgcatcttttgtctgatctttttccttcatgtcttcaatatatcaaaaaagtgaagtcagtatgttacttccaaatttgttctttccaacttctctgtttggtcaatagaaacattttctctcactcatcaaggcttaagttctcccagtctgtcttttctcataattcttttattcagcaaatattttctggaatacctactatacacaaggttgttattctaggttctggggattcagccacaaataggagacaaaggtccttacctgtgcagcttacactctagtggagaagactgtcagatacttaatgtcatatagagaaacattttaaaggataaagtatgctaaggatccataggcagtaatgggaatatgtgctgttttgcataaggtggttagggaaggtttctctgagaaggtgacatgtaagtaaaacctgaaggaagggaaagaatgagttatgggtatttgggagaagagccttcatgcagcgggaatagcaagtgcaaaaacctggagatgggcttatgcttccctatgttcaggaaaagccagtgtgactggaggagagtgaatcagcagggggaggagatgaagtcaaagaagttggcaggagaagatcttgttataggaccctgtgggccctggctaggattttgggctttatgtctaaatgtgttgggaaggttttagaggattttgaacagaagaatattaacgtgatctgacttaatattttagaaggatcacagtgataactgtgtggagaataaactgtcaggggagaggggatggcagtagagaaacctgggacactaggaggctgttacagtcttagatgagagatgtgatttgggagtagcatgttagctggtcagatgtgtgatacattttgaagataaagctagcaggatatgccgatagcttggatgtgtcagatatggggagaggagctaaggacagttctagagttttagaattgaactaggtgatttggaggttccatttactctgaataccttgggaggaacagttttttgagggggagggaggattggtagaatcagtgtttatttttggtatgttaactttgaggtacttattagacaacttaatgaagatgtcagattacactcttctgaaggtctcatgagcttcgggctggagaagatacctatgggaatcattagagtatagatgggcctggataagatcaccttagggataagtgagtgtgaagggatgagtgagtatgagtgtagataaagaagaaagatggggggactgaactgttgtatccttcagtatgtagatgtctgcaggaagagaaggctttatcaaaggctgttgacaagtggctagggaaatgggaggatgtggtatcccagaagtgaagtgaaaaaaaaggagattcagaaagtggagaggaatcagctgtgtcagatgctgctaggaaatggaataatttaaaacctgataattgacctttggatttggcttgcgaaatcctgttgattctgctttgtaatacagctctaaaattcattacatgacttcactccctgtcaacaaacactattcatcaggctttccttctggtctgtttttctattttggatggttctttttttctcctgtttacattgtagaatacatgctcattatagaaaacttggaaaagtcagagaaagtataatgaaggttaaaaaacaacagcaatggcaaaattccttacaactaaatcactgattgaacagtctgttgtgtttttcctattaatgtttcttatgcatctttgtaatgcatatactatatatatatgcttttctacagaattaatgaaaagtagtcttaaaatttatgtatttaaaggagcatagtagacctgtaatctaatgtcaaaacttttttgaggctgggtgcagtggttcacacctgtaatcccagcactttgggaggccaaggcagacggatcacctgaggtcaggagttcgagaccagcctggccaacatggctaaaccccgtctctactaaaaatacaaaaattagctgggcatgatggcacacacctgtattcccagctacttgggaggctgaggcaggagaatcacttgaacctgggaggtggaggttgcagtgagccaagatcgcaccactgcactccagcttgggcaagagtgagactccgtctcaaaaaaaaaaagaaaaaaaaacaaaaaacaacaaaaaacaacagcaacaaaaacctgaggatgtatgtgaatgtgtggcaaccaatattccatcatggtggaatagcctaactggagttcctacctgtctttacacaaattatatcttaaattaatcctgattaatttttctaaagcatattctcctccaaacttttagcgcatagcataatggttaaaagcgtgggctctatttttacttttataatacatgcttatagcaggaaatttggaaaataggaaaaaggtatattcttatctgtttatggataagaattactgtgtatgattactggtataattttcatctgttttctgccaatcttttttttttttctatctaaatgtacatatgcatgcattttatttgtgtgtttgtttctaacaaggatcacactgttttctggtcagcattttcttcataatccattctttcctctctttaaatttattttgatcaaagcatatgagcagtttcatgattctgtttgttgtcaaattgctcttcaaaaagattgtgtcatttaaaggtaaacttatgaagaattttgttctctttaaattttaggatagaccactatcttgttgagctcttttaaatgaagttctacttggacacaaagatgaggactagataactccttgaggttccttctaacccctaggatgaagataataactaacatttgtatagtgctctaaagtttacagagtgagttctcatacatcatctcacttgatcctcacaacagccctgtgaggtaggtaggacaggtattgttattctcattttagaggtaaagaaactgatagagaggttaagtgacttgataaaggtgtttttttttttttttaaacgttctagtaaggatttgaatccagacttgctggtctaaataatcacgttctttttggcaagatttcatacaactgcacatttagaattactgatacatgttggctaagtggcatttgttctacacagaaataaacctaatgacaatatgagtacggtgttactatttctttgactgttcctgagtctttttacattctttctccaccccacaaattaaatacatgagtctgtctctcttttgactaggagaaggtaatgtaattatatagctatattaaacatctactattttctccagcatttgggggaaggggaagttacattatgtttttcatttttttcctctctctgtttttttccgtttcttcctgttttttttttcttttggtaccagtcaaaagtacatctgcattgcttgctttcatacatgtagcataaagtctgtagtagagtattgggatcccagttagaagtagaatttttgattctagcatgaacctagaatctttcagggtatggaactcctgtactaccttaaccaaaattgtgatacttgagtactccaggtatagtcacctatgtctttcacaaggggtcagcaagtaataaatggaagtgatatttgaggctaaatcaggaaagagtataatatagctaatactctctttgactaattactttacaaggtggaagtttataaaactgacttgatttgggagtttggtagtggcaatttcacatgttagaaaatttcacattccagattttcaagagtatgtagtgttacattaagactatctcacagtattttctgtactgcctttaattgcctaacattcccaatatttttaaaagttaatttttttgtcgtttttttctagttgttggtcttgacgatattatggatgaaggagttgttaaagaaagtggcaatgataccattgatgaagaagaactgattttacctaacaggaacttaagggacaaggtagaagaaaattcagtgagatctccaagaaaatcacctcgtttaatggcacaaggtaatcctttgagagaggtctagctagaaaattagaggtatagggacagatgtgttaggttataaacctgctgagcagaaatcatattttcttgatgttttgctaatccattcgttttgatggcaatcagttttgagatcatatcaatttgttgtataagttttcagtacccaccaccccacactacccatttctccttccccaggggaaaccactagtaactctgagctggtttaatttttttttttttttttttttttggtatttacctttatagctctaggtaacatgcatatgttgctgttttttgattattctgatttattattcatccatctattgacttcccactgtggatggttttcttcctgctacttgtccccatcatataattttgttagatcaatggtaattatgttagtatgagtaatatgctattagagatgatacatttaataaactacagttacttttcttgtatgacttcttgtgtttctgatttaagtgttttagtttctcagttgtttagtgtgtacataccagcagttatactaaaactgctctaccagttgtctaaatctaccctaaagatatttgtgtatttcaggtattctgtcatatccattttattgaaaacacctcttggagccttctgatcccctcttatgtagacagactcctgttagtcctatgagcctgatgcaaagctgttcagggatctccctttaccatttttctggaagtctgtgctttgtgcttttgttgtagttcctatttcctctttctggattcaatttttttattttggtgatgcacctcttccagtagttttgtgagaaaaaggagctgtgagatacactttttaaaccttgtatgtttaccttgtatttagtctattctcatactggaatcatggtctggttggatgtaaaattcaaggttggaaatcattttccttcagaaattctgaaggtgttgctccatttttttctaacttcagggttgttgagaagtttattttgatgtgtgtgtgtaggagtgtatgttatctgatttcttctggaagtttgtggaatcttgctcttcagctttggtgttttgatatttcatgatgatatgtattggttttggtgtattttgtgtatggagctcaagacactcagtagatcctgttagtctgaaaaatgttattgttcaattccgggaaaatttttcaaattatttcattgttaattcctctctttattttgttagctcttgatttctggaacctttattatttgttacataacagggactggtccctctgttttctttattttgcctacttcctacctctttgtaatttttctttaacgtgcttaaattttctcatatttatcctccaacttttcagtcaagttttgtacttctgattcttaaatgttctttttgttgttgttttgagaatggtcctttctgtagtgttctattcatgtttcatggatgtagtatcttcttttgtctttattaagatactaatggcgttttaaacagtttttgtctcctttcatagtttctgacttctcaatgttgcattattttaaaaaaaatgtttaaaaaggttttggcctccatctttcctagatgctctcctgaaatgtctgacccttgattattgctcatgtttaagggtagggaactaaaattatgaaacttctaagtgtggggattgggttttaccagctatgagcgtcagtgtatagcaatctggctgtactgttgtttggcagaacccttcctatcagaatttaggttattttccataacttattagattgctagcatattatggaagcctgtaagggaaactgactggggtttctcagatttcagtatatacaaattcacttaatcttacaaatttcaatgtactttacagccagtctcaactgtgcctcatgttctttagcctagaaaccttgctttactatctccagagaataagctacgagttttggctcaggactagggaagggcagttgcccaacaaatggagtaggggaaagagggatctagaaatctaactgctacttttaaagagctttcagcccttctaagtgttaagcatctgtcttcattcccactttagaatcatctgggaccaccaagtcttaagacttttgaggtgttaatggtgttagtttttgccaacactgccagcctagtgttttattaattacttttgggtctcttatgtcaaatacttggtaatcatctcttgtttggtttccaaaatttgctgctggtttttcctctctcgttcttccttgccttttggacttttcaaaaaatgtcccgctgttatagcttcagtagggttttgagaagtgaataaatttagatccatgtatttatttcatcatcttttcttgatctatgtttttaatacattttcaaaatcagttatttggtatatacgtgtggctttgagaaatgaaaagaatagaataaacattgtaggaaaataaaacttttttgcctatagaatcaggcttcaaactaaggcaggtaatatttagaggagaaaaagtgactttagcctttgcttaataaattgcttcctattggaaaaccactttttatctgaaaatccttcacagctgaatatactattcttttgtcatttttagcaaccgcttgggtgttaaaagatctttatttattaatgtgtaataagtgttaaaatccttcatttgtttcatttcaaggatgaatagagctgtaaattactataatctgtctttaaagctttaaagatcacctaaatattgaaacaaagctttattaaaattttagttatttaaaaaaattttataactgaatatgtgataaatagttcataacccaccaagtaatttttaaaagttattaagtacttaacctaatactcagatactttgttgtgtcctatgggaattagaaagggtctctaagataaggatgactatataattttattgttcaaattgggcatacttttgaaaatgaaagtgtgctattaatactagatcagaactacgagcaacacctggacatttacctttttaaagattctcacagttcagtgataaatgacaaattcagtttgtgggttgtttttgtacttactgaattatttagctctctttctttttagctcttttcattttgtgtttctcctttctcctgatacaagggggggatgtatcagaatagggaaatgaaactcttttcatttaatggactattaggagcattgtgtgggaagcttttaaattttcatactttccttatgatacatttgcttggtttaagtcttttaaattgtgtttcttttttgatgagctgtatgtggtactctgtgttgatatcatttcttaggaatagctttaatgctaaaatggtgacctaagggaagcacattgataaaggaattagagtccgtttgaggctgtattttgaaactcgcacagatcctggtttgtgataggaggtttttagttcaggtttctttagcactggaatatatttggttttatatatttagaaatatttaatgtttaaaaatccatgatggtcttgctttaatatgggcattaatggtaaaggaagctcattttacttacgtcactcctaggttactttttatggaaaagagatttgatgaaaacatttcttttaataaggtataatattagtctgaattttttagaggcttttccccctgctagaattcagagaactttgataaatataaaatttgacatatgttaaattatatatatgtgtatatatatcatgtcaccattatgagtactgttcaatacatttttgttgagcaaattatagctcagaataaagaagtgatatattctaaattgtattgaaataaaagcacatgacaaaatagctaagtatttttatttattttttccccctgtgatagaacaagtaagaagtttgcgacagagcactattgccaagcgttcaaatgcagcaccattaagtaacacaaaaaaagcatctgggaagactgtatctactgctaaagcaggagtgaaacaaccagaaaggagtcaggttaaagaagaagtatgtatgtcactgaaacctgagtaccataaggagaatagaaggtgcagccgaaatagcggacaaattgaagtggtacctgaagtatcagtgtcttcaagtcattcttcagtgtcatcttgtcttgaaatgaaggatgaagatggattagattctaagcataagtgtaataatccgggagaaatagatgtgccatctcatgaattaaattgttcacttctttcagagacttgtgttactattggagaaaagaaaaatgaagctttgatggaatgtaaagccaagcctgttggtagtccattgtttaagttttcagataaagaagaacatgaacaaaatgattccatttcaggtaaaacgggtgagactgttgttgaagaaatgatagcaacaagaaaagttgaacaagattcaaaggagacagtaaaattatcccatgaagatgaccatattcttgaggacgctggatcttctgatatttctagtgatgctgcttgtacaaatccaaataagacagaaaacagccttgtaggtttgcctagttgtgtagatgaagtgactgaatgtaatttggaattgaaggataccatgggtattgctgataaaactgagaacacccttgaaagaaataaaattgaaccgttgggttattgtgaagatgcggagtctaataggcagttggagagcactgagtttaataaatcaaacttagaggtggttgatactagtacttttggaccggaaagtaatatcttggaaaatgctatttgtgatgtgcctgaccaaaattcaaaacagttgaatgctatagaaagtactaaaatagagtcccatgaaacagcaaaccttcaggatgacagaaacagccagtcaagtagcgtttcttacttagagtcaaaaagtgtaaaatccaaacatacaaaacctgtaattcattctaagcaaaacatgaccacagatgctccgaagaaaattgttgcagcaaagtatgaagtaatacatagcaaaactaaagttaatgtcaaaagtgtgaaacgaaatactgatgtaccagaatctcagcaaaattttcataggccagtcaaagtcagaaaaaaacaaattgataaggagccaaagattcagagttgcaattctggggttaaatctgtgaaaaaccaagctcattctgtactgaaaaaaacattacaggatcaaactttagtacaaattttcaagcccttaactcattctttgagtgataagtcacacgctcatcctggttgcttgaaagaacctcatcatcctgcacaaactggacatgtatcacattctagccagaaacagtgtcataagcctcagcaacaggccccagcaatgaaaaccaatagtcacgtgaaggaagagcttgaacacccaggcgttgagcattttaaggaagaggataaactgaaactgaaaaaacctgagaagaacctacaaccccgccaaagaagaagcagcaaaagtttttctttagatgagccaccattgttcattccagataacatagctaccataagaagagaaggctctgatcatagctcctcatttgaaagcaaatatatgtggactcccagcaagcagtgtgggttttgcaaaaaaccacatggcaacaggtgtgtgtgtatgtgtgtatgagtgatgtgtacattgaaaataaattgcttttttgggggtgggattaatgtgagaattgttttaaagacattatttgatacacagagacctgtgcaaaaacaaaaagcttcatcagtcttggataaatgatagaaagatggatctactgaatttacaaatatatcatcctagaacatttaaaaaagcatagtctggccaacagctgacatacatggaaatattttgtcattgtcacaggttagacagtgtaatttagccactgcatctgcaaaaaagccaaacacttcctggtaattggaaaattgttatactgctttgggtctgtaagttatatattaattcatttggtgtgagaagaactagtaataaagtatgaaggtcataatggaaattctatttttcttttgaagtttttttttttcttaaaatgaaacatattaaagaacaccatttcataactatcaaactttatcttgcagtgaaatttgacagctaaacaattgttagattacccaggtcaacatgaaatagagtgaaaaacgtatttctttttttgaatgttttaaataattttttgtgaattctagtctttttaaaatttgagatgattttagcactgactttcatcattctttctagtattcagtgatttgtagttttatgacactgcacccctcaatccccaatgtgttttttgttagctttttaagaaaaggaaagcaagagatgaagtggagtttgcagctaccagattattctgttcaagtgttcatattgctgttggaacttctttcaatgctgatatgataaaagaacattataatttgtatattatattcttcttatccttattcatgaaagtgtgctagagtgatttttcccagcactatcttagtacataaaaatgaagctctttagggagggacaatttagtaaagtgtgttgtaacatattattttggtggtgttagggtgattggggagatcggaaaggagatgttggggctattgtgtaaaataagttttatgtcaaagtatttcttcatttgtgatccagcccgtggcctatttttagcgtcaagggttagtttataacaatatattccagtttttaaaagttgtcacttgtttgaatacagtgctacattcactgtcacttacatgctcttaattatatggtttttttatttaaaacaccttactcagccaggcgcagtcgcatgcctgtaatcccagcactttgggaggctgaggtgggcggtaggcagatcacttgaggtcaggagttcgagaccagcctggccaacatggtgaaaccccgtctctactaaaaatacaaaagttagctgggtgtgctggtgcatgcatataatcccagctatgtgggagactgaggcatgagaatcacttgaacctgagaaatggaggttgcagtgagccgacattgagccactgcactctagctggtgacgaagtgagactgtctccataaataaatgaacacattactcaaatattctgaagtgggcctgctgttttcaggcaaaagagaattaagagttaggtggtgcttttaagtgctcctttaaaccagcctttttctctctgccagaatctttaaaaaattatcatgtggacagagagatggaataggtgccttaagtaaatgaatttctaacatgaaactttggcatagagttggaagccatgttagtaagttataatgtaacgtactaaccttgtagataaagttccagtccagtcttcaggagtttgcccaggctttttaatgatgactcatgcttcaccaacatttaataattttcctaaattaagagtaggtgttagtccctttgttgttgtttacttgctgccaccttttggatctactgtatagaatctagagtgtttttgctcaagtctgtagaatgacttagaatgtcaggtgcatagagattttgggtttacactctgtaattgatgtgaataatttaacattggaaacaattatggaagcagaattttcgattacttcaattttgtgaattaaagccttcctggctaacacggtgaaaccccgtctctactaaaaatacaaaaaattagctgggcgtgctggcgggcgcctgtagtcccagctacttgggaggctgaggcaggggaatggcgcgtgaacccgggaggcggagcttgcagtgagccgagatcatgctactccacttcagcctgggtgacagagcaagactccgtctcaaaaaaaaaaaaaaagcctatgtaattgtttttttcccctcccctccccccttcccctcctcccccctcccttcctcccccctccccttccccctccgttcccctcctccccctccccttccccctcccttcccctcccctcctcttctcttgtttttaagacaaagtctcactgttgcccaggggtggagagcagtggtgtgatcttggctgactgaaacctccacctcctgagttcaagtgattctcctgcctcggcctcccaagtagctgggattacgggcaaatgccaccatgcccagcttattttgtattttttgtagagatggggtttcaccgtgttggccaggctggtctcgaactcctgaattcaggtgatccgcccgcctcagcctcccaaagtgctgggattacaggcacaagccatggcgcccagctgattgttgtttttacatattaactagccttcactactactgtgattctactactttgatacattgtgcttgtatacatttcgtttactcagaaaatgcacctgtcatgcaggttgcaattttcctattctaatccttgtgtaagaatataaatttattagaaagggcatgtttggaaataattttgatccttctctttgatttcatgcactagatacattgaaagctgtttgttaatatgacacattttctagcatttgcaacagctttgcctctgtaaagactatataaacgctttatcattttacgtattgcagttgaagttagtttccttgtgtgtgctcccagttggaaattatattttgtaatatagctgtgtcatggctagatgtgatattaatcataagcaacttctatgcatatcctaaagacagtagacccttaaagaagcaacatatgctagatttttattgcttccttttattttcctgattcaaacttacatcaaaggtgtatgattttaaagaccagattatttaatcctctgatttttaaaattaatgcaacttttgaacttcttttaaacgtaagtcagttggcattttgtaaggaggaagtcttagttttttcatgttatttaccttgtggtttctgtttttctacttctccagaagatgcttgagtttttagtttgcattacactttcttggccccaattgtagaagactagtatatcagataatatttaaaaaacaaacagacttagaaaatggatttatagctttcaaacaagaaaacttctgagaagaaattttcttctagaacaaatgattctatttttctctgcagattgttagtaacaaaaatgatttaatgtttatgtgacatagaattctctgatcttagaagagtgagtcttttctctctctcaaaaactcttaaaactgcattttttaacctaaaatataaactattaagatacatctgtagatggcactagagttttgctttttatagcctctcaagtttgaatgagacatttccaacttgaaatgaggcttattgaaagaattgcttgataaatttcacgatcatcaaaccactcttccctggttgtgaaataaaaatgtgaaaattccttaatatgtgctttatattttgacctttaggtttggatttggaacaatagcattatttgtactgtaggtttttaagtcatgtctcactgaaactatcccagacttgctttgaagaaatcttaatatacctttgattgtggaagtaaagggaaatcattagctttccttcagcatttcagaaacattcatgttagacagttgctttcaagaaatagcagttagcccattgttaggaaagctacaatgctcattacaaataatcatttttaatattttagctttgcaactcgaagtgggagaacttttaaacacctgcatttcaagctttattccacttttgctagaatatctgtatcattatgggcccatcaaaaatctcaaacctgtaggaattatttctgtcttctaaacgtgtgttaacattgttcgaaagttttcttgcttgtcaaccccaaatattctatattatttttttaaaccaaattaatccctagggaaatgaggacttaacctgctaaagctagcacaggtattaccagcaaggataaagaatgataagttatagatgtgatgaagtcaagtctcaaggcatagtagtggttttatacacaataggcacatgaggaagaagaaaaggaagtgctgttattgaggaatgaggtatttggcaagactttaaaaacactgtaaggattggaactcactcttgtagtttttacagttttaacattaaaacagtacctctggtatattttgaattgaccatatcacccagtgtgttaccttcaatatcctctctcttggattacagctttttgaaaggagcttggtactattggtggtgccactattatcaaaatcagtagcacggtctttagattgttaaagtacatacctaaatccttctaagtctttcagctgtatcataaattgctagcctgaagatgaaaaaaggacaaagttaaggatggttgtctgaaagcattgcagctttcctaaccatgggttaaaaagcaggtaaattaaattgctgtgtatatatctcatttgctattattttcaaaagtagttatagatactccttttaaactggaaagatagaagcttttttagagtcatacgtttcacatccctggacttttcctattggttagtgaagttattacttagctaaaagacagtgatgggaaaacttttataaggagattgggaattaaatccaacccaagtactaatatttttatgttaagatagaatagtgatctttatttggaaaaagaaatttatctaaaacacatggtcattagtaaggaagtcctttgaacttaaaagtacagaaaaagattctttagctgaatcagcgtgacaccatgaaccagaatattttgaggttatctaggtaaggtggctaataaacagtttgagaggctccatcatgctagtttttgagttccatttttgttactattgttggttttttcttttatttaaaacgatttgttggataaacaattcttcccaattttatatgtgatgtcacgtctgtggtgaggtaggtagctgtaactttgatggattgtccgtgatgaaattattaccaagatcttaccacccttctcagtggataaatttattgttagtctatactttgttattgtttatagtattcaagactgacaaaggccagttgtcttttcttcctgatggtttattgtcccctccctcccccagcattttctcattcataccagaggagaaatatttgaggtcttaaaggtatcattttaatagaatattattttctttgaaaacttgctgtatgttgaacttatggaacggatagagatggaaaacatgcaaagtttcagaaaatcagatattgaaaatttaatttagcctcatttttgacatagattttcttgttaaaaaaagggataaaagttttttggtgttctgttttccaggtttatggttggctgtgggagatgtgatgactggtttcatggtgattgtgttgggttaagtctttctcaagcacagcagatgggcgaggaagacaaagaatatgtctgtgtaaaatgttgtgctgaagaagacaaaaagactgaaatactagatccagatactttggaaaaccaagctacagttgaattccatagtggagataaaacaatggagtgtgaaaagcttggattatcaaaacacacaacaaatgatagaaccaaatatatagatgatacagtgaagcacaaggtcaaaattttaaaacgggtgagctcttcattaatgcattattttgtttatttaagagctttttgtatggactgactgcaataattttgaaatttctctttagaagttttaatgttcttttacattttcaaatttagttttccatgaaagtgaataggtttttatttaaaattttttgtcagtcttggtgaaatcagatggtgacttttagaatatgcaggccttatctcttacagtcttttttgccatttctagcccctagtttggtacttgaattttctgttgtaggatgtgtgtggatcttgtggccattaagtgtaaattgtgcttgctaagttgttttaaaaaagcttttcagtccataaatatctaccagccctttgaccatttggcattatttttttgactaccttctgaaagtattttctaaatagaaatttcaagatatttaggctttaataggagaaatgtataaaggacacggcattttatctgattaaattttctttcctcattgtctacctttttattacctatcacttttttagtcgttaatttgttattcttatagaatactgatagagaggagaaacagtggcaacacatgtatgtggttaggcaagtataatccaaaacgcaaagaacatgaatcttagagttggagctttagaaatcttttggtccaatcattttgatttattaatatgccttacaacatttctaggaagtgatgatctagtttctgtttgaaatccattgcaaggggatacatcttcatttttaagcatctaattgtcagaaagttgatcagtttgagctgaaatttgcatccctgaattgaagcctccttattaaaacttaatttctctgcaacacgatatggaagttaatttagattgaagagcatgaggatgtgttctccagaatcttacctattaacaaatccgtttctttcaggcattccttgtacgacaaatctggattaagttctagtttgtcatatccttgtggcatctaatattttttgtctgtcaagactttttgaaaatcagattctgtccttctgatacgtgttattactttgttgatttgatcatcaaagtaattgataatatggatctgagagccacaatgagaacagtttatagcatgtctttggaaaacttctatttattattaactagtattaataatcacctcttacgtacagcttcttggccatatacatatgcagtacaatgagaaatatagctcattgtattgaccatagctgagttgtctctgtcttgcttaaaaagacatcataaaggctgagtgcagtggctcacacctgtaatcctagcactttgggaggctgaggtgggcggatcgcctgaggccaggagtttgagaccagcctgggcaacatggtgaaaccccgtctctactaaaatacaaaaattagccgagcatggtggtgcatgcctgtaatcccagctgcttgggaggctgaggcaggagaatcgcttgaacctgacggaggttgtagtgagctgggattgtgccactttattccagcttgggcaaaagagtgaaactccgtctcataaataaatgaaaagacatcataaaacgttaacaattttaacattttgagaacctctttatccagtctgtatcagaaaagaatctgaggtgagtctgattttgtaaatgtgtgcaccatacaagtgatcactgcttccttttctttttgatgtgaactgttgactctctcttggacttgtctgatgttagtttatggaatctgcttttcttatccctagatttttatgttgaactatttattgagtttctgttgtgtggcatagcactacgtgccttgggtgtataatattgaagtatattcctgctctcaagaatgtctagttgcagacaaaaaccagacaaataaataaaaaattagaggattcttagtctagagaaaagcactattttgattgtaccctattttaaaacctgagtatatgtctgactatatagcgttcctctccctgtctttcaggaacattagtaggatgtgattaatttctcccaaggatctcagaattccagttttactggtaattctttgtggattataattagaaccagagtagcaggtactctgatggtttattctacctcatgggaattaaaattgccaataggcatactgagaacttaattgatacacttgctagtatataagtgaacttaatttcatttgttttagaatatagatacttgtttctttacaatttcctcctttttccatatccagagccaaataagagaattcttactaccttatttttaattttctttctactaatggtattgggaacatgatctctatgtcctttgtttctcctttataagctattatgtgttctacacaaaataggtgcagaatagatttcgaatgaaagagtgaatctcattttactaataatcaagagttatttttgtacgtcttaaaaaacaaagattgtttagttattttcattctaatgaattaagtactcattttccaggagtctggtgaaggcagaaattcatcagactgtagagataatgaaattaaaaaatggcagctagctcctcttcgtaagatgggacaaccagttttacctcggagatcctcagaagaaaaaagtgaaaaaataccgaaagagtctacaactgttacttgcacaggagaaaaagcttcaaaaccaggtagtgagatgaacagaaaaaattatatactaatatatttatatcttatttaagatacaattaattagtatacttagggaatttttacaaatttaacattattaaatgttgtattgccattaaggcaatacaaatgggttaggtgattggccttacttgtaattaaaaacttgctctaaattctggggaagcgctagtgaaattaagataagacccctcttctcatggcacttaaatactaatggaagaaggcagtaagtttgcaagtaagaaaattgcatgttattttacagcttgagaagaaaaagtggagtaatgggatggatagtcacaggtgggaagagtaatgggacttctgttttacatggaatggaggaagtaacttgtgaggtgggatttgaaggggtgcaaagatttttggaggaggtactaggtaagggacacatcaaatcttaaggctttgtggtagaaagaagtgtggcatttgaggagcaagaaagccactgtagagtgattagaaggtaatacataaagggatagaacagtgttagaagatgagttcagagaaaattattgctcgtaccctattttaaaacctgagtatatgtctatctgtatagcgttcctctccctgtctttcaggaacattattagtaggatgtgattaatttctcccaaggatcccagaattccagttttactagtaattctttgtggattgtaattagaacaagagtagcaggtactctgatggtttattctacctcatgggacctttggggctatggcagagtttatattttgttctgaatgttgtgggaaacctttagagggttttgtgcaagggaaaactctggttgctctgtacagtttggattgtaggaaggcaggagagaaagagagtagcctgattagtccgtagcaatatcctaggaaagaaatgatggtagcttggaatggaaatagaatgaaggtagtgagtagtagtcagattcacatatgttttataatagagttgacagaacttgctgatgggttagatataggttggtattggtgaaggaaatagagtctgagaaaagaaaaaggtttggggaagaaaattgaaaaattatgttttggccattatgagattcctattagacatcgagatggaaatgttttgagtaaatctttggctgatgagtctggagcctattagaagactttggaggttggtatataaatttgggatttactagtgcatagcagttagtacaggttaaacatcccaaatctaaaatctgaaacttgaatgctggcatgatgcacaaaggcaatgcttgttggagcattgtggatttcagattttctgatttgggatgctccactggtaagtacaatgcaaatattccaagatttgaaaaaatctgaaattgaaaatactctggtctcaagcatttcatataagggcatactcaacctgtatttaaaatcatgggcttagatataaatagctacaggagagtttgacaatgaagggacagaagcagagcccttgggaagcaccagcatttatttttactttatttttgtgacagggtctcactctgtcacccaggcttgagtgcagtagtgcaatagcagctcactacagccttgaactcctgggctcaagctatcctctcgcctcaacctcctgagtggctggactacaggtgtgcaccaccacacccagctaattttttgattttttgtagagatggtgtttcgttatgttggccaggctggtctcaaactcctggccttcaagtgatcttcctgctttggcctctcaaggtgctgggattacaggcatgagccattgaacctggccatcagcatttaagagttggggagagaagaggttatacagcaaaggaaactaatgggtggcctgtgaggaaagaggagaactgagactggtggcctggaagccaggtgaagtttcaagaaggaaggaatgaccaaatgctgtctggacatttagtaagattaacacaagattgttaagtctatgacttagcaaaatggaaatcactggtgaccttgactagaatggtttcggtggagcagtagggaaaaaaaccagttgtagtggcttatgaatgaatggaagagtgaggaactggagacgttgattacagataactctcagggagttttgctgtttaaagaaacaaatgccgtagtagttagaagtggatgtgaattttttttttaaagaagatatcatagcatgtttgtaagactaatgggaatgatccaatagaaagagacggctagagagagatgatgttgatgatgtaagagagagaagtgatagtgtaggtgtgaaactcgggaagacaagaggggatgggattcactccacatggagggaggtatttatcagaaaggtaaagctcatccattggatagtagggaaggttgtatgtggtagggggaagaactaatgtaggtaggttggatttggtaatgggaaaatgatagttgacagtttttccattttttttcagtgaaatatgaagagcaaatcaaaaagattgtagttgagaaggaggtattgttggtttgagatgagaggagaaaaagtatgaaatagatatcttaaaaagtgggagagcaaatttattaggaaaagttaataggattagggcagaaggttgagttacctacttaaaacttgtggttataaatttaaaatgacatctgtcagtaccagtgcttatttttctcccttgtcttcagccgtttgttgcctatttgggtgaaggataaaagttggctttgagcagggttgtggttttgccaacacacatgtttaaaagagagagaataaagatattaagtatacgaggggctggtaatggtattagactgtctaatctaagtttataatgtatgaaaagtgaatacatgaagatggtaaaaatcatagatttaagaattgttggcatgaggagattctagaataaatgtgctggtataataagtcagagcagtgggatgtttgacattgagattttggagatgcttgggaattagtaatgatagaataaaaataatttgaaaagcttaacattcaaattagtaaaaccagaagagattcatcaattttgtggtattaggttatctgctcctaataagttcagatcaaaatttctgaaaactttttaaaagttaattaatatatatgtgtggaaaaataactagctctaaaagccattgtctaaattgaggaaagagtaggaccagtttttagtcactattcattttaattaggatttcagtgtcaggaatatttcaatatggattgtgggttctgatcttatttctaaatagtgacttttaatcagttttgtttgtaaacttattcattaaaaaggaaagatatttttaaaagcaatgtaatgagtttcgatatttattcaaattaggtactcatgagaagcaagagatgaaaaagaagaaagttgaaaaaggagtgcttaatgtacatcctgctgcttctgcttccaagccttctgcagatcagatcaggcaaagtgtcagacattctctcaaagacattcttatgaagaggtaacatatatttttattatagaagtatcaataattatgctttatacatttgaaaaataattgaattgttctaattttaagacttacagactcaaatttgaaggtaccagaggaaaaggcagcaaaagttgccacaaaaattgagaaagagcttttctctttttttcgggacacagatgctaaatataagaacaaatatagaagtttgatgtttaatttgaaagatcctaaaaacaatgtaagtatgctttgttcatatgtttatgcttccaactttcctgagtacataggtatctcagattgtaatacagtagatctataatttattaattggagtgagattataatttgcttttgatgtagaacatgtaattttaatagtctttttgctactgaataattctgcatactaatagcattaaccattcagtctactgaaatgctaaacgtgtcttaacctgatttatattattttttctttactctcctttatataatacaatttattaaaaaattcattcatatgtattcttcaaaaacttttaagctaaaatttataacactatttttttcttaaatctgaaaatagagctattttgtacttaaatctgaagatagagtaaaaatgcttttaaattgtttttatcgaaatgtaatttattttcttaagaaaatacataactttagttctaaagatagtcttaaatataactttagttccaagtattatagcagtagagtaaatgttaattaaacccctaattttttcttgggatttcatgttttggacagaggaaatctaaaggctgtgcatgtgtgtgcgtgtatgtgtcagtgttagctctcaacaccaaaagtaggtctctgataagtacaataagcaaaaatcatgccagcgaacattttaaaggttcagaacatgactgatctcttgtgtgtgacatttacctaggtccaccagcagttttttgctatagattactctaggtaacagaatgtgattagatgcaacctttttgcataaaaggttttcacacaactgatataaatttgtataaggatatttgctacagtaggtgatttgaggtattttcttgaagtacactaacagagacttaaaattgtacattctgccatcatggtcccgaggatcagatgcttctggaattacataatctggaagcttttcttcagcaattaaataaagatttatttccctcaggtttttttatcttttttttggagacagagtcttgccctgtcgcccaggttggagtgcagtggcgccatctcagctcactgcagcctccactcccgggttcagatgattgtcctgcctcagcctcccgagtagctgggattacaggcacacgccgccacgcccagctaatttttgtatttttagtagagacggggtttcaccattttggccaggctggtcccaaactcctgaccttgtgatcctcctgacttgccctcccaaagtgctggcattacaggcgtgagctgcggcacccggcctccctcaggtttctttcaggtttctttcttgcaggtggttttttgctctgcagtttcctccaagcctgtcaggatttaaatatgtaaaatcttaaaactatgaagaccattacattgagtaaagctctttgatgcagtacctcgctatactatagattgcttattgttatggttatattgtgtccctgggtagacttaatacaacttttgggtaggtattgtaatggttctactgtacatgcttctccatatatgttgatttttatatgaaatgtgtgttttgctgccttaaattcctagaacacaaagctgtcatttaatctctgtgtagtaggtaatatataaataattaagtatttgtaaatcagtcttcaaaaattgtatctttattataaatttctgtgtagtagccactcaaaatgtttgtctccccttctattcctattttaaaatccttccagatattatttaaaaaagtactgaaaggagaagtaactcctgatcatcttatcagaatgagtccagaagaactagcttctaaagagttagctgcttggagacgaagagaaaacagacatgtaagattatctataaatatgcatttgactatcaaaatctatgtttttcagccattgggtaaaaattatacagaggtaaattcaacacagactgcataataacacagactttctgttacatgcttcttttttttttgagatggcgtctagctcattcgccaggctggagtgcagcagcatgatctcagctcactgcaacctctgcctcctgggttcaagtgattctcctgcctcagcctcccaagtagctgggattacaggcacgtgctgccacgcccagttaatttttgtatttttagtagaggtggggttttacctcttaaaccaggatggtctcgatctcctgacctcatgatccgcccacctcagcctcccaaagtgtggggattacaggcatgagccacctacatgcttcttttaattacttgttctccattcctctagttcttaaattctgttggtttctctgatcttgtcaggtttttttctcattttctccagttactaggttacagaattaccttgtgttttattatagtttgtaaatgagaaggatgggaaaagaattaacatcttttcataattacatctgtatttttcagcagcacagtttgaaggtattatgaatattggtaatttgtagagccagatgaattaagtcagaataaaaatgtgtacaggcttatctcttatccaaagtttcaaatgccaaaagccctgaaaaataaagttattttcgcataactaatttattgataaagcttaacctgaattgccatgtatgaatgttcatattcacagaaatattgtatatttaattacgtgtctcagacctaactggaatgttatgtaatatagagtgtgtgcaccatatttcatgtttaaatttaaaaattctgaaactcacagatagcaagaatttttgtttggagattgtgaacttaaaggtatttaaagtacctttaaaaattaagtatgttacttagagccattgtgacagtgagatagccatgttatccaatttttgtattacaatggcatcagaatgttagccccttattctagaaaatactggttgtagttcatattaactctacatgatttatctgattcttttgttcataatatttagttacatctcaggcactaaacctccatatagacctatgccagatctagtttgaagctcatctagaggccttgatttgacatatcatacttcttcatacattcctttaccttcaccgtatgtaatttctcctcctcttatattttgaaaataatatcacctcctcttccttccctccatatctcaaatatgcacatgccactcttctgctttgaaactggctgcgagtaacatctgtatcagaaaatgccagcttgttctttcttaaggccatgtacctgatttttctttaaaggatgatttgtacttaacaaaggcagtaccatctatgccttccttacctgttctattcctggctacctttatactactacttgttatacttgcttaattttgatgttttgttgctaagcttgttcaaccgaattttcagggtcactaagcaggcttagttaggagacagctaacaaaggactaccagatcggtcatttgaataaactactattgtgggggatgttagaacattgaattaggaatttaagagcaaaatagttcctatttccctgtggcagctgctaaaaagtactaaatcagcaaacagatttcaaatacaaatagtatgtttcaccactttgcaaattactttggacttcatttgcctcctgatataaatgtacatgtgaacttctcatggttgaggtacggggtctaattcttataaccgcagtacttaaaactgtctctggcatataaaagtactcagaatatgtttgttatatgagacattaccttaagattaaaagtcatctgtggtgatttgtttatttttaggtaagctcttattatttaaggtgtacacttggaaatacatattttaaatttaatatttttaaaaaagtattttctgttagaccatagaaatgattgagaaagagcagagagaagtggaacgacggccaatcaccaaaataactcataaaggtgaaatagaaattgagagtgatgccccaatgaaagaacaggaagcagccatggagattcaggtaaggatagatatgccatgttttatagctcaaaacatgaagattcagaaaaggtttatttgcctaatgtttttaaagtagagaaaagaattttaaaatatgcatccatttaaaagtagcctattttattggtttagtggttttttgagtgttgagtaatgtctctcaaattgcattataggtacctgttgaacagttattacagtgtagattcctggagtgctctgacttagtgaatttctttttattttttggtgggatagagtcttgctttgttgcccaggctggagtgcagtggagcaatctcggctcactgcaacctccgcctcccaggttcaagcgatgctgccacctcagcctcccaagtagttgggattacaggcatgcgccaatacacccagctaatttttgtatttttagtagagacagagtttcaccatgttggccaggctggtcttaaactcctgacctcaagtgatctgcccacctcggcctcccaaagtgtggggatcacaggtgtgagccaccgtgcctggcctgacttagtgaattttttagtaggcttagaaatttgtaagtgtttcttaggcagagtgtcatttgataggtggcatagcttttcttattttcaaaagtcagtgaagaaataatttgaaatcttactagaaggcttgaagaatggggaatgttttaatttttgctcttttaagtcacagttaaaagctagcattcattttcttaagaaatagtaaaaaaaaaccaaaaaacaaaaatcaaaaacttatctatggaacaactgcattttaggaaaatataaatggaaaatataaattgattttgataattgaggccaaattttatcagctaaaactaatttttactttgacttacgttaggaaccagccgccaataagtcattggagaagccagaaggatctgaaaaacaaaaagaggaggttgactctatgtctaaagataccactagtcaacacagacagcatctttttgatctcaactgcaaaatctgcataggtaattggaagtttttcttcgtaaaattttgcattcattatgaaagaaggatacttagatactagtatatgtaatttaagtaggttttgttttcccaatattggtggtgaggcactcactcacagtctttaagctttcgtgtgactggttttctgggttgaggtatagtttgatactgtggtatagtctactgtctagacctaattatactatatatgatttgaacttaaaaactgttcttgctggagtcaaatgacaagaatttaaccattagaatgaacatcaaacattgtgggcagttgtgatgatactgtcatttactaaagtaaaggagtaaaatagcatttatattttattatatataacataagacaaatcagaaactgaaattacttttttgtaaaaaagctttttatttttaagagcacttttaggttcatagcaaaattgggaggaagttacagagatttctcacatacctgctgcctccctacgtgcatagtctccactgttagcaacatcccacaccagagtggtgcagttactacagttgacaaacctacattgaaaaataatgaccccaaatccatagtttacattggcgttcactcttagagttgttcattctgtgggtatggacaaatgtgtaaagacgtgaatctagcattatagtattatacagagtattttcactgccctaaaaatcctctttactctgtctattcatcccttcccccaacacccccaccagcccctggaaaccactgatcttttcattgtctctgtagttttgcttttttcagaatattgtgtaattggaatcatctagtatgtaacattttcagattggctactttcacttagtaatatgcatttaagcttcccctatgtcttttcatggctggataactcatttctttgtagcattgaataatattccattgtctggatgtatagtttttccattcacttaatgtaggagatcttgttttattacaagttttggcaattacgaataaaactagtataaacatttgtatgcagctttttgtgtggatgtgttttcagctcctttgggtaaataccatggagcacaattgctggattgtatggtaagagtatgtttatcttataagaaacctccaaactatttttcacagaggctgagccattttgccttcctgccagcaacgaatcagagttcattttgccttcccgccagcaatgaatgagagttcctgttgctctacatctttgctagcatttggtattgtcagtattctagattttggccattctaataggtgtatagtggtatctctctgttgttttactttgcattttcctgatgacatatgtggagcatcttttcatgcttatatgccacctgtatagcttctctggtgaggtgtctcttcaggcatgtatagtcatgagctgttgctatataatccaaacctggatacagataatacagatttgtcttagttcttcatgttacttctcgagactattggaatttggtaaaattgtcagagaattaagaaacctgttttaggttctagtaataatattttcattttagcttgtctgagttgtttaacattctcttcttctaatttttcacttcactaagagaggaattactaccttaggggtcctcaacccccgggccacaaacctgtacggtccatggcctattaggaactgggcctcacagcaggaggtgagcggtggacgatactgcctgagctccgcctcctgtcagatgcagtggcgttaggttctcataggggtgcaaaccctattgtgaactgcacatgtgaaggatctaggttgcgtgctccttatgagaatctaactattaatgcttgatgatctgaggtgtaatggtttcatcctgaaaccatctctcccctcatcccaccgtccatgggaaaattgtcttccatgaaattggttgctggtgataaaaaggttggggactgctaatcttgtccatatttactcatgatatgttttacatgtaggaaataattataaagagattttaaggggaaattaactttattacaggtagaaccatgcatgatttgctttgaattgcatttcagataagcttaggtccctgtatatagaagagggctggcagtggggagaacactagtgaattttctgctgattcttaaatgtggttgtgatacaactaaatgatgacagttagatataaccccaggaaatgtatggttactcagcaattgaatcatagaacctgaataactttagaaagtgaaaatgggttaagttataaaagttgtagttaacagttggtttcttttgatgtattctgggcttaggtcgaatggcaccacctgtagatgatctttctccaaaaaaagtaaaagttgttgtaggagtagctcgcaaacattcagacaatgaagcagaaagtatagcagatgcattatcttcaacctcaaatattttggcttctgaattctttgaggaggagaaacaggagtctccaaagtcaacgttctctcctgctccacggtaattttctctgttgtaaattctgtaatactcattatagatctttgccagattatacttgcaagtcttcaaaaacagaaaagtgacattttgggaacctctcatttgagaaaataactgtactttcctgtactttgagataaaacaagacttcgaaaataaatatatttggagtgttttcagtgagagattggagcgtgtggggaaacagctttaaaattctctttaattatgctggtcccaaaagtcagggatagattattaaagacgaaatgtttgcacttttctcaatcttagttctcctaagccagccaagagggaagattttgtaaaacattactatgtaaatatgaatgtaattttataaaatgaaagtgtgaactctttgtcaatagcctcatattttggccttcttcacatgctaaaatacgagtaactgatgactaggtaggacattgatttattcatcagcttgtctttaggctttttaatgtcattttctagtccagagatgcctggaactgttgaagttgagtctacctttctggctcgattgaacttcatctggaaaggttttatcaacatgccttctgtggcaaaatttgttaccaaagcctatccagtatctggctccccagaatacctgacagaggtactgtgaacttttctgcttttctgtgcatgaattgataatgtgtgtttctgaaagtaattgacagggaaataagacagagttagtaatagaaatatttattaacaatgatttttaaacagtccaagtaatataattatgaattaacaaatggatctttagaattgtaaaataaactattctctgaaagttttaaactcctatgtcctgcacttttcccaagatgtactgcctcactgtgtcagataattcaaaatcaatgagagtctacatggatatccaagtttttctttgaatacacacttaaataaaagatttacatacttttggtctttaatgttaacacattaagaattttttgttaaacagatcttctgatttccccactgcttatgtttccccatcttcatgactactgttcttacctgcctatttctgtgaatgtggtttatgtagactgggagttgaagctttacagctagttgaaaaccagtgagactagtgactgtagttgctgcaagtgatacccttggttggttctacacctgagggaaatagaaagaaactattatgtggtatttatggaaaataagcagcagtaacattataatattgtgataaatgagacagtgacatttttgaattattttgaaggaaatgtatttttatatgtgtatagaaggaaaataaatcagtacatatatactgtatttatgttgagatcatattttgctatcttgttcgtatctgacctttttcatttattctctatctgctgattttaaagaattaaaagattgtaaaaaaattccttttattatttgaaaaagcctaaatcatttgcctgtcttttttttttttttaaggctaacataaacttcacttttctttggattaggctgcaattagtttaattcaatgtaatactgtttatgtaatattgatcagtttatttggttagcagttgtgggtttgtttttgtttttgtttttgtttttgtttttgtttttgttttgagacagagtctgccctgtcgccctggctggagtgcagtggcgtgatcttggcttgctgcaatgtctgcctcccgggttcaaccattctcctgtctcagcctcccatgtagctgggattaacagatgtgtgctaccacacctggctaatttttgtatttttagtagaaacggggcttcaccatgttagccaggccggttctgaactactgccctcaagtgatctgcttgcctctgcctcccagaatactgggattacagatgtgagccaccgggcccagcctagcagtgtgttttcgattaataaacagactaatcacttttatatacagtttgcttgatattttaaaaatgtgagctttataagagaaaaatgaattagatccatgatgttcttcttgagcaaatctgtttagaaatttattatttggtcagtccatggtgaagataattctttaaacggagaggtaagcccttaactacaaaatccttttgattttaaacaagattattattttcccctccgagacacagtttttatgtggttgctttccagattttcacttccgttttgtacttgtttttagtttggactgaaatcccaaatcaaatattttaaagtagttaataatttaaataaactaaattgaatttaatatcaattatgtttttatgattttcctcagtcttcgtggaaaaaataggaatgtactgaataaagttttaaatattcttaattgctttcatgtgtagtcatctgttttcagaaagattatgcctttaaaaaaataaaccttgaattattacaatattattctcctttgtgcaaaaatacactctgtaattacatttggtaacctttgaaattcagctgttaattattaaggaattttcctgcctactgctaccaaaaggggaggttacaatctctgctaatattctgaaatgtgttgtgttctttctgaattgttaatgtggtatgcttgccattgcttccctttcccatctttcatagtgagattgggcatgaactcagactctttcttagtagctgtattttaggcaacagtcatttgtagttggcatttcaagtaaaacctaattgctctctgtattctgttttccgatgcatttttcataatctctttatttacttgtttttattactgtttcaaattagtcttagaatcaaatttgtatgaattactaatgtcataataaagataatctatatatattgatctcttttttttttttttaaccataggacctaccagatagtattcaagtaggtggcaggatatcacctcagacagtttgggattatgtggaaaaaataaaagcatcaggaaccaaggtgaggaaaacttttttcactataccagcatgggaaaatgtttagaaagtaaacagtttagaattcttatgcaagggtgcaaagtctcctggggaaaggaggcaatacacattttaagtctatgtaatatacctcacaaaactgaacaaaagccatttgctgaggctgtcaacagtacagcattttttttttttcctctcctgggatgctctctttgtggcttctgttaatgttttagaagaaatgttttagagtaagtattgaaattcaccctggaattttgccttgcttctattacagacaagtgtttgagttagggcacagctaagctattgcaaaaaagagaatctaaaatatagtgactcaaaaaatacagaagttgattggagtgttgtcctcagcagtcaaacataccaaataggagtaaatgaggaatacctgtctagttgtttgaaaggcaaattgcagtcattaacttccattggaaagaacctagtcacatagccatccatacatagctgctagggaggctgggaaatgtaatctttattggatggccatgtgcccagctaaaagttaagggcttcttattagtaataggaggaaaggagaaaagatactgcgaaatggctctatcacaataatatttctccttttcctttttctctctacattttcttttctttttttaacttatagaatattactacagaggaaaatttaatcattagaagaaattgtttttccctccacgggatgtgatagtacctagtatattaacagtcattcgataaataaatcttgaatgaataaatgttacttttttgcctctttttcagaagtctctagcttttctttggaatgatccaaaatggataatcttaagctgaaaagaatattttgttccagtatagatttttagaatttaaattgatacagtgttaaaatacaaataaactttaaagcactaataaaaatgagaagtattactcttgggcattttgagaatcactcttgaatccacacatatattactgcccaacactttatagtatgttccaatttaacagatttaaacactctgtaatagttgttactaacatatgtatggtgatttttactctaaaagagggcagtttagatgacacacattttataagagagtcatatttcagctcattcacatgttttccttaggagcttgtatcagttttaggctttgcagcaaatctggctctcccatttcggccatataccatcatgaaaaaaaacattgttgttgaacactaccaaattaataacaaattaggactgtcttttctatctgaaacaaaacctagaggcaagcaagaaaattcctaagccaaattactttacaaaatttacggtctatatgtatttaaggtctcttcatccagccctttttatttctaaattcagtgcctagtaactggattattagtagatttgtctgtttgtgtatataaatgtatggtagggtggaagtgttgggtgcttttagttcccagtggttcaagaacataagcagccctttgtggaggttacagcattggaaatcaggatatagtgtagatattagaagacttgggtttcagtatcatctctgccactgacaagttgtatctgtcaccttcaaaaaagtcattaatcacctttggactccatttcttatgtttccgtaagaaatgtaagctatcagataaatccatcaatggatcagtaaagatcttttcttaagagttacttgcttttaatattctcttctgtatttaagttggtaaaccacgttatttggtaccatcattataaagttcaatagattattactaattgagaaatagttttaaaaccaagctactctttagcttattaccttaaacaattatttgttattttcttgaacaggaaatttgtgtggttcgcttcacaccagtaactgaagaagatcaaatttcttatactttgctctttgcatacttcagtagcagaaagcgctatggagtagctgctaacaacatgaagcaggttaaagatatgtaccttattcctttgggtgccacagataaaattccacaccctcttgtgccttttgatggacctggtaggtatacgttttaataataggataagaatgaaataacatgggaggtgggaccagagtgaaaagactgattctgccttctttctcaggatccagccctctagagatggcttgacagggccaggcaccatttaatatcctgtaataagttagaggcagaattttacctttttttgcaatgattgaaaatgatgaattaattgatgtttttggttttatacagggcttgaactgcatagacctaatctattgttgggcttaattattcgtcagaaactgaagcgacagcacagtgcctgtgctagtactagtcatatagctgagactcctgaaagtgcaccaccaatagcattgccacctgataaaaaaagtaaaatagaagtttctacagaagaagcaccagaggaagaaaatgacttttttaattcttttacaactgtattacacaagcagagaaataaacctcagcagaatcttcaggaagaccttccaacagcagttgaacctttaatggaagtcaccaaacaggagccaccaaaacctttaagatttcttcctggcgtgttgattggctgggagaatcaacctactactctggaattagcaaataaacctcttcctgtggatgatatacttcaaagccttttgggcaccactggtcaagtatatgaccaggcccagtcagtgatggaacaaaacactgttaaagaaattccatttttaaatgagcagaccaactcaaaaatagagaaaacagataatgtggaagtaactgatggtgaaaacaaggagataaaagttaaagtagataatatttcagaatctacagataagtcagcagaaatagaaacatcagtagtagggtcctcttccatttctgcagggtctttgacgagtcttagtctcagaggtaagccaccagatgtttctacagaagcatttttaacaaatttatcaattcagtcaaaacaagaggaaactgtggagagtaaagagaaaacattaaaaagacagcttcaggaagatcaagagaataatttgcaagataaccagacttcaaatagttctccatgcagatctaatgtaggaaaaggaaacatagatggtaatgtgagctgtagtgaaaaccttgttgctaatacagcgaggtctccacagtttatcaacctgaaaagggatcctaggcaagcagcaggacgaagtcagcctgtaactacttcagaaagcaaagatggagatagttgccggaatggagaaaaacacatgctgcctggcctgtcacacaacaaggagcacttaacagaacaaatcaatgtagaggaaaagttgtgttctgcagagaaaaactcgtgtgttcagcagagtgacaatttaaaagttgcacaaaactcaccatcagtagaaaacatacagacttctcaagcagaacaagcaaaacccttacaggaggatattttaatgcaaaatattgaaactgtgcacccatttcgaagaggatcagcagtagcgacatctcattttgaagttggaaacacatgtccatcagaatttccttctaaaagcatcacctttacttccagaagcaccagccccagaacaagtacaaacttttcacccatgaggccacagcagcccaaccttcagcatctcaagtctagcccacctggatttccatttccagggcctcctaattttcccccacaaagcatgtttggatttccaccacatttgccacctccattacttccccctccaggctttggctttgctcaaaatcccatggttccctggccacctgttgttcatctcccaggtcagccacagcgtatgatgggtcctctctcacaagcatcaaggtatataggcccgcagaatttttaccaggttaaagacattcggaggccagaaaggcgccatagtgacccttggggtaggcaagaccaacagcaactggataggccatttaataggggtaaaggggaccgccagagattttatagtgattcacaccatttgaaaagagagcgacatgaaaaggaatgggagcaagaatctgaaaggcatagacgcagagacagaagccaagacaaggacagagacagaaaaagcagggaggaagggcacaaagataaagagagggcacggttatcacatggtgatcgaggaacagatggaaaagcaagcagagatagtaggaatgtagacaagaagccagataaacctaaaagtgaagactatgagaaggacaaagaacgagagaaaagtaaacacagagaaggagaaaaggacagggataggtaccacaaagatagggaccacactgacagaactaaaagcaaaaggtaaaatttgcaggctgcttcaggattacatttaaataactgttaaaatgttgtatcttgtaaacaaaagaaagattgcctgctaggattgtgccatctttaaaatttttactattggtcatttgcagaacagtaaattctgtgtgttggtacagagtgctctgtaccagtgctcatcatcccttcttcataccaacggtccctagttataggaatttaatatttttaaaagttttacattgctgtatattcaaagatttgttttattaatatgcaataaaggcttagaaattttagttttattccttaattggtaaatatggttaactatggaatatatttacttcctctagtgaatgtcctttatataatgactaatttgggagtaatgtgtgctctgtaagtttgttttaaattgcactgtttttaaagaaactgtagaggagcaacaaaaatccaagcaacttcataatcagattatgctaatcatttagttgagcagtttttgaccaagaatcagaagcccaaggggtacatttattgctttaatctgcactcattgaagtcatttattaccatatactacagctttgtggtaggccattattttcattttcatttttggctcttcagaaacttgaatacttaagcttgtacatgatcttgtgttttgctatcctttttactgtaaaatgtaaatattttaagggatattttgattctaaatatgataaaataatttctcacctattttgtgtgtgtgacttgaaattcagtagtaaaagaatttcttctttaaagctttaattaccttcagacattgattttttgttactcagccaagaacatatagaaatagctatctatgtcaggcattagatgaggggaaaaacaatttttttaaaatcttaaattgtaggctgagatgaattgtgtagttctaaagaggctagaatttagaactacctgtgaaacactgtgcagctatagcccactttataggtaagtttctgaaaacttttacaccatcgcaatttggtactctgactcactaatcattaaaattaaagaccgcagaacttgaagagaaatatgttttgaatccttttataaaatgtgcgatttagcctaattcgtaaagtaactgtacagtttcatatgccagttttacttgaaaaaaaaatatgaaaactattgttaattcaaatctaaatttatttaaaccctaaaacacatggttttgatggctgtaatttaaagtaagagctatcaaatgatgctgacaaaagaaaaaccttccaaaatacaaaagaaagagaactctattatttacttacctgtattaatgaagaaaaatataaataattccacaaaattgattgttttcctaaagagcttaaagattagagttaaaaattggttttgaaacagaattatccttgttatttttgctggagagaagggaggaaattcagaaccaaacattctatttaatttgcaatgacttgcagtacttttttccctatccttatcctgtgaaacttactatcataaggttctaaaacagagaacttgtgtttaaataaagcccgtttaactttggtccacttttcttttggaaattaacttgttagaaaacaaagttagttcccaaacaaaacaaaatctaagttataatttgcaccattacaaagaaattgctgtcagggttttacacattttaaaaacatttcaatttcaaatgtgtatatcgtcaataaatctacctttactgatatatctggttgagggaatatcagactccagatttcttttgcaagatgaaagtaaaaacgagtgggttaatgaatgaaaacaagcttttaggtcagtttttgatcacctcttcgctaatagttttttctacatatctaaaattctttaatcagttctgatcgaatcttgatacatgtttttaaaataggcaaggcccatatagctttctattagggatgagcatctccaggggttagaggcagatcttgtaaccgctgattgactgaaacattttatggagaatagggaaggtatggtcatattagctatttgaggttttccttttgaggaaaaaaagggaaaatgagcagatttttcaatgagtagtagatccaaagccattctcagtcccaggtacaaccagccttacacaaactagtgaattacatgaatttcatctttcagtttctcctgttttaagaaaaaacctgctctttaaaaaaagttttacacttaaaaaaacttagaatcatcttaagacagtgaatgcatacctctattaggtaaaagtaccagggcatctcagtacctgtaaagttcaccccatgtaatctttgtggcaatcagaaagcctccttgagccctctgtaaggcatccctggttttgagcacttagtataaacattggtcaactcaaaggtgaaggcttagagctgaggaaactggaacttagagaagttgggaaacttggccaggttaccctgctgttgtcagagcaggaatcctacctagctcagttcttttctctaaagtccatgtgcttagcaattgtgctctgagaattgagaatgagaaaaagaagcaaaagcctgatgatcatatatacctttcatagccctctttctttgcgttccactgaactgtctgaaacccttcactgagcaacccaactgttcagtgtgagtcagaagacacaaccaaaaacctgtaagttcttttgtacggatttgcaaaatttatattaatcacaaatcctaattctctattcctgttttctattgctgttgtgatgaattactacaagtgtagtggcttaaaaccacacaaatttatgatcttacggttctgtggatcagaagtctgtgcagatctcactgggtaagatcaaggtgtcagcaagatgcattcattttctggagactttcagggagattcctttttttttgcgccttggtttctagcttctagagggcacccaatttccttggctcatgatcccttcctccatatttgaagccagcagtgtgggacccagtctttctctagtatctctgaccttcccttctgattccctcttctactacaaaggacccttgtgattacattgaccccacccagataatccagggtaatgttcctattttcaggtcagctgatgagcaacttaaattccatctgtgaccttaattccctattcccatgtaacctaacatatttacaggtgttccaaggattggggtgtagacatcttttgggggattatcatctaccaacagcccttgacttactaattgtagtttattgtgggtgaattaatctgaaatctttatagaatagctaaggctatagtaaatacatgtgaaaaatttaagaacaataacaccagcaatagagaagaaaatggagtgaaaagtgaagccactccatgttaacgtgtgtgttaacataaaactacccgtcaacaggtaactttactctgttgttcctaagtttttaatagtagctgtgtttttaaagtttatgaaccaaacttaaatgcattatgagagcttgataatgaaccagatcttagtaaaacagtattttaacatttggatatactagttgtactatgcttatctcagatccctgtaacactggtcaggctacaacttactaatgactacaaagaactatatacacaatcaggtttatttctgtctcttaaagcaaattgcaaataaaattggttactgcttttaaaaaggtgccaaacaccctaattctttgatttctgtttcacaattatagtaatatgtagagcaaaaaagtagtgagttgaaaacagatcagtagcaagaagtcctttgaaaacttgagttcaccatgtcaagtttcatcttatagatagatgcagagcagagtcattgagggaaatagcctaagcactcaaagggcagtgaatccaatataactctaaatatccccaaaatactttttctatgaaataattcagtgtgtgcatgtccatgtgtgtatatatacatatatgttagcccaagctgtcttttaaaactccttattttaagataattttgtcctcaaagtaatgatttttttcaggaacttattatttataaggagaccaaaaaggtaaatattactgcaccttatttttaaaaaatgttccgtttacattcaacactttgagaaacctcatacatttatagtaaaatcttaaaggtctttctgtagccaatcatttttatttcgtactggaaaagcatttcacataggaaatcgtcaacaccattatcaccaggatagcaaaaataggaagcgggaatagtgttgatttgttacatgaactttgcaggattttaaggtgaaaaatatattttcaagtcattttgatttataggagaaaaggcagcagttttcagttcttaaatattgtctgcctattctgcaagcacaattttctgcgtttggaattcaatgatgagcaaaatgggaaagttccaattttgtggagattacaggtagaaaagttataaaatctgaacgtaaaattgcaactgtgaaaagctttaaggcagcaattctcaaacttttgttttcaagaccccttacactcttaaaaattgagaatgtcaaagcttttgtttatatggcttatatcattatttagcatactagaaaatcaaatgataaacgttaaaaatatttgttaatgataatctcatctgttaatgtaacatttatataaaagttaacttccaaactaatttagtaagaagagtgtcattgtcttgatttttgcatatttccaatttctgacttagggctggattctcttacctgccctgcattcagtgttttgtagtatgtcattttatttgaaatatatgaagaaaatctggctatatgtgcatttgtttttgggaaagggaggactctggattccttgaaaagatcgcaggggttcttggaccatagtttgggaagtgctattttaaagaaaaggcacactttattatgagagaacacatggccgaatatgatgggagtgtggttcaggcagtttcttcttttgtaagctttcataaaacagccttctttttatacataaagtatgttttctgaaaggttagatttgattaccagctgccaaaaggaatttcttcagagcatttatccttatgatctgagtatctccaaagttaaatgcaatagtatggagcaataccagtttaggtcacagtttttcagcaaaatttgatggagttgttttaagtggtttccgttaaaaaaacaaacctttgaatcaatgtgtaaacattctgcaattctaccttatattctaccctcacacttcctagtattaatatgaactgtatgtttggaaacatttgtgccctgtcaaatggtgttgacattcttaactctggtcgtaggtccttttaggaatgtctgtagccttttgattggaatggagtggctaaaataagacaaaaatctctaatagtttttgaatgataaattactacctcgttactttgtatagactggaatctgcacagaaatgtgtattcatcagcccttattttttgtaaatcttttctctaattacttgatgattaatttcatatttttccttttgaacattacatgctgcttattactaagatttttttctccagatgacctattctacctgttagttcaccaagtcagtcatatgttgccggttgccaagtggcaaaattatcacagatatcaaactcagaaaatgtcaggtaacaacagcagtaactgctttccaacctgcagtggtggactgggagtgggaagtgaaagttctgttcacaattgtatcagtaactgttttgggaaaaataatattttttcaagttatgctatcaacagtactaaattgttaggatagtaattttccatggcattgtttagaacctattttatgcccaattttgagatctgtatagacttgaaagcagttaaacacaaattaaggttaattttttaatttgatcagttaatatgagtacatggttttaaaaagtcaaatagttctacaaggttcataagcaaaaagcaacaggcttctgcactactcttctctccagaggcaaccatttttaattcttttagatatttaggatatttgccttcatgtttgtgatatgcatatgctatgttttaagttgcacatattgtaatatctattgatgtcttactataaaagataaggatttagctcttaccagcctgttctcctctcctctcaccttctctttctacattcatgcaataatttttggtttaaatctatgttcaagttttacattgttgaatcatataaataagttgtagctaagccatgtaatacaatatggttacattgctttgtataatttttatttttcctttgattaataacttgatttttttcttatttgtacctatccctaattcattcccaactgaattttaaacattttaaagttcagcttacacattgatttttaaaattgtgtttacacgttgattttaaaatgtaagcattagggataggtaaaaagtgaataagcaaagtgaataagcacattctgtgaataagcactgaactaatggagttaaaacatgaatcaaaatatatacagataaattagatgtaggaaaaacaatcagaaccttcagtgacattttacaatcttatcaaaaagatatgttagcatttagactatttcaggtaatatagtaaacagttgattccccgtaagcaatgtatcaaagaaataactatcaaaataactgcatttatgtatagtgtgtactaaaatctctagtgttaacttatgtaacctcattttgttcatctccatcataaacattgtatccttctaatttaattagttcaatgttttttggttcctgaaaaaatacaacatctttaattttgccaacaaaattggttttaaaaatctcttgagtaacgatatttacctttctaccatattcaaagccccctagataacaaatgccatcatagtttagagccacaaagtttttatgtggatcaatatcctcggaaagaattagactgttatttatgtaggccttgataagagtctgattttgaattacaactacatggtgccatttattacaacagaatgtgccattgttatagctcataggcacagagattctttctcccaagttaactgctattttcaaggtctgattatggagaccaattgccagaaaatcattttcttcattttgagctattcccatccatacaattagaccttctgttttagtggtactgaaatttaaggatatagtagtgaactggaggtttctcattctataatttggatcaatgtatttaatgtaagaattacccataaattttgcagttgaaaatgaagttttgttttcacaataccttcccacccaacccaaagtacacaggcaactgtaagaaaatgattggtcaggtatacataaagattggtggaggcaaagattattcaaacaggacacagactggttacatgtatttccagcccaatctggcaaacatctgcaagaaaaagttgtgccatttactgtacattcacctccatttctgcatgtgttgtacccacaggctgtcccatcacagtcacctacatttgagccaccttttgctccaaattcagttaattgtaattcttgattatttatgataacttgtcggatacagccttgaaaacctacaggttcattttctattgccatgggatttacaagatttaaagaagatactcctccaatatagaagtctgtatttgtgtccagagaactcattttagtggaggccttttctgttacatttatcccatctagatccaggtagccttctgcaccaactcttcctgcttttattatatgccaagtacttccgtttatagttactttttggagagtttctagaatgatagttctgtcgccaaggttgtagcgaagttgaacggaactatttactaaagagatgcataaaaaatcacctgcaagaaagcaaacagtaagtttgattagcaacagtaaaagtttccattgaaaacttttgctgtttctggccaagttggataagttttagttatggggaaaaaagtaacagatcttgagcacaattgtgttagttttgtttccactcacagagcaaaatgcatatatcctgtattctttcattttgttcagcaattggctacataaattttctctagttgtggacagttctcattgaatgaatatattgtggtagtaagttaaagtgaggtttttcttcaaatgaaagcctgttccttatgataccatttaatggcattcactattgtcaggctaggtacctataaattctctgcacattcctggctcctttcctgtctctccaaccttacctggaatgttctctttccccatccttacactctctttacttcaacaacactgactttgttaattaaggatttcattcgcctgttttctaggaacactccgccaccccattccacctcaactagataactcctacctgtccttcaggtttcagatcaagtgtcacttcctcagagaagttttccttgatttcccagagctggtcaggaatttttttctgtcagtgccttaatatcactaggtttccctccattacagtatatctcattttataattatatagtcgtgtgaagaaataggaacaaataccatccagcatctgaagttgcaatgaggcattcagaagaaaagtaaaggcaattctgcaagcttggaaaaagcatgttcttcactgtaagattgcttgaagaggatagcaaaatgacttattaataatgaaccacgcagaagtctccacgaaacattttcttctccctctgaaatttcccaacctttttcttttctcatccagggatattcggcattatgctacactacttcttcctccctccagagtgcctatttccacacctccctcctgcaaatggtgttctttccttctattctccattgtggtctataccaagccattctagactggttggaatgtttggcagctctatagttcttcacctatcaaactacgttctctagctttattttcctcatagggaatttttagtgagtatactatgtcgttacatatgtgatatttggttaacagctgctttatccactaggttgtaagctttatgagaacagggtctgtgtttggtttggtccaacagttgattcccagcacccaaaacggtatctggcccataaatagatgctaaataattattaaataaagaaatacgtttgtagggttgtgggttgagatgactcagaatatttctcaaataatagttttagcttgaaagcaaaaacttttttcctataatgacatgaaaattgttttaaaaattcataacaaagaaactcagtttatttgcataatttctaacatgtatagcatttttaactataaggaaagagaagcaacattataaactttcagattaggaaagaaaaaatatacattgggttataccaccaaaaactggaacaagtaaacataattgataattaagttcaaaaaatttatagcaacctaaatatactttgtggcctgcaagtgaacacaaaccagttatcttttgcaagattatggaggaagcttttcttgctccttgtgttgtagagtgttcctgtagtaaacaattttatagtgaagagctacattagaataaaaaatatctaagaaatgattaggaaagctgaagctgtgatctatactatcactggtcatgttgccaaccagaagaaagagcaaggatagcttctgcgaagaaaggattattttaactcagctagtatgttcttacgaaaaattgacaaaaagttttctttctgtggctatggaagctaaaagctgtattagcttaaaaaatcatagacttttaaatttcattgcgttaggatatgatgctctagttatgggtcataagtacacattggcattattattattattattattattattattattattattattattttgagaccagagtcctgctctgtcccccaagctggagtgcaatggtgcaatctcggctcactgcaacctccatctcccgggctgcctcagtttcccgagtatctgggactacaggcactggccatcacggccggctaatttttgtattttgggtagagcgaggttttaccatgttggccaggctggtcttgacctcctgacttcaggtgatccgcccacctcggcctcccaaagtggtgggattacaggcatatgccactgcacctggccttggattcgcattagagtaagaaaatgtaatgaacagtccttacaagaaacagagctcaaataggataaagatcataaatgaattcactttggctatttaatgcccactcaaccatggctgaggcttctcccacctttgttctgctattgtttctacctcatcatctgctatcccaccgtgctttattatagataagagaaaccttgtaggacctaatatttgtgaagagactacagaatcagcatatcaggggaattgtatatacatttttttctgtagaaaaggaaagcaatggtaatttaaacttatttatatatttttaatatagtttaattatttgagtatgttttaacttcacattgcaatgactaggcctttttatacacgttgggaggattataactatatcagatgaattcaggctttgattaatttgtgcttaacaaaatgttgataatttttatatatcaaaaatcttttaaaggtgttaaatttttagcagaaatagatgaaaagggaccagagtcttatttctttaaaatatctttcaaaaatcagagatctgagatcatctagtataattttcaagttatcattttgttttaaattttacactacttgagagtactcaaattattaacctctaaagagatacagaaaccatgttaatttagaatttggttttcaatatgtgaaaaccacattggctgcttttattaaaatttttggattttaactttgtgtattgtttggttagtttttactaataggtcctcttagcagaggatcaactatgaagacttggttaatgtttacatcaggcacagttcttagagaaggtacaaagtacaggactgtcagctgcattttctgcaaccttaaataaatgagagacttcaaataaacttgttatatcacttgattactaaaaaataagtttatgcctttcatctgataattgtttttggttaatctaggtttaagcatgtagaacttatatttttaatatttaaaaattttcatgattttcttatataagtgtcaaatgcagcatcaatcgtgtgaaactaatgaatctctgtaagtagtgtctgatggcataaaaaaggaaactcttgattgtcttgaactacatgcattgaataacagatgtaagaagatgtgctcttgccctcctatgtgtattagtgtgtatgagctttatatttcatatacacaaacaaatatgtatcgttgtactgattataaaactgtagtacaatattcccagccagtcacaatcctgaatataccttgattttctgccctcttacataggtcccacttaacattaattttgagttttattagcaatataactgaagctgattgtcttttaatgtctcttgatttataaatagaaaatttatgtttgtatgtggttctcctatttgacattttcacagggagatttaatcatgaatttaaaaccaaatatctcaggagaacaaatttcttctgagctgtattttatagctcaattgtactttttctctttgaaattattttgagggtatttcagaagtgcattgaggtggaaccactttggtcgaattccctgatattcttatcatttagaagcaagtcaagacacttctataagaactacttagattatgatcattagagcaccatttttgctaatgatgtgaaatttagcaaatgtaattatttctcaatatcaaaattgtttctcattttctgagagacaagatcaaagaaagtcaaatgtaagattttaaaaatacttagcaatagagatgtaactatatgtgcagatgtctttgtcagaattttggagaaatgaatgaaaatggatatcaagggtaaagtaaaacctaaaaaattaaattttaaaacactaattggatactttatttcatattttatgataaatatgtaccttttaaaatcctaaaatgtttttgtaagcatttcagaacacaaatcctgggtttactgtttggatgacagaacaacttaaagagaatttttggagctataaatgtggttgaatctacaggaaatgtatcagccatgccttccttttaaaaaatcttttatatgcatattttgtctcctttgacatagtactatcgtgcatggctttaatgtcttttttgatggtattgtttttaagttgagcatatactatatttagattttgcaaactttaattccaacaaatctgttgctattttattagaatatctagggcttctaaattcatacgcatacacttgcagtgacaatagaacataaaagcatcaaatgtttacatatttaaatactaggtgacacaaacactatcatacattacttaatagactattaggaattcattctgcaaacaaacagcctgccaatcttacctgattgggcttttaagtgttgtgcagcataaaataggataccatctgcagcgagaggctgaaactgcaattgaatatgtgtcttttttcgaacatgaaaggaagcaaaagacatccaggataactcattgcttctgaaagatggatcacttatggataaagctgagggaaggagagaaagagaactctgggagttatctgctggattaaaaaacattgctcataaatacaataaactgcttatgtaattttgtaatttcaggatttatcgcccaagagttgcttgtaggtgagtacatcaaaccttggtaactttgtgagtctgttttaattccactaactttagggttttgtaacgaagtcacttactgaaaagccttctcttgcttctggtaactatgcctttttggccgatactatctgacacaaatcttctgctctagattgcattatatagagggatcagatgcatagctgaaattcttggaaatgtcttacatttataatgctttcagaaagttcaaatgttggaagatagaggacaacactttataagttattcttcagcctctatatttctgattcaaatacagagtataattgagtcaggatatattataaggcataatatattgatttttttttttgcttctgtgtataactgacccaatgggaattatgagagggagatggaaagttctgcacatttggccagtttttatccctatgaaatctatattccttcttcttttcttataatgttacagtgcttcttagagtgcgccctggttcaggacatagcttagccattaatctagttatttagttttctccctgctctgtggaccaggcgtatgctaacggctccttttactttagattgaataattggtaggtgtttatccaagaggtgttggcatttgctgattttttttaaaaaactgtactcattcatttcgacttattgctattcagaagggtagaggttagaatcacctgatcgtgttgccaagaatgcaaagcgctatacctcattcctagagggcctgatttattaaagccaggatggaggctgggcacggtggctcactcctgtaatcccagcactttgggaggctgaggctggaggattgcttgagctcaggagtttgagaccagcctgagcaacatggcgaaacaccatctctcaaaaaaaaaaaaaaaaaaaaaaaaaaaaaaaatatatatatatatgttagctgggcatggtggcgaatgcctgtggtcccagctactggggaggctgaagtggaaggatcagttgagcttgggaggtggaggtgggggtggaggtgggggtggaggttgcagtaagctgagatggcaccactgcactccagcttgggcgacggagtgggaccctgtcgtaaaaaaaaaaaatgctgggatgggattcagaaagcatccccatttttaataaaccctcctggtgtttctgacataggggttccttggaccacattttcataaaatctggttaaaattttaagaacacaagggtgatttaaaatgtgagtgtccttttgaaactttttaaaatattgctaaattaatacatgtttattataagacaaacaatataaaagtgtataacattttttaagtgaaatttcattgtttctcctctcttaatcccaagaattactgttaagtttattgtacatgtagccagactttaaaaaaatacacatacaattaacatatgcatatatctaatacttgatttattttaaataaaaccacattttatataaactatgcataagtaattgcttttttccatctatctttgtgaaactgatattagcatattttgcctatcacttcttttaaatacatggaaggtatttttaaaagtacactttattttttcagagccattttaggttcactgcaaaactgagtggaaagtattagggtttccatataccccttgtctcaacacatgcgcagccttctccactgtcagtattgcccactagagtacatttgttaaatggatgactctatattgacacatcattatcacataagttcatcatttacataggattcactcttcacgtacattctatggattttgacaaatgcgttgtgaaatttatttaccattacagtatcatacataaaatcatacatcatatcctctttgcttgcctatttgactctccctccaccctggcaaccactgatctttttttactgacttcatggttttgccttttccagtatatcatatagttggaatcatacagtttgaacacaagttttcagctcctttggacaaataccaaggaacacaattgcttgatcatatggtaagagcatttttagttttgtaagaaactgcccaattgtcttccaaaattgttgtacaattttgcattaccagtaatgaatgagagttcctattgttccatatccttgctggctttaggtgataagtgttcgggttttagctattcgaaaaagtatctagtgttatccaattattataatttgtaatttcctaatgatgtaagatgttgagcattttcatatgctcatttgccatctgaatatcttctgtagtgaggtttatgtttagatattttgcccattttaaaaattgagttaatttttgtgttgaattttaagaattccttgtttactttggatagcagttctctatcagatatatattttgcaaatattttctgccagtctgtggcttgtattctcactctctttcatgtgtctttgacagattagttttttaattttaatgaaatctaatttatcaatttttttctttcatggattctgcctttggttggcatctagaaactcatcatcaaactcaaagtcatctagattttctcttatattttcttctaggagttttatagttttttattttacatttaggccttgaatccattttgagttaaattttgtgaaagatgtcatgtctgtgtctagattcttttttttttttctttttgcatgtggatgtccatttcttctagcatcatttgtcgaaaagattatcctttccccattttattcttcttcctcttttgtcaaagagcagttgactctattttgtggcataatattttataaaatggatataggatgatttccttagcagttccctcattgaagggtaactaggctattttcagttgtattccatttctcctggtttcccaccctatctctctagcttcatgtgcccctgtcttataaattttataattcctcagggctttccatagcccatctctcttcttttctttccattagtgacctctcatctaattccatgactttaagaaatacctatacatatgataactccttgaaaatttacgtctatctaaacctcttctgtcagcttcagttttatatagtcatctctcttattgattatttgttttggctatatgagttatatcgaacttaacatgtttgaagttgtactgctgaaagatactcttccctcagccttcctcagatcagcaaatggtcccaccacccattcaaagccccatgtagaaacttggtaatcaatttgattgtgctgtttccaaaatttcctttatgtttcccaatataatgcattaatagattatagctgcatgatatatttcatatttgccccatctttctattaccactgccaccatccaagttgatgccactatcaactcttgattagaccattgcaatgtactcctcattgatctttttactttttgtcttaatctcttcacatacattttatatatctgccagagaaaccttttgaaaacatcaattcattgccctctttaaacccttcagggattttacttagaataaaatgcagattctttaccatagcctctggagctttgcatgatttggcctcctgttaaattcccaacattcccaccattgtgcatatggtgcactgcataaccccaaggggaagtcatcacattgtaatttatgtgaatagtgttccctggagatgttcaatgaacaatctacatggaaatatgatgctacttttcctccttttctttaaacttcagatgcactggcttttactactggatttgtcatagtttgattatcttagattaattataccacaatttacttaaccactgccatgttgccatgttttgagttgcttgaaattattttgttatcgtctgggcatggtggctcatgcctgtaatctcagcactttgggagggcaaggtgggcggatcacgaggtcaagagatcgagaccaacctggccaacatgatgaaaccccgtctctactaaaaatacaaaaaattagctgggcatggtggtgcgcacctgtagccccagctattcaggaggctgaggcaggaggatcgcttgaacttgggaggcagaggttgcagtgagttgagatcgcaccactgcactctagcctggtgacagagcaagactccacttcaaaaaaaattattttgttattactaatactgataaacatacttaattatatctcgttttaaacatgtgagaaatggaatcgcagtgtgatggtctgtgttcatttttagagttaatagatgccaccaaactacactctaaagtgtccacaaccagcagagggtgacagaatatccttatatatatcctcaagcacacttgagattattgaaattttaagtttttagcagtcataatgattccattttattttaatttgcattttgctgattacaagtgaagttgagtttctcgtgtgaatattggccatttgtgtttttctgtgacttttttgtttatgtctgttgtatgtttttaaattcgatttgcaatttttaaaatgtcttctgagtcctaatcctttcttatatctattgcaagtatatcctcatatttgtcatttttctttcaactttacttatggtatgctattcaaaatttttaagtttgtatttaccaatattcttggtcttttacaatttacttgttttgtcttatttaaaaacattactcaacacatagttatgtataatcatctatatttttccctcagagattctagttttgcattctatatttttttaccataaatttgtatgtttttaaatttataggcctttaacttatgtggctcatagtattgtgaatagtttgagctagaaatcaagctttatgttataagcagatagctaatatttttcaaaaattaatagtttgtcctctttgtttgtatttgatacacacttttagcatcttacaagtaatattttccctctccctcttgaggaagtgtttgtaggaaatattgaacagaatgaagaatgcagataaaaaacacctataaggctaggttttgtggtagtacctatttggctttgctgctttcctttggctggatttaacatctgggagggggggtctcaagaatggaagagttcagtcaacaacagcatgatgagagggttccctgttacccagtggggaggagctcgaattgtatttcaagaggaagcttttgctgaaactattgctgatactgggtcagtgcaggagttgagaattatctgtgcacatgtgagcgtatcataaaacagctgacctcctaactcgtgcttttccaaagaagtgacacatgctgaaattatatgtaaatgtcactgaactaaacctcaaaagaaatgaattttattaatagctctgacattgtatgttttgagaagatgctcaatacatattttttatataacaagaaaggcttcagctctaatagcttattatttgattaagtattcagtaacaaagtactggggaggattgcattttctaataataatacacattcaaaatattggtgcaagatgtcatttcaaaaagaggtacatttttatttagcagcttcaaggataaactagaacaggaaaaatgactatgcttagtatgactcaaatgtttattttatagattaaaataaagtcaagagaaaaattgaggtggacataccagtgattagtcattgagatacgcccaattatttcttgtatgtctatcaactcctaaaaatgatcactttgtggtgaaaatattccacatgtattctgaaaccgtaaattaatatttcctgattggctatccatcttttagatttagtgaccattggcaaccctccctatttcaccataggcaaaggtttgtgccaacacgttcactaggttcacagaagttgaagtattttggctacctgtccgggacataacagtaaaacaaacaaaaattatttgtgctgtcatccttgtggatggaaatagtaaattaaataaacatgttggtaaactaaatatatgatgtatgtttaaatagtgaatatatgttgatacatcttagaaaaacagggaaaggagaaaggcatgtatgcatgtgggggcaggaaaggcattatgaagaaggtggtatttgaataaacacctcaaggaggtaaagaattgggccaagtggctctttgaggatagagggaataatgaaccctggggtgatagggttcctaccatgattaaagaacaggaaggagggcagtgtgactggacgagtgttaaggaaggggagagttttaatagataaagtcagagaggttatggggaccagatcacattctcaaagactgggaaggttctgagactttcacctactggctagctaacttactagcctgcaacttctcttcttttccttttaatttcaacttgtattttaggtccaagggtacatgtgcaagtttgttatatgggtaaagtgcatgatgctgaggtttggcgtacaattgatcccatcacccaagtagtaagcatagtacccaataggtagtttttcagcccttgtgcccctccctccctaccccctctagtagaccccagtgcctattgttcccatctttatatctgtttgtactcagtgtttagttcctacctataagtgagaacaggtggtatttggttttctgctcctgtattaatttgcttacgataatggcctccagctgtatctatgtgcttgcaacattttcaatgatgctagtaagagacatgaaactccagagacaaaggaaagtttattacagcattagcagtagccaaagtatcagcattttttactcaattctatgaacctcagttctctcacggaccacgttataaacatgcattgggttgcttggggaggaagtctgaggttagagatccaaatatttttataatgggcagtgagcatgcttgctttttgctccaaatgaagacagtatctccatcttataaggcagtaagcaaactggcttcttgctccaaaggaagacattatccctgtcttccaagaatattttctacacaaacatatttgaaaagatagccaagaacaaaaacagccagtacctttaatcagcaggtggaggcaattgtcctaagcaaattaacacagaaacagaaaaccaaatactgtgtgttctcataagtgggagctaaacattggatacacatggacataaagatgggaacaattgacactgggaactacaaaatcgggacgaggcagatgggagtaagggttgaaaaactatattgagtactatgctcactacctgggtgactgggttcaattgtacctccaaccttagaatcatgcagcacactcttgtaacaaacctgcacatgtacctcctgaatctaaaataaaagttgaaaaaaaacttgtgtagaaacatgacagaccagtagaaaattgtctctctacatattatggctattacatccatcaagactgtcttataagaatgagatgggaaatcattggaaagctttgagcagaggagtgtcatcatctgatggaagttaaacaatatcgctttggttgctgcactgagaatacagtgacgaatgcaaatgtgggaacagggcactccctatcaagaggttattactataatactggtaagaagtgatggtggcttgtatcagagaagtagcagtggaggtagtgaaaagtcatatttcaaatatattttgaaaaattgaaagatcacatgtgggtaagaaagaaggagaggaatcaagggtaactatggggtttttgtcctgagaaactagaaggataatgttgtcattaactgaaatggggaagactgtgggagaagcaggtattttggagaagatgtggagctcaggtaggacacatttgagatgtttttaagatgttcaaggtggtggtttagtaggctgatgtatgatctagaatttagtaactaatagatcaagcaacagagatcggtaaggaatttaggagatttaaacaacacaatcaacatgtttgatatcatggacatagacatagcatttgaccttcccaatatgcattcttgtcaaaaacacacaaaatatatacaaatatttgctaaatactgggccataaaacaagcctcaaaaatacaaaagaattgatattatatttacatttacagacttgctcaaagctatgattcagaggaaaaacatgcttactctgcctgtgcatcagtagcaggtagcacgaggccttacattgctcagtttaatttgtacctttgaagcttttgttttgttttggtttctctgtctacaccacgtttgctgtgtctgagtttacttttgagttgctttaaaaaatcattttgtgcaatggaaacaatggcggtttgagtgttgagggtgcttataagaggtgtgtaataatggaaatataattttttataactcactttgaaacaattttgaacttatagataagttgccataacaaaaagaactctcatctctttcacccagactctccaattgttcctattttattgcattttctcatctttttcgttctctcatttcctgtctctgtcttcctgtgtctctgtctgtctctgtcacacacacacacacacacacaccctacttattattagacctttttcccaacctataaaaacaagctaaagatgcagtgtcctacaacttctaaacattctagtcaatgtttcccgtaaacaaggatattttcctatataattagcactcaaacctccaaatcaggagtcaacattgatacaacactacaatccaacaatccaatccataggcatgattcacgtttcaactgttccaacaaggtctctttttcctttcttgtccaggatgcccttcaggaatgcgttacatttagttgtcatgtctcttcatatttcttcaatctggaacagttcctcttactgttttccatattcttgacagtttttaagaggctttacatcctgtagaatgaccctcaacttagctctatctggtgtgtctgcacgatcgattcaaaccatgtaatctttgtagaaatgacgtgcacatcaagagctacataatgtagacccgtatcactacagttaatactaaacttgattattgagcagatgatcaaatatacaaataggagcaatatttggatttgccaggtttcttcacttaaaattctgtgttttcccatttgtcaattttggcttttgttgccattgcttttggtgttttagacgtgaagtccttgcccatgcctatgtcctgaatggtattgcctaggtttttcttctagggtttttatggttttaggtctaacgtttaagtctttaatccatcttgaattaatttttgtataaggtgtaaggaagtgatccagtttcagctttctacatatgactagccagttttcccagcaccatttattaaatagggaatcctttccccattgcttgtttttctcaggtttgtcaaagatcagatagttgtagatatgtggcattatttctgagggctctgttctgttccattgatctatatctctgttttggtaccagtaccatgctgttttggttactgtagccttgtagtatagtttgaagtcaggtagcgtgatgcctccagctttgttcttctggcttaggattgacttggcgatgcgggctcttttttggttccatatgaactttaaagtagttttttccaattttgtgaagaaagtcattggtagcttgatggggatggcattgaatctataaattaccttgggcagtacggccattttcacgatattgattcttcctgcccatgagcatggaatgttcttccatttgtttgtatcctcttttatttcattgagcagtggtttgtagttctccttgaagaggtccttcacgtcccttgtaagttggattcctaggtattttattctctttgaagcaattgtgaatgggagttcactcatgatttggctctctgtttgtctgttattggtgtataggaatgcttgtgatttttatacgttgattttgtatcctgagactttgctgaagttgcttatcagcttaaggagattttgggctgagacaatggggttttctagatatacaatcatgtcatctgcaaacagggacaatttgacttcctcttttcctaactgaataccctttatttccttctcctgcctaattgccctggccagaacttccaacactatgttgaataggagtggtgagagagggcatccctgtcttgtgccagttttcaaagggaatgcttccagtttttgcccattcaggatgatattggctgtgggtttgtcatagatagctcttatgattttgagatacatcccatcaatacctaatttattgagagtttttagcatgaagtgttgttgaattttgtcaaaggccttttctgcatctattgagataatcatgtggtttttgtctttggttctgtttatatgctggattacatttattgatttgcatatattgaaccagccttgcatcccagggatgaagcccacttgatcatggtggataagctttttgatgtgctgttggatttggttttccagtattttattgaggatttttgcatcaatgttcgtcaaggatattggtctaaaattctcttttttggttgtgtccctgcccggctttggtatcaggatgatgctggcctcataaaatgggttagggaggattccctctttttctattgattggaatagtttcagaaggaatggtaccagttcctccttatacctctggtagaatttggctgtgaatccatctggtcctggactctttttggttggtaagctaattaaagtgaagagcttctgcacagcaaaagaaactaccatcagagtgaagaggcaacctacaaaatgggagaaaattttcgcaacctactcatctgactaagggctaatatccagaatctacaatgaactcaaacaaatttacaagaaaaaaacaaacaaccccatcaaaaagtgggtgaaggacatgaacagacacttctcaaaagaagacatttatgcagccaaaaaaacacataaagaaatgctcaccatcactggccatcagagaaatgcaaatcaaaaccacaatgagatatcatctcacaccagttagaatggtaatcattaaaaagtcaggaaacaacaggtgctggagaggatgtggagaaataggaacacttttacactgttggtgggactgtaaagtagttcaacccttgtggaagtcagtgtggagattccttagggaactagaactagaaataccatttgacccagccatgccattactgggtatatacccaaaggactataaatcatgctgctgtaaagacacatgcacacgtatgtttattgtgacactattcacaatagcaaagacttggaaccaacacaaatgtccaacaatgatagactggattaagaaaatgtggcacatatacaccatggaatactatgcagccatgaaaaatgatgagttcatgtcctttgtagggacatggatgaaattggaaatcatcattctcagtaaactatcgcaagaacaaaaaaccaaacaccccatattctcactcataggtggggattgaacaatgagaacacatggacacaggaaggggaacatcacactctggggactgttgtggggtggggggaggggggagggatagctttaggagatatacctaatgctaaatgacgagttaatgggtgcagcacaccagcatggcacatgtatacatatgtaactaacctgcacattgtgcacatgtaccctaaaacttaaagtataattataaaaaaaatacatacagacatatatacacacataaaaaaaattctccattttcccttgtaattcatttctacgtcaggcaaaagtattcaaaaattatatccatatcctgatcctcaactaatctccacccactagcagcattaactttcatcgatgactccagcaggaattaactaccttttggagatcgttgctacatactgattatctacttacatcattcgtgttacgtttattagctggaattccactaataaataaatgtatggaagatctttcctttttctcatcctccttcatttcctctttcatttttccctgcctccctccttcctcccctcctttctatcggtatggtatcattatttttatttaatggattgtaatctattatcataattgttttgtttatcaaattctccctgatttggccagctagagctccttcaagctggttcctgtgtcctcctgtctcaggttatttttctagaagcagactctgggatggaacttagtgtatgggaggtttattggagagtgtgcttggaagcaacatgtgtgagggagaaaacagcaagagggagaagttggcagctgatttcacagggagctctggagctccctggagctctttagagtcatttcacattgaagcaaagtggccaggtctttggagcacccctctcttcctgtcatcttctctttaaacagttattggattaaagctgtcactggtgaggtggtgtaaccttggacaaggcagctctcttcagtcctcgtgagggacttacctttgaactctctgttggcaatattcccaaaagttgaggaagtgagtacctccatttagaaaggggtggggtgcagatctgcattatgtaccataacattcacttcaaggaaattcaacattgaccttgctactattttactttatgaattaaaaagtaaacttattccccccacccccaagacagagtcttgctctgtctcctaggctggaatgcagtggtgtgatcttggctcactgcaacctctacatcctgcgttcaagcaattctcctgcctcagcctcctgagtagctgggattacaggtgcatgccaccacgcccagctattttttttttttttttttttagtagagacggggttttgccatgttagccaggctggtctcgaactcctgacctcgtgatccacccacctcagcctcccaaagtgctgggattacaggtgtgagccaccatgcccggcagaaagtattaattttcttatttatagcacttaagattacatgaaaatattcagcacttttggaaccacaaaaattccaaaaagataatgtgtataacgaagtgtagtcctaattaggttgaaatgctatattccagatgttaattaagaccctgatatggtttggctgtgtccccacccaagtctcatcttgaattccacatgttatgggaggaacccagtgggaggtgattgagtcatgggggcaggtctttcctgtgctgttctgatagtgaataagtctcacgagatctgatggttttaaaatgggagtttcactgcagaagctctcttctctttgcttgccaccatccatgtaagacgtgacttgctcctccttgccttctgccatgattgtgaggcctctccagccatgtggaactgtaagtccattaaacctctttttcttcccagttccaggtgtgtctttatcagcagcatgaaaatggactaatacagatcctgacttttgttttcaaaacactttgcttgaagagctgaatataagttggcacctcccatttctctcacctggtttgaaattcttataataaagctatgtgtttaaaaatgtcagtgtctcatgttcctagataagggatggatctattttaaagatgagatagatgaagaactatttagaatggattctgtgttttgaaacaatgcatagatagttgatacttttattgttatgtgcattaaggttttacagcttgagtactgaaaattctgatgccttttgggtgtgaatgggtctgcctctagaagcagagagaagccacaaataggacttcacagaaaccacaaataggattcaaaggactctgatttagtaagtagcatctatcatcattaaattagctgctcaacgtttcctctgttgttcattttgaggtagaatttgggaaaggtccagggttttcagtgactcataccaagtttttctggcagtgaatcatctttgggagactttagaaatccatataggttaattaagaataaaacgccacaactgctcttcttggataactgatctactgagttctggccaatagcttcagggatggtcagagtaaggggctgtttcagaagcgttagtggttagttttctgagaggaataataactaataattcaagttacttctaaattacacaaacttcactcatgatcaccacttttatggtctttattataaatagaatccctcagagagattaataatatttatatttactcctgtttaacaagtgcagcattaactggccaataccatctagtaaaaaagaaaatagaataggctgattagtgaagtggaaacacttggattgcaatgaagtaccatctgatttatgaaatccatagatttctaaaacaatattttgagtaaagatatgtgttctcaaaacacttaaggataaatgatatggaatatcaaaggaagatgtttttaatatgagcaaaagattgcttcagggagagcacagactggcataatatcaaagatcaagaaaaagattcaaggatttgtcacaatttattgaaagggctgaacttggtaggagtcagccaataagtagcttgattttcccctgtgattcccctttggagatgtctgtgagatc

SEQ ID NO: 60245 - DNA, 533 bp, Homo Sapiens
tttttttttgaggcagggtcaacaaaaacagaagagaacacacaaaacgagagaaaaatacaggaaggccactgtagaactgttaaaaattcaggagctggcaagcaaagacacactcagagcacttctctttgcttccttgccctctgaactgttcaataaatagcgaagaacacaaagctaactgcagtatttgtttcagacctgcttctgctctccaatttaaaagcaatacaggaacattaaatttgtcgcagctgaaattggtaaaggcagacctctacaggtgcttcttgacttacaatgggtttattgggaggggaagatatcgtaagtaaaaacgtctttaatacacctaacctactgagcatcagagcttagactagcctaccttaaacgtactcagaacacttacattaacctacatttgggcaaaatcatctaacacaaattcttttttattataaagggttgaatagctcatgaatttatgggaacaatgtcctaaacatgaaaaacaggatagctttatg

SEQ ID NO: 60246 - DNA, 555 bp, Homo Sapiens
tttggaagggttccaaactcacaaacggagctaaagtgctataaacatatccaggactaagctttgggctccacaaatgtactccatgaaagccatgggcacaggaagtgccactttttatcctgtgtgtgtgcataagcttgtactttaaaagagccttttattacacaaagtgtccatcaactgaacttaccttctaaatattaaaatggaaaccgagattgctacgcaagtgagaggaaaaataaatcctgcttttagtgcgtataaatgtggctgctgcctagtacagtccattggaagtcacctgttgactccttaatgccctcatagtcccacatgttcagccactgcatctagtagcattaggttcaaatggtgactttcccacctctgagaaaaacccaccctgagtgcctagagctccaccatgagacaagtgcatgctgttgggcagctcctcccctggttttctcacctggtttttaacttccgtattctatcatttaggaataaaatcagcaaaagattctgtcatgcatagaaaccagtctg

SEQ ID NO: 60247 - DNA, 530 bp, Homo Sapiens
tttttagtttaaaaagtatatttacaagtattagttgtcggccagcttgatctcatacaaagtcatttacatcctcttacagctaaagttttaaaaaagtatcttcacaaagtaagtctcaggcacactaggggttctatcataaaacaccaagtagatcagaatgtccaaacttactagagaagaaaagtggaattattggctatattttcaaattgcattcaaaggaaatttaagttctgaatttttttcaccttcatacttccaagttaatagaattcaaccagaacactccattccttcaaagcctctagccagacaaagttttactggattacttcttgctttccatggatatgaagcagagtcctggtaggcacattttgcatacctgcaaagatgcagaactaaacagttccatctgttccatattaaaacaaaagtcctgtgaaccttggatggtgagtgtaatacttcagcactagcaccaaagcctcaaatatgaaaagataccaagaacaccactagca

SEQ ID NO: 60248 - DNA, 426 bp, Homo Sapiens
ttttttttttttttaagcgcactaattacgggggtgttttacggttctgagacaatccgggttgctctgaccaattgtgaccggcatttcattgtcaaaaagcaagggggtgggggccgaggagccggcaggggctcggcggtgggggggagtagcaaggttacgctaaagggtacagcagccaccgcgagctgcatctccttccctcgcgccccaaataatttcctgcgaacagagcaactgcaacagcctgctctgaggagcccagcacgactgccctggccggtgcagctcagggtttccaccacgtagaaggaggggagaagatttttaccttaatgctacactgagcaggagtctcagacatgtctcacagcgagagagatcaggaagttctcaggttttttccactttcctttcctctcc

SEQ ID NO: 60249 - DNA, 451 bp, Homo Sapiens
  misc_feature (96)..(96): n is a, c, g, or t
  misc_feature (384)..(384): n is a, c, g, or t
  misc_feature (420)..(420): n is a, c, g, or t
  misc_feature (425)..(425): n is a, c, g, or t
ttttttttgcagactttctttacccgtgcagaccatatggaaaactggccattagtgatgtatttttctccccgggctcctgagccacctggcgtncaagttgctccatctgattcttaaattaattttcatcagttgtaaaactctcaagtgtgcacaagaatgagcctgtcttcccgtgtgaatgtgtaagtacagaaagaaggttttaaatgcacatagacacacactcttcaactgccatacgaagcgtctgcttccccagtcatttcaggaaccatcagattattcacggctgggaggccctgggagtcttacaaatctcgctattgtgggccccggaggttgaaaatttatcctctgtgggagtactcctgtccctgnggacagtgactaggaggtgaaagtcaccccaaccantcctnggcccgttggcccttggccaggccag

SEQ ID NO: 60250 - DNA, 482 bp, Homo Sapiens
  misc_feature (365)..(365): n is a, c, g, or t
  misc_feature (406)..(406): n is a, c, g, or t
  misc_feature (439)..(439): n is a, c, g, or t
  misc_feature (474)..(474): n is a, c, g, or t
ttttttttttttgatgtataccaaatttttattgttttagaatttacaaattctttaaaaatgctttttaaggcatttacctatttactatattatcaatttatctacataaatcacattcattatatttttatttttttagacacagggtctcactcagtcgcacaggctggagttcagtggtgtgaccacaggctcactgcaacccaggaaccactgggttcaactgatcctcccaactcaggcctcttaagtaactagggactacagggcacacgacaccatcggccaggctaatttttatttttttgtaaagacaggggtctcggctttgttgcccggggtgggtcttcaaactccggggncttcatggcaatcctcccactttgggccttcccaaagtgtngggggattacagggcatggaaccactggcccantgcctccaggccttttttagggttttttagggccntatttttt

SEQ ID NO: 60251 - DNA, 598 bp, Homo Sapiens
aacaaagttattggttaggcctaagagacccttggtatatcacctgaaatcttggtggaggttgatattgatttattactctaagtttggtatgcagactgttactggtctaagaatgagataaggagtttgtgccacaacgtaaaataaactaagacactaagcacattgcttagttctactgacatttttcaatgaagaaagcagtacatggatttatattctggttcaggttccttgtgccctagaagaccattaaaaacagtttgtggacaggttactttcagtagtactgctatagttgacaactgccatatccatggctgtctatcaattctttgcatagtcttcttacatttaaagaaatttccattttatgagtttcagcttcccaaaatagaagtcaaatacaaatccccaatctcccttaaaaccagaatgcaggcatgtgacccagcctcctccaatcaaacacactcaaatgcaacttcaattcagaatagagcagtgtaaagaaacgaggttccattctcattgctgtaagacttttagtcgtgtcccagtggtataggtctagctcctgaatcagaaatggtat

SEQ ID NO: 60252 - DNA, 471 bp, Homo Sapiens
ggtcattctagccttttcataaaacaatgtctcttttaaccactacacttatcttattcccttctattgatggatttagtcagcatctttttagacttgaatacaaacgtacccactcctaaaaatgaatgaaaaaaataactgtttctggtataagtgtatatattaaaaaaaatagtgcatgtcttatatctttcatttttcactcaacattttaaaaagagctatgttgttctatacagataagtttatttcttataactgcctgtataatattccatcatacaaatatgacattttatctacacccccaattgcttatttagaaaatctggatattcagattattttcaatattttgttattacaaagaatgctgcctaatatattatttgatagtcccatcagtcaagcctgatacaataaaattttatgcatgacaattactatatgttaagatcgatggtctca

SEQ ID NO: 60253 - DNA, 471 bp, Homo Sapiens
tttttttttacagagtaagacgcttataatatgtgaagttctgtccacagttacctgagatgttagggttagttgagcttaaaatagatacttccaattagaagcagccaaatataattttttatgtgagaaaataactgcaatgctagtatgaccctttattttcctagggctaaagtcagaaaacagaaacaaatataaaagtatcacattcatgtcaatggcttagtgaagacaggaccttattatcctttaaatgctgcttaaaatgctcccagactcgcccgtttatctgctcctcttccagcagagtgtctggcacaaaatggctgttccttcaatctctgccaatccccatccacatctttcaactggcaggaatttccctaattaaatgctacctgcagtatttttatcacactctcaatcatcactgtacttaaaagcttagctcataactgtcttttaata

SEQ ID NO: 60254 - DNA, 428 bp, Homo Sapiens
tttttttttttttttttcccaaatattttcaatttgtgattggttgaatccatgttccggatacagaggaccaactgtaatagagtaagcattcatcatgtatttgttgatttattggcaaagccaaagtcacaaactaaaacttaaaaacttttaaaaatctatgatcttttctcatacatttttccttagccaatagagctctctctctttaaaattagttgtttgtcaacactgctactgtcataaacaaccagaaagctacccttgtctggatatcaaaaccaaacagggggtcggccatggtggctcacgcctgtaatgtcagcactttgggaagccaaggcgggtggatcacttgaggccaggagttcaagaccagcctgggcaatatagtgcgatcttgtctctaggtaaaataattaaaa

SEQ ID NO: 60255 - DNA, 961 bp, Homo Sapiens
  misc_feature (601)..(601): n is a, c, g, or t
ttttttttttttaatctactagggtctttatttggaagttacatatgatttaaagagccatgtatagatgtcaagatcacaatggggtgaactatggtggtttcatcctgtgtcaatgcagctaagctaaaactatttcccaggttctctgtctgacctggttctgggtaatggcttgatcacagacaaatctacacaggatttagaaggtagaagtttagtaacagtcattatgctaaacaggctaacatggggcccgtgcccttggctttctcaggttgctgtgaatctgccaacttgttgggttaagtgggacagtgagcagcccacgctcctgcctctgctcttccaacttccaggccaggaatgtgtgcaactctctggaaaaagtggccaagcggttttcttctgcagggcacctgtcagtgtgggatgaggtcagatagatgtgcactctagcctgtttttgctcgtttctacttctcatcctaccgtgactttaggcagagatccagctttccactgacttatccaccaccttggtggaacctggttagagatttttctcagacctctaacttgctaccttcttgtagaattntacttggtttcttccacattgcttttgcttctcctatccaaccttttatggatacaatagcaaacagttttccagtggttccaacattcattatccagcagtggattggagttcccattatgcaatatccctgacaacatttgagtcttgcagatttctctagtttttgccaaatctggtggcggtaatagtaacctaactgggtactattcttcaggttcctgattaccataaagatgcacagttggttctaagtggcccatggcatttctttcttaagtttatttaaatttctgaaaatgaccttccgattctttaatggaggttagtttctggggtgtcctttgagacccataactg

SEQ ID NO: 60256 - DNA, 429 bp, Homo Sapiens
gaagaccacacctcggtatcaattcagatataatttacggtcaacaaaaactcttaggagactttctcaggttccttgttaagccagttctacccctacctgccccaacccattgtgtgcgaggtttgggtactttctttttttttttttttttttgacacatccttgttcacaactttaaaaatattctttataaaaaagaaaaaaggtcatcctgttatattctatccctgttgcatactgctgagatgttctgagattccaattttgttgccttggtgcctttctcagatcttcaacaatttggtaggcaagctcactataatttcttctaatgcagacataagtattaacactagaaacggaatgtaggccaggtgctgtggggcttctcgtcgaccacattcctgggcgtcagcccgggcagaa

SEQ ID NO: 60257 - DNA, 340 bp, Homo Sapiens
tttttttttttttttttactgaaagagactttaatgtgactttaacagcccaaaggctgttcccgtggcagctgctggcaggacctcctcccaggccactccaagcctgtatttcacaacttacagtgcaagtaagtctggtcactaagctggggataccactgacctggggcaccatagagggcatgttgcattgtctgtgaacacacacgagtgcactgtccaacatacatacctatgatcatgtgcatgtacacagtccccctcatatagcctcacgttacacacccctcacatccatgcaggcgcacacatatgcgcacacacacatgccctcgtg

SEQ ID NO: 60258 - DNA, 520 bp, Homo Sapiens
tttaaagcaaactcatttcattggctccttcctggaacacagtcatctccttctcagttgggttaattaatatacccttcccctacccccataaaaaacacacagacacatacgattacttcttctactccaaagcacagctgcacacgtgtacaacgttctctctctccctcgcagcttgaatttcccaagaataacaggttcaaagcccattgggccctcggtggcagatgcaatttagtggctggtaatcatagaggatgctttcaaaacggagagctttgaggaacttccactgcggaatgttaaagacaaggtgggggcgctaggaggaatgtttcttctactcagaatgcataaaatggcagccaaaaccataatgaagtcaagccctaagctgtttttcctgatatggattgttgtactgttacttgagatacttggacttgatttcccacaatgtttaaggtggctgtgtgggtgtgccaagtgccactcactccaattaaagaaacagact

SEQ ID NO: 60259 - DNA, 431 bp, Homo Sapiens
  misc_feature (317)..(317): n is a, c, g, or t
  misc_feature (366)..(366): n is a, c, g, or t
  misc_feature (400)..(400): n is a, c, g, or t
  misc_feature (414)..(414): n is a, c, g, or t
aaggtaaaaaactgggactcttagttcggtttttagatggggttactaatggtgaccatcattcttccctgaagcaaataaacatgactgtatggaacttcatcatgttaaataacatgctgaggaacccagctagggaaatatcaccaaggggaagatggattgttaatggaatttgaattagcctagctgtccctcctgttgattgtaaataaagcaggaagtcactgccctatccacaccaccaaatgacctcattttacaattgatttctgagggaaggtgatattttaaaagggcatacaagggtgacctgntatatttatataggttgggtaagggagctcattttattttttgaggacnggggactcactctgttgcccgggcttgaagtgcngtgggtgtggatcnccgctcactgcagcctt

SEQ ID NO: 60260 - DNA, 556 bp, Homo Sapiens
tcttttcaatgcattttctttccaggctctttagattaggttttgaaactcagttggccagatgagatttagagtagtgtctatttattgccacataggactaggtgggctctaaaggaaaaaatgatagaaacaaaaatatgacaattttttcttttgttttggtttgttggtgaagtttgccagttgaataatgagggctgggcacagtgggtcagggaaatagggatattgactcctgggagttctcaaactgttgtctttaagatttttttagcaccttcatgcctcttttccttatgatttccctaagtctgtgattaagacccgaggcccttctgtcagcttcttgtacacatcaaggctaaaagcagacatacctacaggagcaggcaggtgacagcacagatgaatgaggaagagggtggtcacctggggtggtctcaggttttcccctccagctgataaatgccaggaggaaacagagccaaaattatatggtgacgaagacactgatattgcaaaagaatctgggtattttagcgaagttgtttgg

SEQ ID NO: 60261 - DNA, 942 bp, Homo Sapiens
atcagtgatgtgcgggacccaggtgcactccatctgcagagatgagacgggaatagaacgaattgaaaaaggacagagagaagatggggctaaaagaaacagaatggatgaacatgaaagccgtgtcttggccatccgccttctctctagtgctgggccagccgcctttgccatcgcgagagcaagggacagggcagatccgtaccagtatgtggtctgaaggaccccgacggcatgggcactcagacacaagtccacaccacagcactaccgtcccatccgtgctcatgaatgtttaatatcgaaaaagcaggaacaactactcttagaactttttttatgtctcaagtaccaatggctgagcattgccagagaaaaaaaaccccaagtccccaccatttattttttacaaaaccatccttttcgatgttctttgggtgaccgcgggctgcctctcttgttccttttcagacatcacttctctggcctctgtgttgtctcttctgggctgtcttgtcctggcaatgacctaaatgtacgaagggcgctgtctcgcgctgtgccattctatactgggtgagactgacgctgcgcgtggttggaatagtctggacgcccggtggggatgctggaaaggcaggaggcgtgaacttccaggtggccaggaggcaatgttgaattccgggggaataaagactcaccgagtatggtgcttccgcttgaggctaggattggcgggtcaaagggccctggagccggggcttacacccaagggacagggtgccgaaaccgaacaatgcctcctgggtcacgggggggggggacacgtggggcggccggaaacaaagcctttatcacagcgaaaccggttgagagggaaaccagaccgttatagagacaccgagggagaggcctcaccccctaaaagatgggcacacactg

SEQ ID NO: 60262 - DNA, 498 bp, Homo Sapiens
  misc_feature (467)..(467): n is a, c, g, or t
tttgcttaaatcagccagtttctgttgcttgcaactaagaactcacgatgttagcagagatcatgtttgtctcattcgacgctgtcaaaaaggttttgaacataatctattgcacctctgtcctacagactgagagttcctcgaaacagccactttactcaatcatgtttatacccttagtgttaagtgccggaagaatatgtactaaatgaatgaatggactgggctgaagagcaatgatttaccaacactggttatagttcatgcagccccttgacctaactgaacacagcattattacaaataagacatgatcccagctttcaggacctcttagatgaggcgcgaaaggcaggtaaacggattttcacaatgccaggtgagaagtgctgtaacaaaggttatgtacagaacagaaggcaaccaattcccagacacgggtcagagaagactctcccagaagtacnactgtatgcaatctggttaagttagtgggac

SEQ ID NO: 60263 - DNA, 513 bp, Homo Sapiens
  misc_feature (272)..(272): n is a, c, g, or t
tttgccaaaaaaatagttttatttttcaacatattttatgtacagtccacatcaattctgttaaattcagggaaggtattaagtaccaatccactttctctctatgggtccaaagtaacttgaaaagatggtatgtttttcattcttgttttcagcataagattgttagcctactgcaatcttgattatatccaggaatgaggatggaaaaccagagtaagcaaagcaagccacttactttttttttttatatccaatgaattagattcatntaaagttaaattttaaaatataatcacaggcagaaataaaaggactagtaccaagctaggggaaatttttaggccaaaaattagattttgtaagtcaggctgaaagagaaacaggtgataaatttctaaaaaggataggagacgaaagaacgaagatacaaggcaatatatctgaaaacagctgaactaaaattactgcggtaggctgcagaaccctcaggtaagttaaacaggacaagtt

SEQ ID NO: 60264 - DNA, 494 bp, Homo Sapiens
acactttaagttctggaggggtacatgtgcagaacgtgcaggtttgttacataggtatacgtgtgccatggtggtttgctgaacctctggttacatctttacagctgattccttttacaaaaaatatagtggaagaactggttaaaagacacctctaggaagcaaaagacaactccgaaatgctgtacattcttttaagagcaattgactccaacaattcaattgcaaggataaaaaaggaggtgagaggaagaggagactgctctagattagacacttgagagagacaacaaattaactttcaaaagatatttttgagacaagtgggatcatactatatggactgggtatcaaggaatcattgttctttttttttttttggagacagagtctcactctgtagcccaggtaggagtgcagtggcacaatcatacttcactgcaacttccgcctcccaggttcaagagattctcctgcctcagcctagagcagct

SEQ ID NO: 60265 - DNA, 501 bp, Homo Sapiens
tttttttttttttttctataattagcctaacgttgaatttcacagatataaagatctaaattcaagttatgcaaacaactaatcaggcgaatagcaaggatgtaaagacaatggaaaaattttgagaatgccaaactctgtgtacacctggcacttccatctttcctgcaactttctgtcttccttcttcaatacagcattccagaaaaactcagcttgcacaccaggccgtctgggcattaatacctctctgcctttgctcatgctatttcctctgttgtgatgcctttctcctttccctgtgtctatctaaaccccagtccactcttcaaggaccattcccaagatgaaaacttccccaatgactccagtacacactgactggccccttttctttgcttctatatgctgtattacaaatgcctaaatgttcacaattgttcattttgtattgctcttacactgaacggatggcttcttttgcccttctgatttttgtca

SEQ ID NO: 60266 - DNA, 515 bp, Homo Sapiens
  misc_feature (134)..(134): n is a, c, g, or t
  misc_feature (327)..(327): n is a, c, g, or t
  misc_feature (330)..(330): n is a, c, g, or t
  misc_feature (515)..(515): n is a, c, g, or t
aagtttatttttaacaacaaaaaaatctgtatttttctcctaaaaggtaccaaaatttgggcaactataaatgtttcattctatacttagaaataaaataaatggtttcttttttatcattatctgaaagaatnggattgtctggcttcttgaaatccatggcctcttactgggacaggaaaggcattggagttatgtccctagactagaaagagtatggttcatgaggtccctggccctctccataactctgcatttggtcactaaatattggtagaaaaagtatttgtccattactttacttgttccaccacctagagccaaagnatntagaaggtaattaatagtgatacggatagaatgcaagccacagtcacctccatccttctcaccatctctcaagcccatgtccttgacctttggtatttacatccatgtgacacgctctacctgaaatgtcacctttttccagcctgtcaaagttattcatccttcaacactgaggcagaaatgcn

SEQ ID NO: 60267 - DNA, 489 bp, Homo Sapiens
  misc_feature (465)..(465): n is a, c, g, or t
taagactttacaaaaatttttattctgtttacacaggaccttgtctcattcaatccttccaattaccaaaagaagcaggcaagacaaactgttacacccattttatgggttagaatgatttactccaagagagatgcacttgcctaagaccatcagctgtagagctgggctaatcccagtgcatgactcttccatgaattgtgtgttaattatttatttattgagagagggtcttgctctgtcccccaggctgtagtacagtggcatgatcacagctcactgcagcctcaaccacctgggctgaagtgatcctcccacctcagccccacaagtaactgggactacatgcacacaccaccacatctggctaatttttgtattttttttagagacgaggttttgccatgttgcccaggctggttttgaactcctgggctcaagtgatccgctcatcttggccttccnagtgctgggattacaggtgtgagc

SEQ ID NO: 60268 - DNA, 467 bp, Homo Sapiens
tttttttttccaaattaatttattttttcttttaccttgattctttccttcttcctaatttccataggcttattttgctatttcttagatttaatgcttagcttactaagctaactagtagatgactagttgcccaccaatccctattctcccctttgtccttataagcagagaaccttgcagacgtaaaaaagaacaagatcatgtcctttgcagggacatggttggagctggaggccattatcctcagtaaactaacacaggaatggaaaaccaaataccacatgctctcacttataagtggtagctaaatgatgagaacacatggacacatagagaggaacaacacacactggggcctatcacagagtggagaatgggaggaaggagaggatcaggaaaaaaacaaatgggtagcaggcttaatacctggatgatgaaataatctgtacaacgaactcccatga

SEQ ID NO: 60269 - DNA, 383 bp, Homo Sapiens
tttttttttttgccactgccacctttattatttagcactgttatgaaaatatttaaaccatgcagtcagaaattatgttataaattttgaaaaggaaaacatataattataacataattgataggatttctcacctggaaaaactcaaaaggatcaaatgaatatctctaaaattaatagatttcaataaattgccaatttaaaataatcgatgcaaataaattcttctcctatatagcaaaaatgaccacataggtaacatattaaaagctccaataagcagtatcaacgtgttccctgtatgtctgtattacctaggaacatatttattacaaattatataggatttaagtaaaactctcttgaaggatatataaagtttt

SEQ ID NO: 60270 - DNA, 599 bp, Homo Sapiens
gaaggagggtgggtattatctcatctaaccatgtgtaaaaacagaataaacactgagctctcaggggtcttaccccttctcgccttcttaaagtcatcctggaatacatccaggatccacggtaaaacagagttatccagaaccctaggaaaccagccattcaagtttcatcatctggcatcaatgagcacatcctatgtgtcagacactgcgcttcaaggatagaaagagaaatgatggacagggccttggggaatcgttcttggacagctgggttttaagagtagacaaacatgaatgcattttttggctttttttccccgtaaaaacactgtacccatcatcactacctttctaaattggagataccaacatatttcaatgctaacttttcatgagtgttcagtgtcaccataatgaaaaccagtaactgatgagacgtgctgtgatctcattacagaggaggctgcgtgtgatctgacactgaaatgcttctggtcagctgcacttctgggctcccatttctgcttctgatcattttttgggtctctttcttctcatctctggtcacatctcttgtattactacaccaatctgca

SEQ ID NO: 60271 - DNA, 430 bp, Homo Sapiens
  misc_feature (330)..(330): n is a, c, g, or t
tggcagatatggggtttcaccatgttgcccagtttggtcttaaactcctaggctcacacaatcctccagcattggcttcctaaagtgctggaattacaggcgtgagagccactttgcctatcccctagtgtcttttgatttcaaaaaagcgcatatccacggagaagaaacgcaattagaaaatgttgttcccaacaaggtctttgagctccacataatctgtatctaagataataccttaacacatctcatctgccttttacatgttcaattagggcttctgcgcattggctggccaaacatcttgagctacttcatgtggttttttanaagcatgaccacgtttgtaggatggaaatatttaggctttgttaccaaatctaagatgccacagatttttggtaagtgatcctaagacaccagtgaatac

SEQ ID NO: 60272 - DNA, 487 bp, Homo Sapiens
ttttttaatcaaatccagatttctgcctgtagctcttcctctcctatcctaccgctccaaatattaactttttgtggcttcggcctcaaatatggaatgtgtcctgaagctttctaaaacttcacacaggcagaaacttgtaatgaggaagaaacaagatctattcagtccagaaaggaacaataccagatgaggcatgagggaggtatgagaaatatccaacgggattagcgtcaaatcctcgggagaccttggcctttggactaggtcaagtctgcccacaaaaataggaaattgctctgggcccagtgagcaggtatggagagccacagtcttcaaaccacgcaaggggcaaggggcgggcctcatcaacgtgtcaacatggggatggagctgctaagtgaggcgctattgccacagcgagtgtgggcgatgacttcctttctgctttcctccctcactcattctcctctctgactctggaggt

SEQ ID NO: 60273 - DNA, 535 bp, Homo Sapiens
tttttttttttttttaggtattaagtaaaataaaataggaagaaaaggggggaaggtaagcaggaggctttaaacatcactcagcccaagcttaatatgaaatatggaaccaaagcaattatgctgataatttatgatgaaagaaatatcatttttaaaaatcaatgattaggacacttcaggaaaaaagtagttttgtgattggaattacctgaattaatgacttaactgtccacttgatctttttaatgtagtaaaaagagagaaccagttttcaaggagacaagctcaattgtatttaattttatgtcctccttacacttcaggcttgtacccagagttgtccctttaaaagtccacagtggcactgccaacttctactgcagctgcctccagccacacagtcctcccctgcatgctgttatactcagttatcaggtagcatcctgctgcctgctcacgtttatcacagagtttcagtctatcctctggacattatccagacactacttacctatctttactatgaaactga

SEQ ID NO: 60274 - DNA, 442 bp, Homo Sapiens
ttttggaaaggaaggaaaagctcctgatactcttcaatgttagtcttattggaagtcatttagaaaatcaatgtggtcagatcctgttgccttgaactttccaatacacttaggatctgacctttatccagtaaagacgggaaaggtgggcagacttgtcaggtggtctaatgtgaacaaagccacagccacggggaagaacaacgtgcttcagaaccagatccaaacctcagcccacctctgccaggtgctggctttcaggcaagactctctctgaagctcgatttgccctttggtaggctatgggctacccagatctgctgcaagtgttacatagaacatttcgtgtaaagcacacggcccggtgcctggctcgtaggaggcactcagtaaacggcggtgatattacagacacaaaacacgaggctgatgtctccctcac

SEQ ID NO: 60275 - DNA, 582 bp, Homo Sapiens
tttggaaatttttcataacaaaaagaaaaaaaagatttctgcattgtgagatacatgttacacaaacacagatgaaataaatagagtagaaaagagtatagtctatgataaaaagagccaagcattaacgcttgtcatcactttctaatctcatgtctgtgcgttcggcaggcaaataactttcttttccagaacagggtaaagcagcagcaatagatacgtgaacctcgtgggatttgacctccaacatggaaaacgctttacctgaaatgcagactacaaatatatgtctctgaatatataacataaaatgtaagacctaatttaatcaatataactctcctggtacacaattctatggagagcaaaacgtttcaaactgggttagagagccacaggttcctgagaggcttatctcagaggccaggggagggtgcttaaaaccgaggtgtaacaggatgttttcagcttcaagcagcatgaggcctaactcagaaaaaggtagaggagaatatttttctcacatgactcatatgacccaaagtcctggaagccagttctagggaaggttgattcagtagc

SEQ ID NO: 60276 - DNA, 625 bp, Homo Sapiens
  misc_feature (98)..(98): n is a, c, g, or t
  misc_feature (337)..(337): n is a, c, g, or t
  misc_feature (543)..(543): n is a, c, g, or t
  misc_feature (586)..(586): n is a, c, g, or t
  misc_feature (594)..(594): n is a, c, g, or t
  misc_feature (613)..(613): n is a, c, g, or t
ttttcggtagggatgagtctcactgtgctgcctaggatcgtcttgagcttctggcctcaagcaatcctcccaccacagcctcccaaactgctgggttnacaggaatgacccatggcctccttccttcaatgatgctgatttcttcggttcagaaattatgtatcacaatctacatgggcctgcataacctttatacataaaaatgcttgtgaactgaaaggtaaaaactagaaataaaatctactacaactataatgtagacaacctataaatttcttataatgagacttgctttataactaacttgtcaccttgttttgactaaacaaagatagtnggataaatttggctaccatggcctatctctctcaaaaccaaactgacacttccattttaaggagctaagtatctctaaagataattaataaaagcaccgtcaaaaaggttaaataatagtggcctgcttgcttttcagagctaatttcatccaaatgaaggcatttataggattaccaaaggtgaaagaagctgaaatactaatcnactggtatgcattggttggtatggttaaatgtaagaaattttnacttaccngactacttataatggggcncgtgccgattcc

SEQ ID NO: 60277 - DNA, 397 bp, Homo Sapiens
tttttttttttttttttacctttttacatatttttttattttccttcagcaacatcccagatccttccaagaagagagttgttgggaggcctcaggtctgggcccttctcagctcctggctctgcctggctgctctgtgctctgtgtcctctcctttctttcgcttcctccaaacattgctccttcaatcccaggagaagtctcctcggatgtcagcgcctctaaagcagcccaaggcttgcctcaattgcatggtttcccgagtcctcagctccagaagaccaggcagatgggtggaccggtgagcagcagggcagcccctgtgcctctgtctctgccgagtcactccgaagcccggcaggcagcgaggaggagggagtttctccaaggacagaag

SEQ ID NO: 60278 - DNA, 490 bp, Homo Sapiens
  misc_feature (485)..(485): n is a, c, g, or t
ctactactactaaattcgcggccgcgtcgacttttttttttttttttttcggcaacagatacaagacaaactaaaacaggttaatccaattaatgtgttttgggtgcaaatcccagtttggtattatcaaaggcatattttcacatttaactatattatcatttcagggattacttaattttcattttcatttctatttcatcctttcttttctggcagggaagcctaagctcatttgtaaaatttttctgtcctctgagcatacaattatattttatccagaacagaagtgcaccaaaagagctgaaagttaaaagaaatgttcagtagatgagacctataatactggttctgattaattaatataatcactctattaattatctatgtttaaaattcaaatttatctatgttggcttattgagcattcttaaagaaaacatacttgtaatatcctacaaccatgaggtggaaagggtcagcanatgct

SEQ ID NO: 60279 - DNA, 470 bp, Homo Sapiens
gctattagaacttattcctacatgtaggattattaaatcaaaagaatatctatatatgtgtagtttatatttagtcctgtgagaactgctggctcatgttcttcagcctgcattctactgaggtgttggggtctttttcttcatctgtaagggctctttaaatagtaagaatgttgaccccttgtcaataaaattacaaatgtattttcccagtttactgattgccttcaattttatttacaagtctctgctatatgttttgtttctatttagtcaaacggatcactttattttctgcttctgatatcatgtctttgctaacccaccctgacactgtaaaaatgccagcctattttccttttgtctccatgtttaatttttaattgagattttaattaaaaaagaacattttatttcacactgacaaactgccattacaaaaaaggaaaaaagaacatacttaagtatgg

SEQ ID NO: 60280 - DNA, 553 bp, Homo Sapiens
agagacaagatctctccgtgttgtctaggctggactcaaacttctggactcaagcaatcctcgcaacatcattaatagctgagagtagagacttgagccaccacacctgactatagggtctttttgaaaggaaaattgacatcatcaaaattttaaatatattcagtctatttctcaaaaactcaaagaatactaataaatgtgtactcaggtatatgtacagaaattgctgtaacattataattttaaacaatttaaaacagactgagtttccaaagttagggtacaatgaaagaaaaggtggcttatttatactctggaatattttccaagagttgaaaaggatgaggatacacacacacacacacacacacacacacacacacacacacacacacacacagtttgggtatccctaatccagaaattcaaatgctccaaagtccaaaactttctgacccaccaacatgactgatgctcaaaggaaatggccactggaagatttcagattttcagatttggagtgctcaaccagtaagtatataatgcaaat

SEQ ID NO: 60281 - DNA, 563 bp, Homo Sapiens
gccattctaacagtgtttattataggaatgcaaagataattcaaaattaggaaaatttcatcaggcaattcacaaattatatttctacatataattgaaggcacaatcatgaaaaacaaagtagctctatatgcattaagtccatgatctattcagtgaaaaacacaagttgcacatgtcttacagaaggaaaacttaacactgaacacagattctcaccatctgttctttgtcctgaggctccaatagaaatacagtgaagaataaacattgtataagcacacaattacaaaaaaggaatggggttaccaacagaagagaattcatcttcattagacaatgacagtacatggaaaatggttaattcatggagcaaagcaataaaggtggaggtcagggggatactgagaacaaggaggctaatctgtcccacagcaacctggaaaggttctagactcagacacgaggtacccccgacagtgggactgataggcaagactgaaaacagagattaagcaaaagcccggatagagaacacatttcacaggccctgaaacacactg

SEQ ID NO: 60282 - DNA, 460 bp, Homo Sapiens
tttttttttcttgctcttattctacctttctttgctttctctctctcttttttttttctcccagttaaggattgtcacagtgtgccgggtgtctttgtaagttcgtccctcgtcttcatgattacaagaggctgatatatgtgtacctgtgcctacaggggaactgaacagggctaagtgagtgctgagaggagctgggggagagatgtgtgctgcagatgaaggtacggctgggatgtgaagctaatttagtgtgtgctttacaaggaatgcacaaatcaacacagcgctcaaattaaatctcttcttgaggggcttaagtatcttcttcaggaagagtaaagcatgtcttctagttctacttccttcccggttagccagctgctggagagccccctcagtaaattccttccagatcgacctcagtgtgggtgagagcgcagtctgtgaccaccagcgc

SEQ ID NO: 60283 - DNA, 329 bp, Homo Sapiens
tttttttttttttttttgcaggatgttgtccaagatctctccccccaccccccagtccccatccctactccaaaaaacttcctccaaagcctagaaaacactttcagaaacattgctggctgtaggctggcttgcagaacactctgtagcaacctaagtcaggaaaacaggctgaacaatgtagtttcaagtgcagaagctctgtacaataagagaagaccgtgtacagacaccaccacccacctaggccccaggagctagactctccttagcactgctctgctgagggcacaattcttttgcaaacacgctcctctcttgtcaaaact

SEQ ID NO: 60284 - DNA, 474 bp, Homo Sapiens
agcattcagtgacatgtaaatttaatttcgtgtcttttaggaaaagcaaaatttgactgcgaagtctcctctggttgcattaagtaatttccagtcatggtagattttagtgatgtcttatttgaccaggtaaaacaagtcatctatttcccatctgatactctctggagccgaattgaaccaagtatcactatgtctttggcttacctcttcggggacccagggactggacccctgagccaacagacctcacgctggcttcgctggcaggagggtctgcgcctggctgtgtccacgccacactggccaacttaactctgcgcttctttgaccagtgaatggaggtagaatagatgatgtaaagcagtatgacacaaaatgttgcatttggctatggagttcgtttttctgctcatatttaaaagtgattgtgtctgataagtaggagatcattttttaaattaattaaaaact

SEQ ID NO: 60285 - DNA, 618 bp, Homo Sapiens
  misc_feature (430)..(430): n is a, c, g, or t
  misc_feature (517)..(517): n is a, c, g, or t
  misc_feature (545)..(545): n is a, c, g, or t
  misc_feature (555)..(555): n is a, c, g, or t
  misc_feature (574)..(574): n is a, c, g, or t
  misc_feature (585)..(585): n is a, c, g, or t
  misc_feature (600)..(600): n is a, c, g, or t
gtcttatgtctctaatctgcactgttcagctcttttaggcactgcaaagttgtcttgaattaggaaagaggtgctagaatgtgggcgtgggtgttgacctacatctgaacaatttacatatgattcaccacaattaaacaatttggtttgaaatagctataattaagttattatcagagaagtatttactagtctagaaattctaaatttatcttcacatacaccctaactgagaaaagggccacattttctgcactctattaagtaaagcaaatgctgaactaaatgcctccatgttaacatttatattgttaagttactgacagcatattctatgaatgattacgttagtcgtttctttaaaaattataggtttgaaatagcaagaaaaatatgaaatgatggtagacaaaaaagagtttcagtttcnaacttctaactatatatatacacacacacatgcacacagaattgccttcccggatgtatagaaattatatacagccatgtccaggcncgatggaaattatgggggaatatccaanttaggatacncgtgccgaatcgccgggtntaaataatacnggtttataatggacnatccacaatcctggttta

SEQ ID NO: 60286 - DNA, 426 bp, Homo Sapiens
tttgagtttttcttttttaatatattttaaatgcttatttatatttatgaaaagattcataatatattgcctggtgataaaagcatgatgtcttataagagtatgattccatttttaaaaacaaaatgcatgaatatgtataaatattaatataacattctcaaagatagctttgaaaatgcaatatagcaaagtatctgaaaaataaatcaagaacacaattgtatttacaatagctataaaatgataaaatacctaggaataaatttaatcaaaaaggtaaacaattcttacacagaaaactgtaaaacattgatgaaataaattgaagaagacacaaataaatgaaagatatcccatgtttgtagcttggaggggttaatattgttaaaaatgtccataacaaccaaagggatctacagattt

SEQ ID NO: 60287 - DNA, 473 bp, Homo Sapiens
ttttttttttttttttttttttttttttttttgagacagagtctcactctgttgcaaggctggagtgcagggatggggtctccgctcactgcaacctccgcctcccgggttcaagcttttaaatacatgtatgtaaaaacaagattgtactgggtctcgaatcctagctgttgttttaacatgttttgcttcaaatcataaactctctttagaattctctagtaagtcatacggaaagggactccaacaaacccaagaaaatatgtaagaaaccagccaaactggttaaaaattaagctccggaaaatttattattttgcttaatatccacgatctattcaagccacaaaagaagtcctttaaagaggaaaaagtcgatgctacatgtgttcaccttctctttgccacctccaccacacaaaagagaaggaaggaagtattaaaatggaaaattatattttgatgtttatgat

SEQ ID NO: 60288 - DNA, 578 bp, Homo Sapiens
aatgatgagattcagaataacttctttggaaatgttatttccttagaaaaagtaaaaaagatggaccaccatttatggtggatctgaatgctcataaagatttatgacagatggacagaaggaaggaagaaaaaaatatgtaggaggttatagtctaacaaaccactgactttaaaaaacaatggcctactttcttacacgtaagcttgtgataaagttatgggatcacctgctaatacattacaatttcatatgcttttatgcagacaaatgactgatcttggcacacttagtggcagaaaaagatagagtaataagggcagcacaaagtatgtggggcaagatacattttaaactatttagtaggcaaaaaatgttctggcttataccaatcaaaggccaatagaatacattgcacaatttcaccgacaataatcaatacaaattaaggcaatactttagtgtattcaacactaaaaacagataacaaacacttcttactttctttttaatggaatttgagaacaaaatttgttggtcccaaataaagacaatgctcacatttcaactagttttta

SEQ ID NO: 60289 - DNA, 445 bp, Homo Sapiens
ttttttttttttgcaggagatgaatctttattgatcccctactgtatgcagggccctggctaaagggaaggatgcaaaggaaattcagggggtcaggttcaggaccaggtgcctggcacagggtagcgcccaaagtggaaattctgtgggtagttaaaatgcccattgtaaaggtgaggaaacggaaactcagcaacggggctgatttgtctgcggcttgtcgcgcggccggtcctcaagttgggcagcgccgcccatggtcttccaccggtcgttgaccatcttccggcaggactggcgggggcgccgggcgaggcgcgccgacacacgcgcgcgctcacacccgcggacttggatactaaactccgcctccgaaaagacctagggaaaggaggccgaactggcccccatataacgcggccggccggagggcatcaaacagccg

SEQ ID NO: 60290 - DNA, 528 bp, Homo Sapiens
aaagaatactgcagactgagaattttgtaattttgggtttgtctgtggtgaattgttattacattgttaaaatagaccaagttttatcaaacttttttctgtaaaaggccacatagtattttagactttgtgaaccctgtggtttctgtcacaactacacaagtttgccattgtagcatgagagcagccatagataatacctaaagaattagcatggctgcgttacaatgaaactttatctatggtctgtgaaatttaaatttcatataatttttcgtgtgttgtgaaatattaatttcttttgatttttttccaataatttttaaaatgtaaaatccatttctagcttgcaagctgtttgaaaacaagccggtgggctggatttggccagtgcatctcatggtttgctgactctgtacaatgtctttattttcatatgctctgctcctttccagttcctgaaagaatctcttgggattctctagtagttgctcattttcagaagtctaattatagcgttgactccat

SEQ ID NO: 60291 - DNA, 537 bp, Homo Sapiens
tttttttttggtcctagataggcttagttgtactattcttcaaccggcccttttccctcaaatggggaaaaatcagaaaccagagagggaatggcgtttccactgtttctctctttgtgactttcagaaccaaggtatttagtactcgatgctgttgggattcacttcttagcttggagcaaggaatcttcattctgtgtgacctaacagttcagaagctcctatcccctcatgagataccttacgtggaagagaaaggttggagttctgcatcgtagtcagcactagcaacctgggtcattcatttaaagaactatctttaatatttactctcatgactaattgcccatgtgcatgtgccaaggcaaaacacaaaagtgactgtttccaaatgactgtcttctgcttttaattcctacttgccttcagttctaacacaaggtccatcctcttctttcccaaaggattgatatcattgaggatcagggctgtgatgatgtcaatgccattggattcatgggtggctatgcagttctg

SEQ ID NO: 60292 - DNA, 515 bp, Homo Sapiens
catctcaaatatatatatatatatatatgaatatccacacatacacactgagtgactactagcacaagacaagacatacagagttccgctctccccaggtacacagggttgagatccaatgggaaagcagtgagccagctgagtcaggggtaagaggagccagtgaccagagaaatgacccgggacatatgaggccagaagccaaaactatggcatcagtagggagactgcagaaggcggcagggtcctggatcaccaaggaccttgaaagcatgtggaagactttgatcaatgggggaatcattaaggggttttgcattccggaactatcatcagcttcagcggggggcagggggtaggatagaggcagggaggcaggaagttctcgcagggtccaggcaagagatggtggagtgtggtcctggggaagggggcagtggacggatctgagggaggttcagttaggatgggcaaggattgagatctggctggatcctggtgacaggggagatgag

SEQ ID NO: 60293 - DNA, 569 bp, Homo Sapiens
taaagctatttaatgtcaacatggggaggatcagtaacacattcatcaagtgagttccttggtacagtgctattgagaaggagacttaagaaagattcaaatccctgattataaatatcactacatgagaatactaacctctcctaatatattaaatactatgaaactcaaaccttactatagaaattcaaatatattacgtagaaacaacactaatggctgcaataaaggcagaaaacttgaaaattaaacatgaaatgattaaatcaggattatagctaataaatttaacaaatcttccagagttcaatggaaaaatatatgttcacacactggcttatttgcatactggtcttatacaaatttggagaaataatggagtgttctttctctttctgtgcaaacatttttttgaatttgtcaaacattatttctagactctaagcaagatcaggcctcaactctctatgctttttgaaagactcaagacaaccttaaaattcaatctagtcctatcactactatgtacacatacagtggtgttactaatctggatcacaaaatttcag

SEQ ID NO: 60294 - DNA, 562 bp, Homo Sapiens
aaattttagacacacttaaaggagcccaaaacttttgaattggttgtcctgtagaaaacaagatgactttttttaaaaaaatctcaattttgatattactatcttcaattatacaccacaaaaatttttttctaagaagaagaaagtatataaaacatgaatgataacttaaatacagctggacatttagtgaacagaaagtaagggaaacaaaatgaactaacgcaaatagcatcatcattctctcattaatgggctacattgtattgaggtgattaagtcagtgccagcaaaagaacacagtcatgttatttatgcttacctcctccccacatgtcaaaatatttagtgtctaatacttctcctgtttttccatttgccaaggcaacattgatccctcttccaacattattcttaacaccactcattaaactgaagggggagaaattgaaataaatttagaattaaatattgtacaataacatatcagaaaaataaagtcttgcaaaaaaagttaggaatattatacatattttcaattgttcagtgctgcggaggaaat

SEQ ID NO: 60295 - DNA, 263 bp, Homo Sapiens
tttttttttttggagaaaaggatgacatttattcactcaactgaacacacacacacatacacacacacacacacacacacgcagcactgatggagagtacagctgcttatatattcatctataatagcaaagacaaaagtgtatcttccagaagatgcctctggttgctaaccagtctctgtgaagaagctgcagttacccaggcttctgtaactcaggacattgaagtagtcatgcagctcggcacagtcctctccccgctg

SEQ ID NO: 60296 - DNA, 646 bp, Homo Sapiens
gcggccgcccgttttttttttttttttttttttatctccactagtcagtaagaatgggaataataccgcactagattgctggaatgatcaaataaaacagttagttggaacatgtgatgtaagccatgtaactatgaactgtgattgtgatgatgaggaagtggaggaggtggatggaagtggtaaggatgacaagttttaatgaggctttaaaccctttgtggaaaccatctaaaatcaaacattcgcatgtttttaaatacccataacagtatctagagcagtggttttcaattagaagcatttggaagtatgcacagggaatgggagttacaattttttgatgtcgcatgactgagactactactagaatataatgggcaagtatgccaaaggttctgcaacacgtgggccattcccacacaccaaagaactgtccacccaaaatgccaatagtgtcctgttggaagcactgatgaatgtccaacacagaggaagcattcattaaacatttactaaataaatgaacataacttatactacatatttccttcagagcacaatctcttggaaggctcattcttcttcaccttcccagctccccaacactgaacctgacacacaaacatttagtgagttgtctctc

SEQ ID NO: 60297 - DNA, 311 bp, Homo Sapiens
ttttttttttttttttttcaggaaaatggccacatgtttatttcaggtaacaaaaaagatatagttatgatatacaatgaccatagaatccaataaagcaacttctgcaaatgaatagaaggtactttttctttaaatgaaactacaaaatagcagctggttttaaaaacaaagccaattgttttagatttaataggctaccactggcctctgctaagatccccaaatatattcctgagctcacatagattccagaaagtcaaacttttcaatattatgcaaactttccctatgcatccaaaaaattctca

SEQ ID NO: 60298 - DNA, 450 bp, Homo Sapiens
cctgtaggtcaattatcaatttgcatcctactgcttacaaattcaaaagatcacagcattagtgcatccctttcttcctttgaagacttttaggaaatgactgtgcattatctaatgggaatgttgtgacagtctcccccttccaaagtaggtgtctttgccctaaattctagtgaatatctggaaacagaaacctcgaacaggtttatcattaaaaaggccaggtcagctcagaaagaattggctcagagagaaggagcatatttctttttatctacaaagagtcaatcaaattgtcgaatgataaccatgctcaccagcgtatcttgcacagagttaagaaaggaattatctgtaccttaacagagaaggctacattcagcaatgattatactaactaatcccatggacggtatgtgctccattgagctagttctgctccatttctgg

SEQ ID NO: 60299 - DNA, 456 bp, Homo Sapiens
  misc_feature (12)..(12): n is a, c, g, or t
  misc_feature (14)..(14): n is a, c, g, or t
  misc_feature (217)..(217): n is a, c, g, or t
  misc_feature (407)..(407): n is a, c, g, or t
  misc_feature (415)..(415): n is a, c, g, or t
  misc_feature (421)..(421): n is a, c, g, or t
  misc_feature (436)..(436): n is a, c, g, or t
  misc_feature (456)..(456): n is a, c, g, or t
ccatttataatntntagttttcttttcttttcttttcttttctttttttttttttttctgagacggagcttgctctgtcgcccaggctggagcgcagtggcaattctggactcactgcaagctctgccttccgggttcacgccattctcctgcctcagcctcccgagtagctgggactacaggcgcctgtcaccacgcccggataagtttttttggnataatacttagttttctttgtagctaacttagtcttccaaagtccttcaagtcctctcagttgtgcttcccacccagccagtcatcagataagctgttcttccctgttgctgctgccctgcctgctttctgggacctggcttcctgccttgggagttgggatccctccattcttgaactccagggggccntcggtttngttcantctctagggttgggngaaggaaaactgtcagaggn

SEQ ID NO: 60300 - DNA, 562 bp, Homo Sapiens
ttttttagattttccaatgtattggcatacagttgcttatagtagccacaaaccaatctttgaatttgtgtgttatctgttgtaatatctccttttttaactcgtttttttatttgaatttaaaaaaaatgtttagtctgctgaaggtttgccaatttttaacttttctaaaaggccaaatattttcattaatcttttgtagtttttgttttattttatttttttctgctctaatcctataatcctatgatttttttcttctactaactatgtttttttttttttttgacagagtctagctctgttgctcttattactgccataacaaattttaatcccagcctatctctcatctacatgaccacaaacccctacactatggcctgagagaaaactgctcactaataaccaaaaaactgtttatccctttcaatgtcagtgggctgaaaaaaaaacccaaaaacctgttgatcccaatacactatcctatacaacatataccattgcttttaacaaaaattacaagccaacacatccccttttatctttatgtgagatcttt

SEQ ID NO: 60301 - DNA, 489 bp, Homo Sapiens
tttttgcttggggtgacgatgaagtaaaagtgaaacatatgtttaacactgacacctaagattttgagattataccaattccgtaggtcaacattattggcatgttaagacaccatgataatatttaaaaacttaaaaaaagaaaagtccaccaaatctaagaagcccctttcctctttaatgtccctctagtgccctctattgacaaagcccaacatgttgttcactgcaaaggtgaaagagtccagctcttcaccagctgaaatacatacttcagaagttatttagtcaaagcagagcaagtacgggagggtgaacttggagccaactaataaactgctaagtggcagggttgtttcactatttgttcctttttattggtgggtaatgctccatccagtatatggattttctacattttgtttacatattcagctaatgatggatatctgagttgtttctaagtatcgggtactgtgaataaaactg

SEQ ID NO: 60302 - DNA, 550 bp, Homo Sapiens
ggatattactttccttgaaatctaaaagtctgagaatcatgtaatgaacaggtaaaagaaaatgtaagaacattatttaagaagaccatgtttttgtagaggaaaaaagaacatccaccctttacagttatttatttgtccccaacttttggaattaaaagacctgaacttgacatttatgtatttatatttggctaaacatcttgaaacctttgcaaaaaaaacaaaagccagaaaaaataaaacaaatattaacaataacaatttttgggtgtgaaaattcatgggaaatgtattttttttctgtccactttagtatattctcaggattttctatgaaatgtatacacaacttattcaaaatgaattttaaaatgtaaaataacttttaatatcactacgttttaagtattattttaaacataataattctgaaacaaaatagagaattcctgacaaccaatctcacctctgaactgctcttttttaaggcattggtaagacaatctttgtttttgtcccaaccacttctatctatcctcctatacta

SEQ ID NO: 60303 - DNA, 454 bp, Homo Sapiens
  misc_feature (137)..(137): n is a, c, g, or t
gcatgactaacaattcattcaatgtgtgtgtactgctatgtgtcctcatgcatgagctatgtcaacaaggacaatctactgataagagaaaatgaaaatgtacaagttgtaggagactaaacatggttttaacttantacacattcttctgaaatgtcccccgtgattaagttgtgaacaaatgaacatgccacatgtcaacaaactgaacaaacatggattgttagtgacttagaggtggagggagggctagagagaggctagctgtgttggtctgccaatctcctgtgtcccacactggctacaaaaatacaaccactgggtaggtagggctcatctagaaccagaattaggaataaggattgagaagaaaactcagcaagggtgatgaatgagtttcagctcattgctggagttagctgaagaatgaataggacacagtggatgaaggaac

SEQ ID NO: 60304 - DNA, 462 bp, Homo Sapiens
tttagtagagatgaggttttgtcatgttgcccaggctggtctcagactcctgtggtcaagcaatcctcctgcttcagtctcccaaagggctgggattacaggcaggagccactgcgctcggccaaagacagggtaacataaactttaccctaaatccactgtgcatgcagaaaggggttgactgacgaatccttgtttttctgagactcgacatgcagacagtttgatgctagaggagctccctttcctaggctttgtcatatttctttcccattcactgactgaccttccttgttttcagccctctatttgcactggtaccctttaactcagtagttctccgctatggtattagttgtcaggagtgtccatacttaagtaccttaagttcatgagtcattttttaagcaaacaaaaaagagtagttatagcacttactttcttttgagcatgaatagagaa

SEQ ID NO: 60305 - DNA, 378 bp, Homo Sapiens
  misc_feature (327)..(327): n is a, c, g, or t
tttgtatttttagtagagatggggcctcaccgtgctatccaggacggtctcgatctcctgacctcgcaaatccacccacctcagcctcccaaagtgctgggaccacaggtgcgagccaccacacccagctacaaattttgctttctttgatgttttgattcccaagaaaatagggcagtgggtcccacatcccagatgctttttacttatacaaaattcctactctcattggaacatgcagacacgtttgctaaaaaataaatattattataccaacagtctcatttattgtcacctggattttctgcacgattggctcttcttcgntctttttcttgctttcttttgctcttctttgctgcaactatcttttcccag

SEQ ID NO: 60306 - DNA, 531 bp, Homo Sapiens
tttttttttttttttttccatactgtagtttttgaattttcagtcattcctgcgcttggcacccagtatgcactcaagcaaatgtcagcaatacaaatgaatccaggacttttgactcctaattcagagactctccaactctgcccgaattctggaagacttgcattaattacaataattatggaactattttggagctctacttttgaagctgctttcggagcctgtttataaaccacaaagaaagtcagtcttattaaaactgtcaaacttcattaatgacccaacctgaaaatccataacaatatctaaacatagttttttttttttttttttaaagaaaatctccaaacacatcgagtgctatatgttaaatacctaaagcttttagtatgtcagtcatacctcaataaggtggtttgggggaaaaagaaagcacaaatcgacattcagaggatggtgaaatgctcccatgaagacaaccaagcaaatataccatatacaccttcgtaattcatgatctctgtactc

SEQ ID NO: 60307 - DNA, 512 bp, Homo Sapiens
ccaatgaactcagaaatcatccttttttgtgctgagccctgaaatggtcatgggaggggcctgtccccaaacagctgaagcctgacaaagcctccctttagacagatggagacagatgcccggctgagcctggctccattcttccttcacattctttccagtccacagtgcccacgctcaggctctacatctcctgcccaccccttgagttgagaaggcttgagcttcgctcaagttctctggtccacctacctggagacaggagccctttccagagatgttgggtgtgccacaaaaccacaggtagtctttttcatctcatcacagtggtagaggggacaggaactgggctgcctgggtttgaatttagcctccccatttttactgagattttgcacaatgcaacttctctgtgcctgtttcctctgctataaaatggagatgtactgatgccctctcagggttcttgccaggtcaaatgagtccactcacatattattcagtgcaagcat

SEQ ID NO: 60308 - DNA, 511 bp, Homo Sapiens
acagtagagatgggcacgggggagggtcttgcgatgctgcccaagctggtcttgaactgctggccttgagtgatcctcctgccttggcctctcaaagtgctcggattacagtgtaagccacggaacccagccccatcatgcctttaagtgttcaatgcacagaatagatagaggccaatagtccatttcaatcagattttaaaaaaagtaatgcaaaagatgggagaatttattgctgactgttacttattatgcaataatttactttaaaatacttcaaatataaactgtgtaatggatgtgtgctgtgtaatttaacttcaatcttgttctgggggtaagttagtatttgaagcacctcaatcaggtggctaggaagatgctttaaacacttatctaaatatacgccagagtgttcatcagcataagggatattagtaatttttcactgatgaatgcagcctgaaaagtaggtggttgtctagacttttagaggcaaaatgcatgaaat

SEQ ID NO: 60309 - DNA, 510 bp, Homo Sapiens
tttcttaacagacatattactgtagccacttttggtgttaacttggaccccagttttaaaatgccataatcaagtatttcagtaatatatgacattcattatatctgtagacactggataactgaacgaaaattcatgctgcaattatcaggaggtcaaaggttaataaattaattatttgagtaacaaaaggagattagcagggcctagcctggtgtctaggaaagattagtggacaagaggtcaggaagttggattcagtcgtcctggctctgccattagcccatccctggagtttaaaaaagcaagtctttttaacttcttggagttcagtttcctcacctgtgaaatgaagaagctgaataagctcatcttagggttatttgctgctccaacagtctaatattctctgaggaacaatatgcttgggttcatgggagagtcacttcccacaggaaccacgctgaccagagcacctgattgctagcctctcttctctggatggggtcg

SEQ ID NO: 60310 - DNA, 414 bp, Homo Sapiens
ggcccctattgcaggataaggataaatgaaattatacctagaagtgatttggaactaaccctgaataaatacaaatttctgtataaagtagatgttaaagaaaaaaaaccttgctgtatagtgaattcaagaaagacttttcttctttttgagagagggtctccccctatcgcctgggctggagtgcagtggcacaatcacagctcactgtagccttaacctcctgggatcaagcaatcctcccacctcagcctcccacggagctaggatcacaggtgcacaccaccacatgcagctcattatttattttttgtagagctggggtctcactgtgttgcccaggctggtcttaagctcctggattcaagcgatcttctcgcctcagcctctcaaagtgctgggattacaggtatg

SEQ ID NO: 60311 - DNA, 434 bp, Homo Sapiens
  misc_feature (372)..(372): n is a, c, g, or t
gacacacatctgttcttttaaaaacacttgttgaattgtttaaaaacaccttatttaaaagaacagatgtgtgtctaaagagtaaaaacagaatatcaggaaacaggattttagaagttccttggaaggaaatgtaatacagagcaaagaacattggcctttaagttgaaagacctgggtctagtccaaggctcaccacttccatccaggttgccttgggtaaatgacccacaatcttgggttaccgtttcttcttctgcaagcaggtcatcctaggtatcttccaatgtgccttccatacctaatcatctgtgattctaggtcatctgttgtgactgccaagtagattaaagctactcatcctttagtgantagaaaaaccggacttacagggcaacccatgacattttggacatcactgagagaagtattta

SEQ ID NO: 60312 - DNA, 487 bp, Homo Sapiens
  misc_feature (169)..(169): n is a, c, g, or t
  misc_feature (180)..(180): n is a, c, g, or t
  misc_feature (215)..(215): n is a, c, g, or t
  misc_feature (416)..(416): n is a, c, g, or t
  misc_feature (447)..(447): n is a, c, g, or t
  misc_feature (484)..(484): n is a, c, g, or t
ttttttttttgtatttccaaaaagtactttattggtaaagatattaaaattatccagcaaccatcctttggtataaaaagttactatggtcactaatagtatgacagcctttccaccgagagtctgaggactgcatgcctcaatgaagcagagctattttgattaatgnatgccaacaanaaagtaacaaaaactggatggatgtatgactaggnaaatgatactgatcccatttgagaaggaaaattgatttccatcacatgaagagagcagtaaaatgatgaccaaatcctctcaatattttctctttttcatttatttatttatttattttttgaggacagagtctcggctctgtagcccgggctgggagtgcagtgggcgcgatctcagctcactggcaacctccgcctccnggggtccccggtttcaagcattctcccgccntcaggtttcccagtagctgggggttacagggctgtgncac

SEQ ID NO: 60313 - DNA, 383 bp, Homo Sapiens
ttttttttctttttgctttgttggcttaatttaaaaaaacaaaaaggtcttatccagtgggaaatgtggttgaaattatctagcctgccacgactgaaaacgcacgttcctcctactctcacctttttctttcactccaaattcagtggctccagtcaccctctctgattctgtgggaactcatacaatgtctgtcccgaaggatacagggggcttcccagggagttccccatctgcgggcttgcctgtcgctttactccctgcccagcacacaccctcgaaggctgccgcccatcctcctttccacgcggcttccattacagacacagccctctctcttcattctcagcaccttcgtgtctccacggcagacttttactaaa

SEQ ID NO: 60314 - DNA, 455 bp, Homo Sapiens
tcctcattagtgcaccaatattttgcttatgttctcttttcttttttactgggtataaaatgcgacaaaaagagtattagtcggaataaagtccttcacacacattattcacagtactttcccccccaacacctaggattatttcatgttcaatagtaagtacatgatgatgggaaattttcttaacttgttaccttcaaagggtctttcttcagtcaaacaccctgcctaatggtgactaagttctgcagaagttaaaaagcctttctacaaataataatactgatgatgatgaatataataacgatgactaacattcagtgagtatgtatttatcatgtcaggcacaattctaagcactttatcgatcttaattcatttaatcctcacaaagcattatgaggtaggtattataattatcccccattttataatttttactgagacacgcatgt

SEQ ID NO: 60315 - DNA, 451 bp, Homo Sapiens
gatttttataacaacctgaatttattatagcataaactaaatacaaagctctgaataaataatcgtttttttcagtcatcacatctgcaggtgtgtatgtgaacatttccataagcacataaggatacagatgtcacagacatatttagtgagggaagcccagagtcacggttctctgtgggtaagagctagatgccttgagatgaacatacagggcaccgtctcaaatgatttggactatgtgactgtgttcgtttctccttcagactctgctcaagaaagtgtattgataacaggttgctccgccctcaagtttagggcactctcccacgctctttcatgcaaagttttttaacacctctctttaagaaaattcacaaatcagaagtattaccccagcttcaatctgacaatcaggacccctactctgcccctctttcctaggatctta

SEQ ID NO: 60316 - DNA, 480 bp, Homo Sapiens
  misc_feature (325)..(325): n is a, c, g, or t
cgaagacaactactgtcaaggtcattgatttataagtgaagtcctttcctctggtctcaatctggttttctgccatggtagatataatatttttacattatgcctttcaagctacttgacatcctctgggacacttagtctcttttgtgattgcttaactgagatttactctacaaatcccactggaaatgaatcacctttgggaactgtaatggcagtctggtagtacacctgatgaagtcttatctgaaggccctgagagggagtgacttcttttctgcggacatttcctctagaataagatatactgtgtttactcatattnggaatcgacagaaagcaaataagaaagatgcctgttaagcctgagattactcaaggactggctggtaataattcatgactgtttaatatgtagacccgttctagtgtttctaaatatatccaggaaaagcctccaaagctgtgcagttctccagc

SEQ ID NO: 60317 - DNA, 576 bp, Homo Sapiens
ttttttttggctagtcaagtaaagcagtggggatggagaaggaacaaagaaatctgtaactggttgtgatcacatagttgtaaacactactgtacttggaccagcccctggaagaatattttaaatactggttttttttctctgtaaaactgattcataaaaccatttagataagaaatgttaaaaaatgtagcaaaggaatattaaagacaagattattccctaattagagcaactatagcaaaagctagagatccagggtatcctggcaccatgtcaaagaggtgaacggtgatggttctgttgcgtgttgatcagcggtctggaggtttctggccaggacttcacagcagaatcaccaaggttttttgtttttgtttttaaacaaatatcaatgaggtgcctcagctgagatgtgctaaatcaagagtaccatgtgttggcgccaatcatgtcacctgatgacctagaagtgcacttcagatgttggtgacaaccatccccaccacagacaacatttactgagcacttatgtctgcgtgaggtactgggcgctgggctaagcagcttatgttg

SEQ ID NO: 60318 - DNA, 401 bp, Homo Sapiens
atccagaggcccttattgtctgcttcctttctcagctgaacccctggccccagagcccccagcagggccctctaaggtggagcagctccaagatgagaccaaccacctaaggaaggagctggagagtgtgggaagacagctccaggctgaggtggaaaacaatcagatgttgagtctcctgaacaggagacaggaggagaggctgcaggaacaggaggggtggcaggaggaacaggagaggctgctggacaaggtggaggagctgctggaacaggagaggttttcgggagcaggatgagaggctgtggcagcaggagactctacgggagctggagaggatgctggagttggggtgggaagccctctacaagcagcgggccgagccccacagcggcttcgag

SEQ ID NO: 60319 - DNA, 1556 bp, Homo Sapiens
aataaaattctgggccttacttgttttttcaacgacagttttggtcttcagttaagctgttaggcaattttcttcagtggtatggcattttctcaaataaaactctgcaagagttatcaatagatggtttattaaatcgatatattctcatggcttttcagaattcagaatatggagatgacagcatcaaaaaagcccaaaatgtaatcaattgtttccccaaacaatggttcatgaatctgaaaggagaaaggactatttctcagttagaaaacttttgccgataccttgtacacttagcggatacaatttatagaaatagtatcgggtgttctgatgtggaaaaaagaaatgcaagggaaaacataaaacagatagtaaaactccttgcaagtgttcgagctttggatcatgctatgtctgttgcaagtgaccacaatgtgaaagaatttaagtctttgatcgaaggaaaatagatctatgagactgaaaaacctatttgcttgattaccattcccaatgtgtaaattttgtatatatgtaaagtttcttaaactgtaaaatagcaattcttgttttaatacaaaaaacattatattcaaactgtgtccttaaatgatatttcttcagaatgaaaggaattcagattatttctaggagtctatgaatgttttctttactgcctgtcatactttgtttactgaagtattttgtatggtcatttaaattaaccctctcagttaattgtcccctgtaaacgatgtgtgcagtgtaaattgtgtaattatgcatatatatatttataccaccatggacttactttcacactgggaaatttgtggtgtttttccacagaggaagccttttaacagcagaaaattatccggtagcaaattgtcttagggaaattactacactgttgtaacaaaagggctggcaagtgactaaatgttcattaccttttggttagcgttgctatcactgtagctgtgctgccttaacattgagagttgagttgtggacttagtcattgagtgaatgttgaactttcttccttgaatcagcgttagagtcaaatgtgggtttaatgtgaatgctaaatgaatatgcaacatagtttcaaatggaacatagaaatttcacttttgaaaataataaacccacaacctaaaaaaaaaaaattgcatggttttgggctgaccgtcctgtctcattcatgattttactccctgcccagcttgcagatacatgcatttgaattttagtagtctgtcatatttaaaatcccacatatgtgagttaaatatgcaataaagaatacgccttgctgattagccacacccaggcaatttaatatccatggtcttctataatgtttataccacattgtaaatattcagagaacttgttttaaagtttatgctttctgattctgtgattttcaaaagaggaatttttttggaaattaaggactatcgtttgataattatatatgtaattaagatttagccaagcattaaattaatttttaaatataaaaaaaaaaaaaaaaaaaa

SEQ ID NO: 60320 - DNA, 543 bp, Homo Sapiens
tttttttttttttaacaatggatattctgtaaaatatcctgtacaaaacaagactattgccagtaatgtatacaaattgtctttttgtgtacttccagcataggtttggatatatgaacatttttcttttattgttttatcttcacagaaaataaaaggtgttaatttgctttttaaaacaaatttaattatcacattttaaattactttgtggactgtgttttcaaaactttgcaaattcatctgttacacagaaaattttgacttaaaacatctgctgaattccaaatttctgtaatagctactgtatctgtgataaactttcctatatctttccttgccatttctatggattttataatgaaagaaaaaggcactggagactgaaggcagaaatggttgtgacagtgctgtttggctttttcattcttcaaatgccaagtcatccactttgttttcctgtttaggctttgcacaaatacaattgctttcaggaatcctaaagcagcattttattgagtttgaattattaaaggtacagag

SEQ ID NO: 60321 - DNA, 572 bp, Homo Sapiens
tttttaaatgaaggataatcactgagattattacgatcacaggggaggaggggggaagcacagtcagataaactgagaaagatttgaaatgggcaaaaagtgatcactgggtatcttttcagcggaacttcaggtgttgtctagcacacttttctgggctatctgattctacaggggactacaccttttagtatttttactgatctatttacaactcttaaagaatactgatattactgcaaacaaatcttgtccagttaagacacacctaatcccacactccaccctgcccatgggagaagccagctgtgcgtctgctaacaaattcattttcacattctccattgcctatgtatgtgtctactctttggattttcctttggactgcagtaaccacttactttgccagttaattaattattaattaatgcctaatataaaatctttgacatgtattcatttttttaaaagccaattgggttttccctatctctcctggttgttatttcacactttttaaagtatagagtgccaccactgtgacactcaagggcaagaaaaatcaatctagt

SEQ ID NO: 60322 - DNA, 407 bp, Homo Sapiens
tctaaacagggactactggcactactggcattttaggctgggtaatttttattgtaggatggtcccgtgccctgtttagaatcacaaacaggttcgttcacagccattgggggtgacccttcccagtctttgcacagaggtcataagaggcagaggtgatgcaggcagggtaaggaaacttataaggaaccaccccagacctaaggaggtaccagcacctgcaggaagccttccttagacccccgaagcacagactatccatcccttctccgtggggaactaatgtctctcaaacacagtgtacatatggttcactggaatccccttcttggagctctctccttctggaatattagtttctacatggccaccattatagtctttcactctacagaggagagttgcct

SEQ ID NO: 60323 - DNA, 471 bp, Homo Sapiens
ttttaattggacatactttcaaacaactttcctacaggaggaaaagtctgacagattttcaatgaagctgatatctggaagagcctctacaaagcacaagtcctttgagaaagccggcttaatcttcaacaacacaacataatgtagtggcattcgtccagatactgtgaatgaaggctcattctggctggaacacaagcatcacctgccagtcattctcagacataagacagacagcctaggaggccacattggatccatacagattttgaaaagaaattggtctatcaacatattcagtgtagtctagtcttaattatctacaaatggattattcattttacggatttctaaggccaaatctttaatgcaagaatgactgttcttcatcatcagtgtactctccccaccatcaggtaatataagcttagaaatgcaaatttatttcaatattagtatgatccccaaaaa

SEQ ID NO: 60324 - DNA, 439 bp, Homo Sapiens
gctatgaagaacatacaaagaacaactggcaaaacatgaatgacacctgaatttcagatggtcaaaatgaactggtgttaatctcctgacttttatggttgtattgtggttatgcaggagaatgtccttgctgggaggaaatacactgaagcatttggggatcgtgggtatatcagtttggcaacttactatcaaacagttcaggagagggggaagctctttgtattataattgcaacttttctgtaggtgtgagattgtttcaaaataaaacaaaattatgtatttgaaaaataatcctcatcctcctttccaaacacataagattactgaagttaccttaggtgatagcagccctgggaattaatcatccacagctgatacttggaccaacacccctataagcaacactattccattcttagtaggaagggaggctc

SEQ ID NO: 60325 - DNA, 461 bp, Homo Sapiens
ttgagacatctcactctggcttaggctgcagtgcagtgatgcgatcgtagctcactgtagcctcaacttcccaggctcaagcaatcctcccacctcagcttcccatgtaaataggactacagggatgtataccaccgcacccagctaattttttatattttgtagagatggggtctccctgtgttgtccaggctaatctcgaactcctgggcccaatcaatcctcccgccttggcctcccaaagtgttgagattccaggccaatgttttatttttacacggttagtttatcagagttgcatatgaatagtgaatgaatcaactcaagtccacaaagacactggtagggtagaaaaagtagctggactggagcaagcacagacggacttggacttgtcctatacttggagctagttactgtaaaagtagagcgagggcaaggcatgaattaaaagtagccca

SEQ ID NO: 60326 - DNA, 678 bp, Homo Sapiens
  misc_feature (439)..(439): n is a, c, g, or t
  misc_feature (516)..(516): n is a, c, g, or t
gagacaggattttagatgatcaattttagacttttcctcttctccagtataagcatgtagtactgtaagtttccatctgagtaatactttagctgaatctcagaattttgatatgttgtacttccattcaatgtatttttatttctttgaaccactatttagaaacatactgttcacttttcaagtgtccagagattttcctattttctttccattatggatatctagtttgattccatggtggtgagagaacatactctatatgtttcaaatttaaaaaaaattttcagatttcttagtggttcagactatggtctgtcttggtgtattttccatgaacatttgaaaacactgtattctgctatttgtggatagaatgttccttgtctgcgttttccttggaaagtcttcatgcatcccaggataagattgctaattngcccatcaactggactctttaacaaatgtgactatggaaaaccatgtaagaaactaactcatattataaaaaaagtnttaattggaggggagattattcatatcataaactattactacaagtacctccagaaaatacatatttaattttatttgggaaagagtgtgtattatttttagtttacatgagtattaaaaattacctattttggggaaaatgttaagattttcattatttaa

SEQ ID NO: 60327 - DNA, 498 bp, Homo Sapiens
tttaaagcaaagccttctgctgtggttggagcaaagagagcagcccccacattctgtgagacttatcctgcacaaagagttatgctggtcccccatcccgcctatgggaagcttgaagcccagagagcgacggggcctgcctgcagtgtcctgctaagttagtgccagagccaggattgcaagtaaactcccctcgcagagcctggcctaggtaggagtcaggcacactgggggtcagcacatggctctgctgccagttgggcaagcgacttaacctttctcagctcatctataaagtatagtaataaccctgtctcaacactgttggcacagttaagtgatatgacttggtgtttcctaagaacattaggagctatcacctactaagcatgaaatatgtgccaggtactgctgttaatcacttgacacaccaaccttcctataccctatgttcatgtgggaacatgctacagaggaggaaaggtgcagagaggtcac

SEQ ID NO: 60328 - DNA, 1863 bp, Homo Sapiens
gttgccgggcaacgcgctgtccatgtcgcgggcctcgctgggactccctgggagatgaggccgcgaggtctcccgccgctcctggtggtgctcctgggctgctgggcctccgtgagcgcccagaccgatgccaccccggcggtgacgacagagggcctcaactccaccgaggcagccctggccaccttcggaactttcccgtcgaccaggccccccgggactcccagggctccagggccctcctccggccccaggcctaccccagtcacggacgggtctcactctgtcactcaggctggagtatagtggcatgatcacagctcactgcggcctcgacctcctgggctcagttgctgttctctgtgtctgtgacttatccccagcacagtgtgacatcaactgctgctgtgatcccgactgcagctccgtggatttcagtgtcttttctgcctgctcagttccagttgtcacgggcgacagccagttttgtagtcaaaaagcagtcatctattcattgaattttacagcaaacccacctcaaagagtatttgaacttgttgaccagattaatccatctattttctgcattcatattacaaactataaacctgcattatcctttattaatccagaagtacctgatgaaaacaattttgatacattgatgaaaacatctgatggttttacattgaatgctgaatcatatgtttccttcacaaccaaactggatattcctactgctgctaaatatgagtatggggttcctctgcagacttcagattcgtttctgagatttccttcgtccctgacatcatctctgtgcactgataataaccctgcagcgtttctggtgaaccaggctgttaagtgcaccagaaaaataaatttagaacagtgtgaagaaattgaagccctcagcatggctttttacagcagcccggaaattctgagggtacctgattcaagaaaaaaggtccctatcactgttcagtccatcgtcattcagtctctaaataaaacgctcacccgacgggaggacactgatgtgctgcagccgactctcgtcaacgctggacactttagcctttgcgtgaatgttgttcttgaggtaaagtacagcctcacatacacagatgcaggtgaagtcaccgaagctgatctctcattcgttctggggacagttagcagcgtagtggtcccactgcagcaaaagtttgaaattcattttcttcaggaaaatacccagccagtccctctcagtggaaaccctggttatgtcgtggggctcccattagctgctggattccagcctcataagggtggagctctcccgtgtcagctcgtagcacaaaaggtgaagagcctgctgtggggccagggcttcccagattacgtggccccttttggaaattcccaagcccaggacatgctggactgggtgcccatccacttcatcacccagtcattcaacaggaagcattttgttttgcaggattcctgccagctcccaggggctttggttatagaagtgaagtggactaaatacggatccctgctgaatccacaggccaaaatagtcaatgtaactgcaaatctaatttcatcctcctttcctgaggccaactcaggaaatgaaaggacgattcttatttccactgcggttacttttgtggatgtgtctgcacctgcagaggcgggcttcagagctccaccagccatcaatgccaggctgccctttaacttcttcttcccgtttgtttgacaatgctcagatgcatcagttccttaatatacacgtgaaatttgaaaactgtacattcggtgagattaaattttatatacaactaaaaaaaaaaaaaaaaa

SEQ ID NO: 60329 - DNA, 496 bp, Homo Sapiens
ttttttaaacgagaacaagaatatgaagaactggaaatcattaagaaagggtttcccttccttaaagctcaggggtactattagttaggagttgactaactcaacctgtaaaacaccactcctccttccaaagttgtatatataatattgcaggttaaattactttatgtcaggtcctatgaagaaagatacggtttcagactgaaaacatgtttcacaggtgtttgcttccttccagagcagagttccctattcccctggcataaagaatgtatatatattttgaaatatggctgagaacatgtcattggtttgtgaggcctaaggtgaagcactcctggcagccacactgtgtagtgtatttgagggatcagtcatccctcttgtatgctgggcctggttgccctacctcgaacaagcaccagcttttcacacaaggagagatgtggggctgggagtcctctccccatcctattgcatctcctttcttattata

SEQ ID NO: 60330 - DNA, 569 bp, Homo Sapiens
  misc_feature (430)..(430): n is a, c, g, or t
taaattgagacgggggtctccctatgttgcccaggctggtctcaaaaactcctgggctcaagcaatcctccttcctcggcctcccaaagtgcttggggttacagatatgagccacccaccgtgcctggtcaatgaagccgtaaactttcataggggctgaggacattgaattgaggggcagggaagttggtaagagttgagctctctgtgatgctgcggggaggggagagcatcagggcccctgactgtaagaagggggtgatgaaaccacccttgcagatctggttggggggaaataagcaacattatagtaacattataggaacaacagaagttagagggggcacggtaacgctagctctgagagtctcacgagccttcacctctcacggtcccgacgaggcccgcaacgtcattgtcacgctccttntatagatgacacagtggacacccagagagggtgaggaactggctcaaggtcacacagccaagcagcagcccaagctctcaaccacaggggaaaattttccagacccaaatagaacgtacaaagaggctgagagggtctg

SEQ ID NO: 60331 - DNA, 408 bp, Homo Sapiens
aactctgcctcaaaggaggttttttttttctttctgcatgttctgggccttcctaacagctttctaatttcctcacagaaaatatcaatctcctatgatataagcataattccctgcagttataattaacccgtcataactcatcgtagatgaggttcacaaagtggggagcgcccagcatttctcactgtgtatcctgtttttgaaaacagaaaatcaaagcccatgttgggaaaggaaattaaaattgatcatcctctttctacagaaaccgttttaaccagaggacctgtctttaacattactaacaggtagtgacagggaaaagaaatgatgggtaaaggagcctcttgctcctcttctccgggtgaataggaagcaggaaacaatgtcttctgcccctcgcca

SEQ ID NO: 60332 - DNA, 532 bp, Homo Sapiens
agacctagaattaggaaggagttcaatcgctttctgttacaaggtttttggaccacaggagatgggaaaaacacagtttggaagactaaattatactgattgcccagaatagtctggttatccaaggcctctaaggaatgactgagacagctaagtctctcttcctttttattccttcttagctgtggggaacttcaaagagcctagccatctcttgatgaggttttttcagagagtggttttagaatttagaatggttctttgcaatcaggatcccattccttatgtttttcttgccctggtgaaagggtatttcaaattttcttctggtttcctctaaatttcagggacctgggacctgcatagatctagggtttttatggtttgaatacaaatagagaggagtctagaagttcaaggtgtgtctcactcttccctgcttcatttccaactcttccataggtccccctgtgtcatctgcagtgaacaaacccaaaacacttgagtcttaatgggaattatgcaataggca

SEQ ID NO: 60333 - DNA, 568 bp, Homo Sapiens
tttttttttcacttgaaaattctttatgaaggggctatcaagtgtataccttaatttaacctactcagctgctttcataggaaagtttacttcatccaatttttatcataaatcatgtcttatgatcatgtttgtgcataaagctttaaaaaaacatggagttctgaattatttccttaggctagacccaattctaggaccggagaatatgagcatttttgagactcttgatacaacccacacatagatcccatggatgtgaggggatgcccgctttccctcaacctcacctgcatttggaattgcacaattgctagatgaaagataattcagtacagattgaactcccattcattctgggatggatcagcaggaaattctaagaggagaagctggttaggatcagaaaaccagcgagggccaggtgcccagtagagggcgctgcagcgcatgccggtccttggcctgcaggagcagccagggggcatgtgcctgagttgggcgaagtactggcacaggctgtcctggagagtagggcaaggagagcgtgagggaggcaggaaggtcc

SEQ ID NO: 60334 - DNA, 448 bp, Homo Sapiens
  misc_feature (18)..(18): n is a, c, g, or t
  misc_feature (429)..(429): n is a, c, g, or t
tttttttttaaagaaagncatatcttattttcatcttaaaacagtaagttaagaagagcttttatagtggcaatcaggaagctatagcactgcagttggtaaaaaggcagtcaagactgtgtggctaaatgggcctgtagaaaataagggagagaaacttgtactctacagctgattttaaaagaaattcttatcatccttatatttaggaagagaaacaggaaggaaatatatggataaagttttgtcatttgtaaagtttatgggctataataaatgacggcatccaaaatcctcaataatagtcctttatacatggattgctgatctaatattttgtttatggaacatgtacaatacaacactcacttcctactgtatctccttttataaattcagtacatttctactgagggcataaagtgtttncatttaaggccacttctta

SEQ ID NO: 60335 - DNA, 535 bp, Homo Sapiens
  misc_feature (525)..(525): n is a, c, g, or t
ttttttttgtttttgatatgcagatttaaaaatactagggcgattttaatagatgataaatctccagtatcacaaggattagggaaagcaaaagacctgaaaagtaataccagttctcagttctctaactctcaaaaggcattccacaggtaaattcggtgaaagggccggcaattgttcaaatgtttaaataagaagaagttgtagttctcacatttccagttctcttacaggtgtgtgtatttggaaagataatactctctaatgttggtcttttccattgttcaggtttatcctgttgttaagtaataagcagcaatccaaatacaaacatattgtacaacagctattaatgaacatcacctgagttcagtgtgcctgacagctgacacttagttaatttctccatgaaacaagaacagtgaaacttccacagatgagaaaacagaatcatcagtggcactgggatgtaaacccaagtacctgctttgcatttcatttgctctgtttttcagaactacactntacgacatga

SEQ ID NO: 60336 - DNA, 458 bp, Homo Sapiens
tttttttttttttttttcacagccatatactaagaaatttattttaagaacttggcccacacaattgtgcaggctggcaattctgcaatgtgaagggcaagccagcaagccggggactcaggcaggagttgatattccaggctgggtttcttctctgggaaacctcagtatttactcttcaggctgccaacagacttcatgaggctcctgcattattgagggcgatctccttctcttgcagtcagctgactgtcagtgtgagccgcatctgcagcacactttcacagcagcatctagactaatgcatgaccaaacaactggggcccacagcccagccacggcgacacatacagctcagccatctcagaacgcaaggtggatgggtggaaagggacttgttgtctggcctgaggccctcccggtccatggctcgtggattcacactctgagacctttct

SEQ ID NO: 60337 - DNA, 473 bp, Homo Sapiens
atgacaaagaaacaactttaatacagtgaggatactggggaacagaccagatgtgagcagacagggaagtctttagcaaaactgtggagtgcccaaagcttggcttctgatgcgtggagcctttccgttttgtgttcttcctcctcactccacatcccacccaagaaacctggtattttaatattctcctctttgctccattaaagcatcaaacatattcacacaaggtttacgtgaccaaggagtgcaagatagggattaaaaaatagacttgaaataccagctctgccatctgctaactttctgaccattttgggcctcaagttcctcaccaacaaagtgagaataatgatactacccagcaggttgttaccgctatgtttattagtgttcatcctattggagcaagctgactgctaacaactttaaaatcatgatggcttaacacaagtttgtttctcactaacacagag

SEQ ID NO: 60338 - DNA, 684 bp, Homo Sapiens
  misc_feature (280)..(280): n is a, c, g, or t
  misc_feature (295)..(295): n is a, c, g, or t
  misc_feature (307)..(307): n is a, c, g, or t
  misc_feature (340)..(340): n is a, c, g, or t
  misc_feature (386)..(386): n is a, c, g, or t
  misc_feature (532)..(532): n is a, c, g, or t
  misc_feature (621)..(621): n is a, c, g, or t
  misc_feature (623)..(623): n is a, c, g, or t
  misc_feature (635)..(636): n is a, c, g, or t
  misc_feature (661)..(661): n is a, c, g, or t
  misc_feature (668)..(668): n is a, c, g, or t
tgatttcacaccttaggaaagtaaggttcctagaagaaaaacgcagaattgatgagaaaatagtaaaatggatgcagcaggaccacagatttttgggaaacggaaaaagatccagaaaaagtcattttagttatctctatcatgggatctggccttccaggaaaacggcaaaacagggaggaagaacacactgacattgtccgtgggtccctgatgaacaaacaagactgttttaagaagccacttccaggataagaaggggtcttattaaaaggttaanagtagtatggaccangatgcagtgttnaggagaattacagaaaggatctcactctgtaancaggaagtaaatcctgccgattcatgcaatcacatgtcttctgttntgatctgcgaacaagtgactgatgcattgagaaacagctgatggccagtctttcttaaactgtggaagggggggagttacagaaacaaattattattaccagctgagtatctaatggccgtatcagcagaatctattaaactatgngggacgtgatttcaagtggatcttagagccccaaagtcttgactcatggggagagtctcttagggtagactggcaaatgcccactttgnanggaagatactannagactgaaagaatttcatctcttanaggggtnagaggggaacggttat

SEQ ID NO: 60339 - DNA, 475 bp, Homo Sapiens
tttttttttcatgcttttaatttttttaatttttaaaaatataagaatacttttaaattagaatactcctatgaatgtgagaataatttcatgtttgaaggagtatcttctcatatttttttgatgacctaaagaaatttagtgttttccatgaactttgtgaatacttacagcttcctcatctgagactgactttccaaagaatgaaatctcagccattttttattggtatttgtcatttactctggccatctgatttgttgctaaatatacacatttgcatttcataatcttctcttttctcttcctttttccttgtcagtccttaacatcccatcaatatcttttttcttcatctattcagttaatcatgacaagtccttgccaaatcctattggtgctttccccagcataggtttccaggacaagagttcttaatttacataattttgaatcatttctaagatctttaatt

SEQ ID NO: 60340 - DNA, 374 bp, Homo Sapiens
ggtcgactttttttttttttttttttgcaagaaaaaagaagcaaacgagttatgacgtacctgcttttgaatgtcacaaatcaaacaatgtctagatgcttccaatcccccacattcccaaaatctagtatacctgcatattttaaaattccaacatttactttctagctattgtaactacaaaggaaaaaaaattgtgatctactaccagtacattgtgaaaagcgcaaaatgactgaagaccgtatgaaacagatggtttcctattcattttttacccatggtgcctaacggtgggcttggcatttaatggagactaagttctgacatggtaatagataatagcaacaggagagaaaaggtgaaacgtattt

SEQ ID NO: 60341 - DNA, 445 bp, Homo Sapiens
ttttaaacacagtgggttgccagttactgcgtgaattttctggcgctgggacaatgaccttccctgcatccacaggagccctctgagggagctggccactctgcctcctagtcaccgtgaggcttgttattaagctactgtgtatgtctgtaccttttgtaacatggacctgctgtccacaaggtaacaaactaaggctgtcatggatgcacactagggtttgcaagttaaaatttaatcctggtcttagacatagaagttatttttaaatttaagtgacacatgctgcacaacaaaccccaggttctagctttcactctacttttgcagttaactacatgcagtcaaaatttaaaagtgccaaacgctagcagatcaaatccataacattttcaaacagatgaattttatcacttacaatgtcaaatacaaaaagtgtatggaa

SEQ ID NO: 60342 - DNA, 533 bp, Homo Sapiens
catttaaaggcctatagtacaatttggctacttatgttagaatactttgaaaccaatcagaaattcattaaacagaagaaaaattcctgattctcatcggaaatacagataagcacaactgtaacttgtttgacaggaagactgatgcagcataaatagcccagagatagtattctaattagcattccctaatcgcacaaagagcatctacgggaccccagtgtggcgtaagggctgaccctgtattcacagagctagaaagtgagctcagaaataacagcaggaatactaacaaaaaaacaagaaacctccccaaacagcatgtgactgaacaccaaatgagcagtgcagtgtgtgcaagacagagctctatgggctggtgtggtcaagaaaggtttcatggagatggtgtgaaggctgagaaggccttgaagaggttgaatagagaactaagggcattccaggaaggcatcctgtgcagctgaggtgtagggataaagttggaaaggtgccaatgccagcctaatgagttg

SEQ ID NO: 60343 - DNA, 2298 bp, Homo Sapiens
aatagaagatcgctcgggaattcttactctcgataaagattataacaacataggaaaattcttaaatagaattttaggcatggaggtgcatcagcagaatgcgttatttcagtattttgcggacacacttactgcagttgttcaaaatgccaaaaaaaatggaagatatgatatgggaatcttagatcttggttctggagatgaaaaagtgcggaaaagtgatgttaaaaagtttctgactccaggatattcaacctctggccacgtagaattatacacaattagtgtagagaggggaatgtcatgggaggaagctaccaagatttgggctgagctgacaggaccagacgatggcttttacttgtcattgcaaataaggaacaacaagaaaactgccatcttagttaaagaagtgaatcctaaaaagaaacttttcttagtttatcgaccaaatactgggaagcagctcaaattagaaatttatgctgatctaaaaaagaaatataagaaggtcgtctcagatgatgccctgatgcactggttagatcagtataattcatctgcagatacttgtactcatgcttattggcgcggcaattgcaaaaaagcaagcttggggctagtttgtgaaataggtcttcgttgccgtacatattatgtattatgtggttcagtgctgagtgtctggacaaaagttgagggtgttctagcatctgtcagtggcacaaacgtgaagatgcagatcgtgcggctaagaacggaagatgggcaacggattgtaggtttgatcattccggcaaattgtgtgtctcctcttgtaaatctcctatcaacttcagaccagtctcaacagcttgcggtccaacagaaacagctatggcaacagcatcaccctcagagcatcaccaacttgagcaacgcatgaagaacagacaggtttcaacatggatggatctgaaatgctgttgaagcatatcatttgcataaaaatcagggacagtttccaaagaattatatatttttttcagttgtgctctctagttagtttttttgggagtaaggacaaacctggaatagatagcaaaactgaaaatcagcagtgctgatggtggtacatatgtctttcctttagcttctcccctgataattcccatctgcttttacttcgggtgagcagagggggatgtgtgtgtgcgtgtgtgtcagtctgtttgtgagtgtgttaaaggctacagaccacagttggtttaaaatgcttggaacttcccaaactggctttactttatgtttatacagtgctcagggttaacgcagtacatccatgccattgctgtgggaggtatccccggatgcatgtgttttgagtctataaatatagaaaatatatattggtttctttttccaacttaataggtttattaaagcatgaaatgaaaggttgcatatcatgcattcaggttattttctaatttttgttctgacagtgcatgtctttggaagcatgctgaaacaagattaacacaggagtcgagtaacagagagaaacatttgttagatgtacagcattggttattgcatttttatagtgtttatacctgggtattgcttcaaaccctgcagacccctccttccccttctccctgccctgggtttctggtcaaggtaatgaatacatacatttttctgtgataaaactcttaaaagttaattttaatgtattaatagtattcctaatgtgtgctgcagaaatggctatgagcctcttaaatttacatttgcaacttaaaggtagttttagaaggaagtacaaattggctttcatcttgcaaacaatcgttttttacttcattatcttaatttgctttgtcactcataaaaaggaaaccatacctgagttgtagacaatgaggaaacacttgaggcttctgctgtgtgttcttttgttattgttgttattgttgttactcagtaacttgaatattgtttaatgtgttgtaagacgtagagtttatctcaagctgttaaaaatggtaatgtacaaatgtgaatagacacttatctatataatatgggtaagttttgtttcgcctataatagatgtttataaaaacaagtgaggggacagttggtctttttatcttttctttctttttctttcttttctttttttcttttttttctttttttttttttttgcttccacaggttgcactattgaaaaatcgagattgtataaacctggtaaaaagctgcaagatgccaaaatcttgtagatgtcaaataaaaagttattatact

SEQ ID NO: 60344 - DNA, 595 bp, Homo Sapiens
ctgaatttcctcagagatttctaacatggatagtaagcagaaagtaaaactgtgattccttgtcacgtcaggctgtggttaccagggaggtctatgaaggtggcccagttcatgtggctggaacccagtgtggatgtacacgcaggcaaagttacaagctttgaacctgcatgggaaaatttaaatcacaccattctgcagccccaggctatacctctaatccctgccatgatatagaggattgcctttgctcaaagcagagattagatgagctcagcaacacacatcaccactcctggaaacgccataaaagtgcatgtcctactaacagcaggtcagcagcatcaattcagcataagaaaggtggtgtgactttatttatacagaaccatcagacgtcacctctggggaagaaataaagtcttgctgttgaatttatccagcaatgcctctaagcttgtgatccaccttttgaaagagggtcactaaatcctttcttcctagttctaacagcagaagaaacaggtactgaaattaacagcagtttgtatcctgggcacaacaaagtggccaagttcagctctttattagctgc

SEQ ID NO: 60345 - DNA, 473 bp, Homo Sapiens
tttttttttttttttttgccactgttctttacagggagaaacatttcaaagactaatgaagcttgctaggggtagtgattgaggaggatacatgtattccagtaattctcttctaatttaaaatcaaactatgaggaagaaattaaggaagtaattatgaaaacttctgtacttaaacttctttaatagctaccaggtaactccatggtaaggcctacctgagccaaatttcaaagcagaccaagttagtccataagggctataaagtgttttcccttctgggtatattgtattgtacaaggacaaagacatctttaaaagaatgttcagccttcactagtaaatggaaaacacattttaaggcagattttaagggtctttctggggctctaaaaatccagaacatatttgtgggctcctcctctgaccactacaaggccaactttatttaatactccgtattattttcctcg

SEQ ID NO: 60346 - DNA, 475 bp, Homo Sapiens
ccttagcacgttttctctactactggaggaaaatattaacagacatcatacatgctcacaataaactaaagatacacaattaggatactactatagaccgttcccccagtgactctcacttgccaacagtttatcctcctggttctagatgcccagataaccacaccataaattctcccaagtgaggcacatttatgttgcttccagatcttctccacaataacccagcaacactagaataaacttgtacacttccatgctggtgcttttcattctaaccaggtttggtttcaaagtgatagtgcccaattaactgcagaacatttgcaagtcatgcttcttccacctgtgttaaaacaatgacctggtcctcctgcctgcccatcagcactggatgttgtcactgctgggtatttttgctgtggataaaagacagaagaatctgtgctgctgcctcccacggcatttccctgcc

SEQ ID NO: 60347 - DNA, 476 bp, Homo Sapiens
  misc_feature (328)..(328): n is a, c, g, or t
  misc_feature (464)..(464): n is a, c, g, or t
ttttttttttttttttacgtattcccagatggtccaactattccgaaaagctcacggtatatactcttgagaaaataagcatgtaaagcattcttttaaagtacttgccacaccatattctactggcaaatagggctaatgctggagctcagaaaacaatactccaaaatatggcacttcagcacacaaagtactttgcactggaaggtatcagaagcagcctcagaacctggatctctctcatcttctcctgccctcctgtctcttgcccctcattctcccccaaagcaagtacagacaccagaattcctcctcaccaaagcagatnataaagactagatctctcttctccaaagccagccataaaaactacaattactactctaaccttcccctcacctttctgtctaggaactggcctagacagaaattctgtctagaaattctctgacctacccttgtcncaataatatagg

SEQ ID NO: 60348 - DNA, 489 bp, Homo Sapiens
tggagcttaataaatatttattgacaacaaaaacatatggagaatattgtacagtttggagaacaagtaacttacctgacaaaacaatagaaagtgcaatcacacttgtagtcaggactgcaatgatgaacaagcaacaataaaccttgacaggagttactggagatataagtgctagacattgtctttgcagagttttatctgtaaaatagaaacatcagaatctcaatctcaggaatatcgtagggagaaaaaatttatcatagaatcaacactaagatcagatgtacttcaattctcctactgccaactcctttcacaaaagggcttggttcataaatgagaataatggcccaaagagggctagagataaaaatcgaattctccccacccccagggaatcttccagttactggaaaaagagtagaaattgggatgaaaaagaaacatacacaatccagatttagccccatagtaaagcagctggtt

SEQ ID NO: 60349 - DNA, 458 bp, Homo Sapiens
  misc_feature (458)..(458): n is a, c, g, or t
aagaaggcagtacccaaagacaactaattcttaggtgcaatcgcagaatttgcatttataaaattgtagtattcacatttctttctaaagtatgactgttcatttagatcaaatgactgttctaacataattaagccaatttttcccctaaatgttctcctgaacattaaacacatacataatagcagttaaatattggctcctttagcttggaagaactttacaggcaattagattgtgccagttttcaaataggagatcagttccgttagtagttctatttttttcattcaactcgtggaacaagggtcaacaaattgggtctgcgggccaaatccaccctgccacctgttttcggcatggcctgcaaagtaagaatggtttttacgttttcagcggttggaaaaagatcaaaagttgatgctttggtgatatatgaaaagtataccaaattcatn

SEQ ID NO: 60350 - DNA, 545 bp, Homo Sapiens
  misc_feature (389)..(389): n is a, c, g, or t
  misc_feature (394)..(394): n is a, c, g, or t
ttttttttttttttttttggttaaaaggaagctccctttgttcttactttttaaccaaagagaagcgaaaacatttttttcctgatcacattttcaccgacacctgagccgacaagccagctcctggcccccggctcaggactcctcgctctttcccttctcggggccctgtcgccgttgaaaggcccgctgcaggctggggagggtgatcggggccgcgggccatttcccccgagccgggcgggcagactgcggaggcaggccccacacgcgccggttttccgagcccggttttcttcaggagcgaagctgttccagctgacccgcgcgtctgggggcctaggcccggcttccgattccatttaaaacgacccgcgcatcttatctcncgcgnctccccggggttcccacccaccccccttcggcccgggccaggccagcccagccccggcggaagccaagctgggagcttttgaagtccggagaatttcaatccgagaggagccggctggaccggagcccgtcgccccagcgggggaagggac

SEQ ID NO: 60351 - DNA, 583 bp, Homo Sapiens
  misc_feature (437)..(437): n is a, c, g, or t
  misc_feature (466)..(466): n is a, c, g, or t
  misc_feature (516)..(516): n is a, c, g, or t
  misc_feature (519)..(519): n is a, c, g, or t
tttaaaactacagttcttttattcatcctaacacctagcagacagccctccacatagtaagcacttaagtatttggtgactggagatatgaaaaggcctacagtaaaagagaaaaatcatgcaatcactagataaaaaactacctagatttgtgtatctgactccaaaattgggctggaattgttagtagacaaattttcttctggcaaacaaacaaaaatgcaacaaaacttcaagataaacaatctatgtagtaaggcagtgtcaaacacatccgttttacccaaacgacagaacaaataccaataagatgacagacatcaaaatcaaactttgcagcaataaacaaattttcatatctgactgtaaattaaaatcttgtgtgcttagaaacatgttcatttagacagtattaaaaagtaggatgttagtctcanaatccaagagttaaattattaattcaatntcatacttataatttagtatcttactgatagatagaggaccaggcacagncanagacgtaagtgcatgcttacgtgatccagaagtggcagaaaggtgcataaggcctcggcgatct

SEQ ID NO: 60352 - DNA, 513 bp, Homo Sapiens
caaaatgttttgaaaactgtcacaaataattcttccaaatgaaacaaactgaattttctcaactcccttgtatattaccatctcagtgtaggaaaattttaacaccttaaaaatgaaacctgacaatgacaaattaatacatataaccattagagtgctgtgacttaacctctgtagctactgtggtccatttttgatgtctggttatattatgacattataactatcaccaaaaaactttttgattactcgctttagaaaagtgtcctgagcagtgcactattcatctttctaataacatgaaagtgaaatagaaaaaaaaaaaaatacatgggccactggcaaatgcaggatgcagactatttgggatgttttatggaaacaggcatgactgcaaacacttggtttgcacttggtttgattcatacaacgatcgagaagtgtggatggtttctggaaagtgccttctaagctgaaaggtaatcaactgaaacatgtaatatgctcttacaa

SEQ ID NO: 60353 - DNA, 534 bp, Homo Sapiens
  misc_feature (165)..(165): n is a, c, g, or t
tttgaaaaaataatttgattttattcccattatagaggaagaaattaaagtttagagatgttagaaaacttgttcagtattacatagaaagtagtggtattggaattgaaactgaaactcaggctgaaatcttaactcctacaggttgtgatgggcacaacctanaaatgatatttctttgcagctttattgaggtataactgacaaattgtataaatgtaagatatataatgtgatgagttttatacaaatacattgtggaattgattaccacaatcaagtcagttaacacacactgatcactgtatctagttaccattttgtgtgataacatttgagagctactctgttagcaaatttcaagtatacaatacagtattgttaaccatagttgccatgtgctacattagacccccagaacttgttcatcttataagtgaaagtgtgtaccctttgaacaacatcttcccaatcccttcatggcccagcttctggtaaccaccgttctacgctctgcttctatgagtttgactt

SEQ ID NO: 60354 - DNA, 497 bp, Homo Sapiens
  misc_feature (449)..(449): n is a, c, g, or t
tactttctcaaaggtactttttagtataattcctacttaagtattcttcaaggggagtcatttactctggaaaaaagtattccttaaataggattgttttatagatgggagaaaacaggaaggaataatgtggcacaagtacatatttcatcaaaacctctccgtttctaaattgaattacctaggaataataacttctataccaactacacctaaagaataacatttgaactgagagagtctgaaatgtaaatgataactgagggtcttgttgccataggaactagagggatttccattaattaaaggttactgtagaaggctgatgggctgtagcccatttggaaaggtgcccacctgtactatgcaccagataaaaatacatttaccttggtgctggtatatgcccattggcctaactaaacagttggtgtttgggtaactccttnttttttttttttgagatggagtcactctgtcgctcaggctggagtgca

SEQ ID NO: 60355 - DNA, 482 bp, Homo Sapiens
ttttgtcattccctcttctcttttctccagaagagtgccctcccggccaagctctgccaatgaatccactggcaggactggttccacctttgcttctcgccttggcccatgggccatgcatttccaccccactcactcatcatgattaatcagcatccttgcaggccctggatgagatgggcctttcagtggcgagggaaagcttccatctcaccctttctcttccccattaaacatcagatccgagaagaactgaggctgggggccacttccagtgcttgctctgaatccagggtgcatccattttcagttgtcttcaatgagaatctagaaatcattccttcatgaagttctgccccttagggcaggcagctattaaattttggaaaagcattccaatttaaagctgtagctcctctcaaagctatgtaaaatcaaagaccctggtttctcccttagtgactagaaaggaatatcacaag

SEQ ID NO: 60356 - DNA, 360 bp, Homo Sapiens
ccactggaacattaaacagcacccaagaacagctttagaaataaactctaacatctgggatgcagtggtagctgacaacctttttttttaagttatttgacttggaaagggtttttggagctgacagcttaaacacacttcatgtgtcccagaaaataagactgggtgtttaccacgttttgtttctaagaaactaagtaaacattcgttaaaacatatttaagatacacgtgctcctgagaacacatttactaccccgatgacaggaaacaattctaggcagtcctgaaagagggtggcaaggctaaccccgggaacaaagacttgcaggtggctgtacagcagctggccctggaggca

SEQ ID NO: 60357 - DNA, 513 bp, Homo Sapiens
ggtagttattgttgttcttaaagcccttcctcatggacagctaactcttttctatattaaactgctacacagaaattcctcaattcatctactggtatctaagtctccagtctatactttcccaggagaaaattcacacattttcccatcataaaaagtttaaaagccaccaacagaaaagctaaggttcacttatatttctggaaattaacagtattattccaagcaacacatgtattacaaataatcaaaaatgtcagttgaccaatctgctcattataaaatgaacttacaaaagtgcatagaataatatatgactctttaaaaccaacagctcacactaaagttattcctcatacatgtatgaccacagttaaagcagcactatctctgctctcttcaggaaaggaggaaagctaagacgcacttcaaagatctagtccagaaaggttagtaaaagagtaggctgcataaccatagagagcattatccccatttccagttcttacaagt

SEQ ID NO: 60358 - DNA, 557 bp, Homo Sapiens
tatcattgataggactaaactgtcttcaacttactaactggagtttctttacccagcagttcagagcagtgagaactacagaaggcgaggaggagacagagagcaggtaacggggctttaccgtgacagcagtgcgttcccctgctccacactcccactgactcagtcttgccaatgccactatcaaggtccttgcaaaaatctggttttcttttgtctggaaagggctggttttctcctctgaaactgaaccccaactgttggccctatttaaatctcaggtcttggatttcttacttacataagcaggggcttaggtaatagagtgggttgtgcctgtggagcctcccaatcagctctcaacctcctctgttggcagggtccccggcagcacacggccacagcgctccttcctctcaagggtggtccgggcagccctacccctgcagctgctcctcctgctgctgctgctccctggcctgctgctgcccctctcgaagaagactacagctgcactcaagcaacaattttaccgggtcttttacccaggtgaggga

SEQ ID NO: 60359 - DNA, 548 bp, Homo Sapiens
gctggctatctccagtagtatcctttttaaaaatgactttttaagtttgctgctgatacaggggtatataattacttttgtatattgattttgtatctagtaacctggttaaataattgaggctcacttgaaaaatgacagtttgatttcttctgttgcaatacttatactgtaggctgaaaatattatagtcaaaaatgtatttaataaactaacctggcaaacatcatagcttagcttagcctactttaaatatattcagaagacttacattagcttatagttggggaaaattatccaagacaaagcctattttatcatcaggtattcaccagctcatgtaatttattgaatactgtactgaaactgacaaacggcatggttgtatgggtactcaaagtacagtttctttgcatcatcctaaagttgcaccatcgtaagtcaagagctatctgtactttatttctttttgtcttctctgctagctaagatttgcagtacagtgttaattaaagtagcaatagtaggtattcttgtcttgttcctgg

SEQ ID NO: 60360 - DNA, 368 bp, Homo Sapiens
  misc_feature (328)..(328): n is a, c, g, or t
  misc_feature (345)..(345): n is a, c, g, or t
  misc_feature (355)..(355): n is a, c, g, or t
taaaatagttttggcaattaaacactaacattaatactactttgtggcagccatttctgtagctgccatgagaattagttttaagatccacaaagatcacaatgaaaggaaaaaggaaaagaatttttctcagtaagatattctgtaaacatatcatgttaactcatgctaggaattttacattgctcttaggaacatcaaacctgcctggaaaatggaaataaaattcattccctattatcatcccaaattccccctttaatttatggttcatcagggtggaggtggggggggattacctctctggggaacagtttattttgttgcngtaactgaggtctcccnttgtggcctnggcgagccagtca

SEQ ID NO: 60361 - DNA, 520 bp, Homo Sapiens
gcgtatttaagcactgattttaccaaatgtaatatataaaggcaaacaatttacacaacttaaattgttatttttcttttttctttgcttctagatatgatgccttaagaacaattcaacagccaggaaccaagttcttatgctcaaaatacttcttcctgtcacatgtgtctgtggacatgacactcaacctccacactcagcccctgcacttgtccaaaagagggccactcaccaagggattgtgaggaggctgagaagtcaggaaaaaagagcttcattcacttctatctttagtgcctagagaatagagtactgctctgaaatacctcatatcttatgttttcaaaattatgatatttaaagagtttcatgataaggtcaaagtctccactaccctctgggtctgcctaatcttacctcaagcacccagtgcaaacttaagagccattcctaccctggtgttctgagatacattctttattgaaaccttaggaaatatgaccacctgcacatccag

SEQ ID NO: 60362 - DNA, 519 bp, Homo Sapiens
cggccgcgattggctgcggagccaacaaaagaggcagcgctgtcatccgaggcgagagagggagccggagagagccgaggaatagagagagggagggaatgagggagcaagggccagagagagatgaagagacagagatatgagggggcgggggggcggatatagagggaaagtcagagccagagagaccaaggagaatcagagagataagggggaagagacagagataggaaaaggaggaggagagagggagagacaaaggaggaaaagaagagtcagggggaagacgcagaggtgagagacttagctagagagggaaattgtgtgtctgtgggagacacagaaccaagaaggaggaagactgggacaactagtgggagagttagagtggagacaaaaatggggagaagaggggtaccactagatagggggagacagaggtctacagagccagaccagaagagatcgggggtcatggagatgggaacagcggcagaggaacagaggacagaagagtgc

SEQ ID NO: 60363 - DNA, 617 bp, Homo Sapiens
  misc_feature (490)..(490): n is a, c, g, or t
  misc_feature (559)..(559): n is a, c, g, or t
  misc_feature (589)..(589): n is a, c, g, or t
  misc_feature (613)..(613): n is a, c, g, or t
tacatatttggtttacctttagccagttctgtccactctgtctggcaataatttttgctttacatttttatctccagctctacatgaactaactgaaagtaaaatggtccagaatttcttgtttctgatcagtaattcacatattgatgatgtctgtgtatcctggtatgacttttctgatttttaattataatttttaattttaattaatttttgtttagatagtttatccctttctaagtaccttgctttttaaaaagtgtaaacatattttgcaacagtcacaccacttctgccttattagtaactgtgaaacaaaggacctgcactacgtaaatgcatattagtgaatgtgagtaaaaggtacaacaatgtctactgggatgagcaaataatgataaaccgtctaggcaaatatttatcaactttttattctacattcaatttaaaaaaataacattttagtgaccaactaaggaatagccaacanaaattgcacgcaaaaagtaacatgaaataagacattgtgcataattttgtggaaataatgctaacgagnaaaataggcataccccagcttaccctatgntttcccttaaggtcctttggcttnattt

SEQ ID NO: 60364 - DNA, 502 bp, Homo Sapiens
  misc_feature (362)..(362): n is a, c, g, or t
  misc_feature (428)..(428): n is a, c, g, or t
  misc_feature (454)..(454): n is a, c, g, or t
  misc_feature (469)..(469): n is a, c, g, or t
  misc_feature (474)..(474): n is a, c, g, or t
  misc_feature (496)..(496): n is a, c, g, or t
tgatttcaatatttatttatttgttttgagccacctctgggttagaacagttgagtgttcacagctggtagagttctcgttttcaaatacttcagaagaagttcttaggacaccaaacaggagccacaatgttagacttctgaatagtcacctgttggactatttaggtcaggaggtgtagacatgtccccaaacaaatccatctgggtcaacacccgatttcagtttgttagtttgggtcatctaggaatcattaggggcctcactcccattctcaactgctttgctgggcttcctctatctttttcttttcttcttcctttttctttacattataggataacttgaaaaagggtctttangatcaacaactaatggggttcaggcctgttgcccggtttttatggggcaaaaaactgatgctgggnctttttcctccacacacgtaaccaanggcccggttgtctgntcacntcacgggggcattgaaagggancttttt

SEQ ID NO: 60365 - DNA, 504 bp, Homo Sapiens
  misc_feature (493)..(493): n is a, c, g, or t
cacctctcccagtgcatggttgacaatcactggtttccatcatcaaatcttaaaatcaaagcattttggaagctgagaatgtattggcaattcatctcactcaggggttaaggttttaaaatcagcacatgtggccaaacatgggtgtactaaaatctcttgtgaaaatacctataatgactcacatgtatgttactgagggttgcacacatagcaaacctctctcggggagatcagcagggcctcccttcattcatccccacaggtttttgattctttggttggccaacaggtaaagaagtcagctagtatttgcagccacgttgaatatcaaatactatttggtgtcctttgttggccaaatgcttacatttgcatttatgtaaatcaaatgaacctatgctacatctccactgcaaggaatcttagaaaccctgcctcggaatcctggaacctaaaagtcttaaagacagaatcttgaaatactgaagtnttaaaatctta

SEQ ID NO: 60366 - DNA, 2196 bp, Homo Sapiens
gaggccaagagcgcgggcggcgaggcaagatggcggcaaccaagaggaaacggcgtggaggctttgcagttcaggcgaagaagccaaaaagaaacgaaatagatgcggagccgccagctaagcggcacgccacagcagaggaggtggaggaagaagagagggaccggatcccaggccccgtttgcaagggaaagtggaaaaataaggaacggattctcatcttttcttccagaggaataaattttagaacaagacatttaatgcaggacttgagaatgttgatgcctcattctaaagcagatactaaaatggatcgtaaggataagctatttgtgattaacgaggtttgtgaaatgaagaactgtaataaatgcatctattttgaagctaagaaaaaacaggatctctatatgtggtaagagaatgtattaagattttggttaaactcatttaagtggatttgttctttgtaccttttatgttatagactcctagtgtttcatgttaagggttgagaatgaagcaaacttttgatttcacgaaacttgatacctttaaagaaaattaaatgtataaatattataagcatattatttatggtgaataggtggtaagcattgactacatttgctaattagtggaaaaagcttactccatatctttcaggctttcaaattcacctcacggaccatctgctaaattccttgttcaaaatagtaagttgactcaataaatttttttagatgaggaaattaaaagtaatcttttgaaatagttgtgcaaaagttacaactatttttgtttttgttgtaatttttctagttcataccctcgctgaactgaagatgactggaaactgtttgaaaggttctcggccccttttgtcttttgaccctgtaagtttctcattcagtgtatgaggtctaattttcttatctggcatggttgtttttagtagatatagttgtgttattcaatttagtttcacccccaccttggttttatggattatcaattctttcaggtacatttataatgaggttatagccaagttatagaaacaaatgagcaaacagttttaaacaaggcagtctactgttaaataatatgcttaccttatttttataggcttttgatgaattaccacattatgctttgttaaaagaactcttaattcaggtaaatatctttaaaattagctatccaaaatatacatgatatatcttggaataaggaactaacatacacttttttaactagatctttagtacaccacggtatcatcccaaaagccaaccatttgtggaccacgtgtttactttcaccattttggataataggatatggtttcggaactttcagatcatagaagaagatgctgctcttgtagaaataggacctcgttttgtcttaaatctcataaagattttccagggaagttttggaggaccaactttatatgaaaatcctcactaccagtcaccaaacatggtaagcggttgtgtcattcagtagtcttcaatgtaccagaaccctttggccaaaatgattctgtgaagtaattgctgttttattacctgtgaaactgaatttggtttttgctgcatagaaacttggaaattactcccttttttcatgacactggctgaaaggatatatggttcataactgaaagtctttgccttatataaaatgtttatttttatttcaaaagcatctaatcttttttttttttttttagcatcggcgtgtcataagatccatcacagctgcaaaatacagagagaaacagcaagtgaaagatgtgcaaaaactgagaaagaaagagccgaagactcttcttccacatgatcccactgcagatgtttttgtaacaccagctgaggagaaaccaatagaaatacagtgggtaaaaccagagccaaaagttgatttgaaagcaagaaagaaacggatttacaaaaggcaaagaaaaatgaaacagaggatggacagtgggaaaacaaaataagtcaatggaaacctgatttgtttttcagttactttatatttattttgtattcaatgtgtaaatacttttattatctaatactatcttacgtctaattagtgtagcatttacaagaaagaaaaattaagatcttaaaatcagtgattatctttttctaaataaaatatcaccagaattcatcagtt

SEQ ID NO: 60367 - DNA, 568 bp, Homo Sapiens
tttgctgagtaccagaggatggagctggcttgtgttgttaggggtcagcaccatataataaatggttatcttgaaaggctaggattacactcaggcagcagcccggctacacactaggagagtgacacagggactaagactgcctgagagaagagcagtcacatagtaaggaatgacccccaaatcatccactcattcaaatggttattgttgaatattcagtatgcatgatgccccagtgctgtacccaaacattttctctttctatattttgggatttaggaggggattaaatcccatgggactgtcaaaaggaatgattctggaacttatatggcatgtaataatttattaatataaatgtagatcatatagaaataaagggtaaaagcaaagaggctcaaagagacctataacatccttcctcacttttgcaagcgagtaaaaataaccacaaggccttaggttctgaagcaggctgctttcagtgggctaagagtgttgccaatttcttctctctttttcaccttctatctcatacaaagtaactcattctactggagcagat

SEQ ID NO: 60368 - DNA, 490 bp, Homo Sapiens
ttttttttttaagagagttgtactaaatagtctccaaggtccctttcaggttaagattctatgatcttaacagacataatatagttgcttttcctaaaagttgaccattccttgagtcaaagtatagaaaattctctaatacttccagtctatcaaaattcagccctctccttccaatttgattcaggtttcagtcaatctgcataaaaatgccttcagtatttaggtaccctcattactccaggcctgactacaaacagcttatactccattctctctccattcccaggaaaacaataaacacgctgtcttgtcttctttgccactttgactcagatgagacggttaatgcaagtttgaagcaacttccaggcccatgaagctgtgtttcaaagtgggctatctcagaactgaggatgagatatgccactacagaagaaagaccgtggagcaatgtctattcccagagatccacccaactgttcaggca

SEQ ID NO: 60369 - DNA, 446 bp, Homo Sapiens
cctagagatttttatccttgcacataagatggatgaaagagctgttcagagccttggctcccccatcccacagactttcagattgaggtagggagggaaagtccctcagaaaattttgggcagagaactccaatgttagaaatccataccacatagaaggctgcatggtgtactgaagttacagaagtttcaatcatgatgatttaaacaatgctgaataagaaagaatgtgtaatttttattctaccctgacatacatttcctatggacctctttagaagctatttcaatatttcagatttctagaaattagatatgatttacaaatagaatactttggatacaaagacttgagtccgctcggtgtaatcaaaagtcctgtgctcgcctaactacaatattttaatttcaatttgtgcctttgaacatgcattctccttctcaca

SEQ ID NO: 60370 - DNA, 512 bp, Homo Sapiens
tttttttttttttttttgcatgtattaagacatcacatgttccccataaattgcataattattatatatccattaaaaaaacacatgtcatggtcttagagctgcacaatgttgagtgcagaaaactcctaaaattccttcaggtgaaaaagcactgttcccaagagtctgaggggtgggctcagcgcagcccccgtggcctgcaaagtcaacacaacccaggctgggccaggagggagagcccacatgctctcaggcatgccctcctcaccttccccttcttgaagggctttctgatctccaacggcctcaggcaccagcttcccataggagtgcttctcgctagaagcaaacttcgctgtatcaaagtagacagacccattggagacatagctggaaaacagaaaaggaattgggtgggtgcatctaacagacccgaaagtgtgtcagcaggatgacagtaacaaaataaagcagggctataaaagtgcgaaatctgtgggctgtctact

SEQ ID NO: 60371 - DNA, 619 bp, Homo Sapiens
  misc_feature (369)..(369): n is a, c, g, or t
  misc_feature (422)..(422): n is a, c, g, or t
  misc_feature (454)..(454): n is a, c, g, or t
  misc_feature (474)..(474): n is a, c, g, or t
  misc_feature (546)..(546): n is a, c, g, or t
  misc_feature (586)..(586): n is a, c, g, or t
tttttttttgctcaacagtcctttaaggtatgtgtccttaaggttaacttgctacataatatctgtctatgaaaaggttgtgaaccgtgaaccaaaggactttcatgattagtcatatgacacctgaggggacagtaccagggtacccaggtaccaacctggttgaactccaaattattttcaccaaaaaggatgaaacccattttcaaattagtgatatctgactcaagacattaatgtatgtgaaagaaataaacacaaaacttggcttttctaggctcaaagacttctaggaaggaaacgacttaaaaaaatgccactaagagaggagcaagcttgagataaattgttaataattattgttgtccngtggggtttcagaaataccattcccactccttcgtgagtgttttccttacggnctatttactctgggccacaccccgctgctagncaatttcacttttattgggntgggaatacatttaggctaggtttttttccctttaggaaatttttttaaagcctgcttattaattttctacntcctcagggttgcaattggcaggcaaacttttttaggctntttgccaattggcccgtagcaatttctatgtaa

SEQ ID NO: 60372 - DNA, 501 bp, Homo Sapiens
ttagtttttttttaaggaacagaaatttatgagacctttatttcacacttaaaagttcttgtggttattttcatgattctgtaatgactatttaaataacatggctgcagtgaatatgacagtaaaattataaatggcattttggtctctttgaggatatgagcttgcagactacagcatctgcccttgtatttgtcccatcctgtggacagaggacattgaaatggtcaagaaccctgcagttactgggaactacttcagacttttgtgaattgggatgtccaaagagatgatgtagtcatttagtatgggtggaaatgatgcattctgaagaggctcacctggtcctcagcgatggggccggttttgttagttttcagtctattcccaagacttcaactcaccttaaaaaaaaaattttggcagtggtaacaggtacataggtaaccaaagtatatagcttatttggggaatcttcatccgcattacgttttctggaca

SEQ ID NO: 60373 - DNA, 540 bp, Homo Sapiens
  misc_feature (402)..(402): n is a, c, g, or t
  misc_feature (453)..(453): n is a, c, g, or t
  misc_feature (467)..(467): n is a, c, g, or t
  misc_feature (493)..(493): n is a, c, g, or t
  misc_feature (507)..(507): n is a, c, g, or t
  misc_feature (514)..(514): n is a, c, g, or t
  misc_feature (523)..(523): n is a, c, g, or t
  misc_feature (529)..(529): n is a, c, g, or t
aggataattaaaactactttgaattttttatttatcaatctggtttctaatataattttagttaaatgaaagacattcacaaagaatattaggcatacgtacataatttccttctttcattctagtttacatgctgttgcttttagagagtgaaattttgtgttatttcacaggggatggaatcctgtttgactttacagaaagaatatttagcccagcttttcacagcactaacctctgcagtcaccacgctcactgaaaaaatttaaaaaacctgacaaaataaaacttagtaaaatctagaaacttgaattcaatttaataattgctgccctttttttgggaaaattgctcaacagggtggtgaaaagaaaaaatggggggtttcaaattcagtgttgnttggaggcatgagacataaacggccattaaaacgtttactgcgtaagaacnaggtataatggggngaggaaaaggagaaagaaaaaaggtngattgaaaagaacngatttcntccttgaanggaagnaaagctttttg

SEQ ID NO: 60374 - DNA, 461 bp, Homo Sapiens
  misc_feature (309)..(309): n is a, c, g, or t
  misc_feature (336)..(336): n is a, c, g, or t
  misc_feature (341)..(341): n is a, c, g, or t
catttgaagtgtttgttcactgttctcggagcacctgacgaagagtttccacttttaatacagttgaaccgaaagaaaatattattgtagtaaatttcctttaaaaaagcaatattgatgttcccgtatttttggaataaaaaagcacccttttttttttaaattattatactttaagttttagggtacatgtgcacaatgtgcagggttacatatgtatacatgtgacatgctggtgcgctgcacccacctaactcgtcattgaacaatgaaaagcaccctatttttaaaatgcattatgtaaatagnctcattccaaagctgaccataaggcantaccnatagtaacttggaaagggggagaggaggaaggccccctgaggttaccggttcccaaggcatttaaaggttggacttcccgctgggccgaggtacattttccccaaggctttttccctctc

SEQ ID NO: 60375 - DNA, 442 bp, Homo Sapiens
tgtagacatggggcctcactatgtttcacaggctggtctaaaactcctgagctccagggatctgcctgcctccgcttcccaaagtggtgggattgtaggcatgagccatcatgcctggcctgctgtgagttttaaataaaaatgtaaatgctcttctccattttcttacctctccttttaaagtgtgtgtgtgtgtgtgttttttttaatgtcatataagtaatacgtattcgtggtagaaatatttttttaaaaaatagaagcaaaaaagtcacaatcatcctaattatcactatttgtagataatcactacattttgacacatataattctagagttttacctatataaatgatacacttattactatctgtaggcactatgttaagcattttatattatctttggttttctttctaatggctttataaaatttggtttg

SEQ ID NO: 60376 - DNA, 421 bp, Homo Sapiens
tccaaactttctgtaatgttttaatattgtcctgttcatgaagacaaggaagaatatctcaaagggctttagttatggttgatttttttcctattcttggtagcttagaaaatttcccaaccaggagtgaggtctagctatcaatgtcaaggtggaaaaaatatgccaagagtggtgagcttgctctttttggcttcctcctacatttctgatcccatcttggagtggagaaagattcctccacccctccatcacacaccactgctcctgccccagtgctcaccccatcctagtcccatgcggttagggtgatatgttccagtcttcatttgaggtctgaggcaatgtgttgaccttgctcctcagcttatcttgagtaagggatgaatgtcatggccatatgcttcccatgaccacaatt

SEQ ID NO: 60377 - DNA, 2685 bp, Homo Sapiens
aaaaagtaaattttcgcagaaggacttagaaatgctattccatggaatgagtgctgattttacaagtgagaatttctcagcagcctggtatcttatagagaatcactcaaacaccagttttgagcagctcaaaatggcagtcaccaacctaaagagacaggctaacaagaagagtgagggcagcctggcctatgtgaaaggcggtctcagtacattcttcgaagcacaggatgccctctcagccatccatcaaaaactagaagcagatggaacggaaaaagtagaaggatccatgacgcagaaactggagaatgttctgaacagagcaagtaatactgcagacacattgtttcaagaagtattaggtcggaaagacaaggcagattccactagaaatgcactcaatgtgcttcagcgatttaagtttcttttcaaccttcctctaaatattgaaaggaatattcaaaagggtgattatgatgtggttattaatgattatgaaaaggccaagtcactttttgggaaaacggaggtgcaagttttcaagaaatattatgctgaagtagaaacaaggattgaagctttaagagaattacttctggataaattgcttgagacaccatcaactttacatgaccaaaaacgttacataaggtacctgtctgaccttcatgcgtctggtgaccctgcttggcaatgcattggagcccaacacaagtggatccttcagctcatgcacagttgcaaagagggctacgtgaaagatctgaaaggtaacccaggcctgcacagtcccatgttggatcttgataatgatacacgtccctcagtgttgggccatctcagtcagacagcgtccctgaagaggggcagcagctttcagtctggtcgagacgacacgtggagatacaaaactccccacagggtggcctttgttgaaaaattgacaaaactcgtcttgagccagctgcctaacttctggaaactctggatctcctacgttaatggaagcctcttcagtgagactgctgagaagtcaggccagattgaaagatcaaagaatgtaaggcaaagacaaaatgattttaagaaaatgattcaggaagtaatgcactccctggtgaagcttacccgcggagccctgcatcccctcagcatccgggatggggaagccaagcagtacggaggctgggaggtgaagtgcgagctctccggacagtggctcgctcacgccatccagactgtaagacttactcatgaatcgttgactgcccttgaaattcctaatgacctgttacagactatccaggatctcatcttggatctccgagtacgttgcgtaatggccacgttgcagcacacggcggaagaaataaagagattagctgaaaaagaagactggattgttgacaatgaaggactgacttctctaccatgtcagtttgaacagtgcatcgtgtgttctctgcagtcactgaagggggttctggagtgcaagccgggagaggctagtgtcttccaacaacctaaaacacaggaggaggtttgccagctaagcatcaatataatgcaggtttttatatactgtctggaacagttgagcaccaagcctgatgcagatatagatactacacatctctctgttgatgtttcttcccctgacttgtttggaagtatccatgaagacttcagcttgacctcagaacagcgccttttgatagtcctaagtaattgctgctatctagaacgtcacaccttcctaaatatcgcagaacattttgaaaagcacaacttccagggaatagaaaaaatcacacaggttagcatggcctcattgaaagaactagatcaaagactctttgaaaattacatcgagttgaaagcagatcccatcgttggctccttagaacctggaatttatgcaggatattttgattggaaggactgcctgcctccaacaggtgtcagaaactatttaaaagaagcactggtgaatataattgccgtgcatgcagaggtgttcaccatttccaaagaactggtccctcgggtactatccaaggtgatagaagcagtttctgaagagctcagtcgactgatgcagtgtgtttcatccttcagcaaaaatggagctttacaggcgagacttgaaatctgtgctttgagggacactgtggctgtttacctgacacccgaaagcaagtcaagttttaagcaggctttggaagccctgccccagctttccagtggagcagataaaaagttactggaagagctcctgaacaagttcaagagtagcatgcacttgcagctcacctgtttccaagcagcttcttcaaccatgatgaaaacataaatatctgccacataaaagaagtccaggaaaataacacaaggttgagtgctgcaggaagagctgcttctgcagggagttttctggaatggcgtggcacatattgaagcatttctcagtgtcccgttcacggaagcgcaggcagctcccacgacacacggagagactgactgatacgagatttggaaagctatgtagacatctttggagctcttactgtcctaaactgtacagctgtgcttaaaacccttatttcatataaatggccttaagttttctaattcaagcgggtttttggaaaaatttatggtctccattaaaatacatattac

SEQ ID NO: 60378 - DNA, 501 bp, Homo Sapiens
ctgcagatctgaagtgtaactttttcgacgatctttccattttgcaaggtcctgacagaaaaatcacatcagcaggggcacacctgaatttctatacaccctttctagcagacagaatgtgccagagtatcttattacatcactgaaactattcactccaactggatgccaaggtgccctaattttgctttttatagccagcgtttctgtaccaagcctttatctcatgtgtctgtctcaaaaacctgacctaataagatagaccccatttttgttttcccagaaagtatctgcctcattgcacacttcataaagaatgctaaatgcttgtaattaggtgacagttagatagatcaggaactgtttccagttcgttttcatctcactccaaaaacctggctgttctgcgaaacatgtttcactggtaaggccaaaacagaaacacgattgtgatggttacgcgcagatgcatagtctctttcatttcacaaacagagttca

SEQ ID NO: 60379 - DNA, 552 bp, Homo Sapiens
ggcattgataaagcagaattttaagattccatccacaggtgacttgaccttgggatattctaacaggaaacaacacccagtacccaggtccacaagtgtgcagccacagaggagagctgtggaacttagctgtgattgggccattttgtgaaattaaagaaataagcactcccggagggcatgtctgaatacaaacaatagaggctgcggatctcccagctgaggtgtaccctctccctcatatgaagttctttactgaacgcttgccacagccaacgcgccaggagggatccaggaaggtgccaggcggccccacccttcagccagcagccatctgggaggcaggccaagggagggccaaaactgctaacaccagaaattaataaggtttatagagaaccacataacctattctcttcaaatcactagcctataaaggcagtattgagaactacaagtttcacaaaactggaactgaggcagcacctattagtacctcatctggctgctcatcccagagccattaaagagacgaagacaaactactgcatc

SEQ ID NO: 60380 - DNA, 423 bp, Homo Sapiens
tgacatttcaccacattgcccaggctggtctcaaactcctcccactcaagtgatcctcctgccttggcctttcaaagtgctgggattatgggcgtgagtgcccagccaacaagtctttatttaaatgagagatataaaaagtcccaatttgccccatgtttccacatgcttttcttcttcatcctctcaaaccatactccataaatatttgtaaaaatgatttgattttggtctgtcaccaaggatacactcctcaccctaaggggttatgacaacagggaaatactcatctcatttttgtgatgggctgattagagccagaaaccttctgatttccttgatctaaatatttttccctcttgtaggcttcaaaaaaaaaaaatgctaggcaaatggcacagtccatggtccctgggattcaaa

SEQ ID NO: 60381 - DNA, 540 bp, Homo Sapiens
  misc_feature (27)..(27): n is a, c, g, or t
  misc_feature (29)..(29): n is a, c, g, or t
  misc_feature (38)..(38): n is a, c, g, or t
  misc_feature (51)..(51): n is a, c, g, or t
  misc_feature (95)..(95): n is a, c, g, or t
  misc_feature (109)..(109): n is a, c, g, or t
  misc_feature (117)..(117): n is a, c, g, or t
  misc_feature (156)..(156): n is a, c, g, or t
  misc_feature (183)..(183): n is a, c, g, or t
  misc_feature (205)..(205): n is a, c, g, or t
  misc_feature (521)..(521): n is a, c, g, or t
  misc_feature (529)..(529): n is a, c, g, or t
tgtgaaaaaatttgtatttgtaatccncnttacaatancactaatatccantaacacacaaattgtactgtagcagaaagtagtaattccacctnagggtttaatcatnttatcaantgcttgtaaacatgtgcaaggaaggaggtcagagcccgntgcaatctttcaactaaagctgtcacnacaactttttttgcttcactantttgcgcatgtgctactaatagaggttacacaataggactatttatatactcagaaaaattctgaatgatgtcttctaacctaatgtgagaactggcagcaaagggaaagtacaaagctatgggacacggacactttgatccatcaattacagaacattcatttaaacactccaaggattaagagaggtagcaatttaacatcaccttcataatcaagggccaggtaaagtctaatgatttaaagcctttcaaggtacatgtgaagaaatggaaacagcctaaccacgagaaaggccgataccccaatttgggacntgccctcnttttatttata

SEQ ID NO: 60382 - DNA, 577 bp, Homo Sapiens
  misc_feature (503)..(503): n is a, c, g, or t
  misc_feature (529)..(529): n is a, c, g, or t
  misc_feature (553)..(553): n is a, c, g, or t
aaacttgatctctaggaggaaagaaaaaaaaggcctgggtcccagaaaactggttgtagccctagcttcttaatttattggccatgtgactatagactatttgcttactcgctctggtcctcagttttctggtctgcagaatgggtatcttgatgtgtgttgttcttctcctccacgatatgaaaccaaaggcctttatagcttgttttctgaggctccttccaggtgaaaatcctataactcccaataaaacagctggagaggctgtctctactgccttttctgtctacccaggagtttccttggttgatgggaagctgtttaagaactgaaatgagagagaagaggcagacagacccaaccgctacagctcctatcagaaagggcagcgcccgtggaattgtaggtagcctgttactggctcagagaacaagcaggcctacttatgttaaaccaaaaaccagatgaaaaatgaaagcgccctctctgctgcataaacattntatgtagcttctatcatcattccttntgggaacattctttagtagcacanactggtaatctcccacttgtcttc

SEQ ID NO: 60383 - DNA, 400 bp, Homo Sapiens
  misc_feature (369)..(369): n is a, c, g, or t
  misc_feature (381)..(381): n is a, c, g, or t
  misc_feature (388)..(388): n is a, c, g, or t
ctaactgaattcatcataccaagttcctcagtgattcaaccttcctggtataatagaaacaaacacaatagcttcctcccataaaacgttaactactaaggtctcatgcaattcagttttttaaaaaatacaataaagaagctatacaatgtcagcacatgaataaatcaccatagcattatttagctatgaagtgcttgtaagattctccccggggcctgaaagcttaaggagatgaataactcctctcttctcaggcccagttccaaggtgcaacttggggcagcaacttgcgccagcaagacagcagaaggaggaagagagtccgcctgaagacaagtactcctaaagactgagaaagaggccatncgggtacaacantagcagntacgtcagacta

SEQ ID NO: 60384 - DNA, 521 bp, Homo Sapiens
ttttttttttttgagagggtctttctctgcccaggctggagtgcagtggtatgatgactgctcactgcagcctcaacctcccgggctcaagtgatcctcttgcctcagcctcccaggtagctgggaccacaggcatatgccacaatgcctgactagtttttatttatttttatttttttatagagacagagtctcaccatgttgctaaggctggttttgaactcctgggctcaggcaatcctcctgcctcagcctcccaaagtgctgagattacaggcataagccaccgcgcccagcctgaaatgttcattttaagtgtttattgtcctgtatgttttgaaatttttactgactatatgtaacaaatttgtcactccatctaggcacaagtgttttaggtgagcataaatttttttttttgagacagagtctcgctttgtcaccaggctggagtgcaatggtgcgatcttggctcactgtaacctctgcctcccagattcaagcaattctcttgccttagc

SEQ ID NO: 60385 - DNA, 1511 bp, Homo Sapiens
gaattccgggcacccctcgagcgagcgagctagccagcaggcatcgagggggcgcggctgccgtccggacgagacaggcgaacccgacgcagaagagtccaccaccggacagtcaggtagccgccgcgtccctcgcacacgcagagtcgggcggcgcggggtctcccttgcgcccggcctccgccctctcctcctctcctttccccttcttctcgctgtcctctcctctctcgctgcccgcgtttgcgcagccccgggccatgtccgacgcgtccctccgcagcacatccacgatggagcgtcttgtcgcccgtgggaccttcccagtactagtgcgcaccagcgcctgccgcagcctcttcgggccggtggaccacgaggagctgagccgcgagctgcaggcccgcctggccgagctgaacgccgaggaccagaaccgctgggattacgacttccagcaggacatgccgctgcggggccctggacgcctgcagtggaccgaagtggacagcgactcggtgcccgcgttctaccgcgagacggtgcaggtggggcgctgccgcctgctgctggcgccgcggcccgtcgcggtcgcggtggctgtcagcccgcccctcgagccggccgctgagtccctcgacggcctcgaggaggcgccggagcagctgcctagtgtcccggtcccggccccggcgtccaccccgcccccagtcccggtcctggctccagccccggccccggctccggctccggtcgcggctccggtcgcggctccggtcgcggtcgcggtcctggccccggccccggccccggccccggctccggctccggccccggctccagtcgcggccccggccccagccccggccccggccccggccccggcccccgccccggccccggccccggacgcggcgcctcaagagagcgccgagcagggcgcgaaccaggggcagcgcggccaggagcctctcgctgaccagctgcactcggggatttcgggacgtcccgcggccggcaccgcggccgccagcgccaacggcgcggcgatcaagaagctgtccgggcctctgatctccgatttcttcgccaagcgcaagagatcagcgcctgagaagtcgtcgggcgatgtccccgcgccgtgtccctctccaagcgccgcccctggcgtgggctcggtggagcagaccccgcgcaagaggctgcggtgagccaatttagagcccaaagagccccgagggaacctgccggggcagcggacgttggaagggcgctgggcctcggctgggaccgttcatgtagcagcaaccggcggcggctgccgcagagcagcgttcggttttgtttttaaattttgaaaactgtgcaatgtattaataacgtctttttatatctaaatgtattctgcacgagaaggtacactggtcccaaagtgtaaagctttaagagtcatttatataaaatgtttaatctctgctgaaactcagtacaaaaaaaccgggattccggcc

SEQ ID NO: 60386 - DNA, 474 bp, Homo Sapiens
aaaaattcttataagactgtacagaaaacattgtaaaatttagagaagctaaagaagtgcagtcctatgctacacagatggaagggaagaatatcctacacaggtaattgggtatggcaagcaaggctagaactgaggaaaaacagaatcaggcccagcctaaaagcagcacactactgacatatggaaatgtagatttccattccacaaatcttactatgtttctaagagaaactagaagtccagatttctatggaaattcttttttcttttttatgtactggcagaaacaattttaaataccacacaggacaaaaaagaacacatctgtggaagaatttggccccgagccaccagttttctactcctgcaatctacctacttatctttagataattcattaatatttctgggttgtgcttaacctacacacgcaaaaggttacacacactacaggaaatctatcaccacttt

SEQ ID NO: 60387 - DNA, 441 bp, Homo Sapiens
tcatgatcacacagaacttttgtatctcctaaagcaaggttaaaaatccttggattttgcttgccttttatacatcaataataattttttagaaaaactgtatttttaattatgtcacaaaatataaaagtcttcctttgttgatctcaaaacaaatccttctaatttttagtttattgttttctttttttttttttttgagacagggtctcattctgtcaccaaggccggagcttaatagtgtgatctcagtgatcttcctgtctcatcctcccaagtagctgggactacaggagcatgccagttttttttttcttttctttttttgtaaagacagggtatcaccattgttacccaggctggtcttaaactccaaactcctgggctcaagctatccgcccatttctgtctctcaaaatgctgagattacaggtgcaagcc

SEQ ID NO: 60388 - DNA, 2649 bp, Homo Sapiens
caactgattttaaactctacagagatgcctacttgtttctactatgtcttgtggcagttgctggcattgggtttatctacactattattaatagcattttaaatgaggtacaagttggggtcataattatcgagtctcttgatattatcacaattactgtgccccctgcacttcctgctgcaatgactgctggtattgtgtatgctcagagaagactgaaaaaaatcggtattttctgtatcagtcctcaaagaataaatatttgtggacagctcaatcttgtttgctttgacaagactggaactctaactgaagatggtttagatctttgggggattcaacgagtggaaaatgcacgatttctttcaccagaagaaaatgtgtgcaatgagatgttggtaaaatcccagtttgttgcttgtatggctacttgtcattcacttacaaaaattgaaggagtgctctctggtgatccacttgatctgaaaatgtttgaggctattggatggattctggaagaagcaactgaagaagaaacagcacttcataatcgaattatgcccacagtggttcgtcctcccaaacaactgcttcctgaatctacccctgcaggaaaccaagaaatggagctgtttgaacttccagctacttatgagataggaattgttcgccagttcccattttcttctgctttgcaacgtatgagtgtggttgccagggtgctgggggataggaaaatggacgcctacatgaaaggagcgcccgaggccattgccggtctctgtaaacctgaaacagttcctgtcgattttcaaaacgttttggaagacttcactaaacagggcttccgtgtgattgctcttgcacacagaaaattggagtcaaaactgacatggcataaagtacagaatattagcagagatgcaattgagaacaacatggattttatgggattaattataatgcagaacaaattaaagcaagaaacccctgcagtacttgaagatttgcataaagccaacattcgcaccgtcatggtcacaggtgacagtatgttgactgctgtctctgtggccagagattgtggaatgattctacctcaggataaagtgattattgctgaagcattacctccaaaggatgggaaagttgccaaaataaattggcattatgcagactccctcacgcagtgcagtcatccatcagcaattgacccagaggctattccggttaaattggtccatgatagcttagaggatcttcaaatgactcgttatcattttgcaatgaatggaaaatcattctcagtgatactggagcattttcaagaccttgttcctaagttgatgttgcatggcaccgtgtttgcccgtatggcacctgatcagaagacacagttgatagaagcattgcaaaatgttgattattttgttgggatgtgtggtgatggcgcaaatgattgtggtgctttgaagagggcacacggaggcatttccttatcggagctcgaagcttcagtggcatctccctttacctctaagactcctagtatttcctgtgtgccaaaccttatcagggaaggccgtgctgctttaataacttccttctgtgtgtttaaattcatggcattgtacagcattatccagtacttcagtgttactctgctgtattctatcttaagtaacctaggagacttccagtttctcttcattgatctggcaatcattttggtagtggtatttacaatgagtttaaatcctgcctggaaagaacttgtggcacaaagaccaccttcgggtcttatatctggggcccttctcttctccgttttgtctcagattatcatctgcattggatttcaatctttgggttttttttgggtcaaacagcaaccttggtatgaagtgtggcatccaaaatcagatgcttgtaatacaacaggaagcgggttttggaattcttcacacgtagacaatgaaaccgaacttgatgaactaatatacaaaattatgaaaataccacagtgttttttatttccagttttcagtacctcatagtggcaattgccttttcaaaaggaaaacccttcaggcaaccttgctacaaaaattatttttttgttttttctgtgatttttttatatatttttatattattcatcatgttgtatccagttgcctctgttgaccaggttcttcagatagtgtgtgtaccatatcagtggcgtgtaactatgctcatcattgttcttgtcaatgcctttgtgtctatcacagtggaggagtcagtggatcggtggggaaaatgctgcttaccctgggccctgggctgtagaaagaagacaccaaaggcaaagtacatgtatctggcgcaggagctcttggttgatccagaatggccaccaaaacctcagacaaccacagaagctaaagctttagttaaggagaatggatcatgtcaaatcatcaccataacatagcagtgaatcagtctcagtggtattgctgatagcagtattcaggaatatgtgattttaggagtttctgatcctgtgtgtcagaatggcactagttcagtttatgtcccttctgatatagtagcttatttgacagctttgctcttccttaaaataaaaaaaaaaaaaaaaaa

SEQ ID NO: 60389 - DNA, 2462 bp, Homo Sapiens
ataagcaacatgaccagcagccacgtttgttgtaattttttaaatatgtggaaaaaaagcaagatatcaaccatgtattaccttaaccaagatgccaaattatctaacttgtttctccaggcaagcagcccaacaacagggacagctcccaggagccagtcaaggttgtctgtctgtccatccactcaggacatctgcagaatctgtcactgcgaaggggatgaagagagccccctcatcacaccctgtcgctgcactgggacactgcgctttgtccaccagtcctgcctccaccagtggataaagagctcagatacacgctgctgtgagctctgcaagtatgacttcataatggagaccaagctcaaacccctccggaagtgggagaaactacagatgaccacaagtgaaaggaggaaaatattctgctctgtcacattccacgtaatcgcaatcacctgtgtggtttggtctttgtatgtattgatagaccggacagcggaggaaatcaagcaaggcaatgacaatggtgtccttgaatggccattttggacaaaactggttgtggtagccattggcttcacaggaggtcttgtcttcatgtacgtacagtgtaaagtctatgttcagttgtggcgcaggctgaaggcctacaaccgtgtgatctttgtacaaaattgcccagacactgccaaaaaactggagaagaacttctcatgtaatgtaaacacagacatcaaagatgctgtggtagtgcctgtaccacaaacaggtgcaaattcactgccatctgcagagggtggcccccctgaagttgtatcagtctgatggaacctgttgggagtttcttcaccgaagaatatctttctagccctcagccactacaaatgacagaagtgatcttgaattatttactcccttcagctcctcctttctcctactgacacatttttcctgactttgttcaaagaggaaaggagaaaaacaaacagaccaaatgcccaggagcccatgaagtaatagcgtaaagtaaagtatgatatggaaatgtgaagtttgcaagagaatgatttccaagacaattaagaactactggggcaatgaatgcttttaggcagtaatcaaagattaaatggaccatgatactcttcttcacagtaacaggggaaaagttcaagaatacagacttgaattgcgatgtgtattacttctagggccttgtaatgttaactgtctcatctggaaataataactaacatatttggttttaagcctgaaattgtctgcattatccctaagtcacattggaagtgaacttggaggatgcatattttgatatgctttgacagctaacagatttgtatggtttagtggagtctggttattttgacagatgcatgtcttttttttaaatagatgcaatatacatttgaagacattgatatttggaattaattatgtttgtttaagtcacgcaaaagattttcagaaaatgttcggatataattagctctgttaaatacccacagaactgttatcaggtcttatattttcatctggttcctctaatacagtgctgtccaatagaaacacaacagccacaaatgcaggccacagatacaaatatttaacttcccagtagccctattttaaaaagtaaaaataaatgtttgtttgttaaaatgaattttgattttttaaaaacactatatgttatttcaacgtcatcaatataaaaaaattgattgattgattgatagtttacatctgtttcttgaaccaagttttcaaaatccagttggtaatttaaaagtacacttcacttcaacttgaattaactatattggatagcacagccgtaaaattagagactaagcttctgctttatttaacagttgttgagtatttcaaaacagtttaattcattcttttatttcaaagtctcacaaaagttagttatgatttttaaaagcattaaattaagtgtcctcattttaaagtcagatgaagttcacatctctaaagggtaaaaatccaaaagtatagaaagataaaacaatctgcctatagcagagttgtgaaataaataaattgttactatgaagtacttacaataggggaataaaattacctatttttgttattaaatcaaatgtgtaaggcttatttcatccatatgaggtgtcaacttgacagatgatgagtaattatgactaagaatctagcccttacttttaaaagctgacaggatttcccttgctcagttagaaaacaaaaatattcaacagattctgtgataagtaattaatcgtttaggtttgacagttgattattgtgttctttgcatattcatgtaaaactgatgtgtgaatgacattgcagtgagctagattaacggtgattatagatacagtagcctgtcaaagaaagatgtcctacattaaaaaaaggacttaaaaaaa

SEQ ID NO: 60390 - DNA, 521 bp, Homo Sapiens
  misc_feature (2)..(2): n is a, c, g, or t
  misc_feature (5)..(5): n is a, c, g, or t
  misc_feature (379)..(379): n is a, c, g, or t
  misc_feature (404)..(404): n is a, c, g, or t
  misc_feature (458)..(458): n is a, c, g, or t
  misc_feature (466)..(466): n is a, c, g, or t
  misc_feature (473)..(473): n is a, c, g, or t
  misc_feature (490)..(490): n is a, c, g, or t
  misc_feature (505)..(505): n is a, c, g, or t
tnaanagacagagctagctctgtcacccaggccagattttagggagtctcactatgttgcccaggctggtctcaaactcctgccttaagcaatcttcccaactcaggctcccagagctttaggatttcagtaggattataggcatgagcaccgtgcctggccaattgtttatgtctttatgcaggactaaagtgaagagactggactaatcagactaaaattatatgcatgaaattctgcatacacatgaagaatttgcatctttctaggaaagtgggtctaaagcttccatctgattatcaaagaggcccatcagcccaaaaggaaggttaaaacctgggggactgggaattaatctcccaagggttcattcaagganttattaaccattaccaattttgtgncttcttgggcagtggcctacaggaatgtttatctccatgttatcccttttgatnctggaggnatcgtgnctccggctccaataccngctcaggctcccagnctctgggttttggggt

SEQ ID NO: 60391 - DNA, 425 bp, Homo Sapiens
ttttttttttttttttttttttttttttttaccaacaaggacgttttattgaacaaatttatgtacagtacaaaaaattttttgaaatgagacactattgttgatttattgcagttcaatggctcagttttaatttgtacttttataaaatgcaaagtaaaataatttaacattcaacaaggaagcacaaatttcctttcttgctgaatctgtaatatctttcacatattaacaactccaaaatgcatatgcagcatttactcattctgaaaaggtgttttacagtaccaaataaattaaaaaataaacactatcatcccttttaggtttttcatccatacaacagtattaaaccaaacatgaaaggagtacggctgaaccttcagtgtgatttgaaaagaatcacaagttcaatgatataaatt

SEQ ID NO: 60392 - DNA, 902 bp, Homo Sapiens
  misc_feature (15)..(15): n is a, c, g, or t
gccctgcgcggcagnagcacagcgccgccatgctgcccgaccagcccccgcvcccgcvcgcgcccgccgcggccctcggcaagctgctgcagcgctagacgccgccccgccgctgcccccggggaaggagcgcaccccagaccgtcctggcttcgaacccagctcttccaccttcagaccaccaccgcatattctgagcctcattttccccgtctgcacagtggggataagaaagcctacctcacgttacgattttatacataggataaacgcaagattaaatggatatttggaaaacactcggctggttctcactcaacaccaccgcctttcccctcttgcttccgccccaggctttctgctgtgcgctccccacggaggcgggaggcgcctgcaccgtcctcggggactccgatcgccgttggaccgaaatcacctcggtggggaggacctgaccactcggagttcgccgacttgcgctcgggggtgacgggggccagggctgccgcgcgcaggggtctggggagcctccgggcggacgacccagcgagaccccgccggctcccggagtgtcctggggaccgccacctccaggagccccggtggtgatctcggtgaagcaggaggaggggaagcaggggcgcacgggcagaaggagccaccgagccgctcctccttgcggttttgcccgcacgcgcgtctgcccgcccacctttcctggggcggatgcgttcccgcagtgaccgcactcgcgattgtagaaaattcgctcccaattgttgaatgcttacataaactgcatagttacccatattttctactgttctcataagggaaaaagaaatgatttggaagaaaaaaaaagcctcaaactaaacaaaaacaaaaccagcagccctggs

SEQ ID NO: 60393 - DNA, 566 bp, Homo Sapiens
tttttttttagagtcaaggcctcaatctgttgtccaggctggagtacagtggcacaatgatagctcactgcagcctcagactcctgggctcaaaaatcctcctgcttcagcctctggagtagctgggacaacaggcgtgggctaccacacctggctaacaaatgagtttatgtcggctattctgttttctgacatggatcagacacaaggccatcttggttaagagggcagggcttgggatgagacatcccatcacttatcaagtgtgtgacttcatgtgagttatttctctttggtccttggtttcctcaactatgaaatggagttatgacagtacctacaatcctgtgtgaggactgactgactgactaatactttggaaagtccttagacctgtgtcaggcacacgatttctacaattacaatgtcattgtcagcagcaccctccctggtctagtctggccaccaccaactctaagaagaaggaaggaatggatacaggcaatggagctggggagaagaaatcagacataatgaacagtctgaccccatcatttgagacagac

SEQ ID NO: 60394 - DNA, 455 bp, Homo Sapiens
gatgcaactaatgcaattatttgcatagcaatttattaatttataatcaggatagtgtttcaaggccataaaatatcaatgtatcccatccagaaaagccccttccctgtcctggaggacaaagaaatcattagcaagtagcttggtagacatggagtccgtcttgaggaccatttccctgggccacggtaaagtctggcgaacaccactgtgctaagcagactcctaccaaatggagcatctggcaatctctgctttttttttttttaacctctgcatttttgaacgtcctttttttagggtcttaattgaccattcttctttgattcacatcatctttatgttgcccacactccaattctctgcctacttactcagttgtaatcacaatccagtcctgccttcctcaagtttcactggctcaccatggtagcaattcgtgtgtggtcccaatt

SEQ ID NO: 60395 - DNA, 2241 bp, Homo Sapiens
ttatgttacaaaatttacaagaacggttagaaaggaaaaagagaatagaagaaattatgaagcggacaagaaagacagatgtgaatgcctcaaaggtcacagaaacatccagccatgacatatatgaagaggctgaggctgacaacgaagaaagcgacaaggactcattgaatgaaatgtttccatcagccattctaaatggcacaggctcacctaccaaatttaaaatgccgttcaacaatgccaagaaaatgacacacaagctggtatttctagaagatggtaccagccaggtccgtaaagagccaaaaacatattttaatggcgatttgaaaaacttcagacaaaaaagcatgaaagacacttcaatacaggaagtagtttcaagaccatcttccaaaagaatgaccagtcacacaacgaaaaccagaaaggcggatgaaaccaacaccaccagcagatcctctgcacaaacaaaatctgaaggattccatgacatcttgccaaagtcctcagacacctttagacaataagagaagaagcaaacctgtttctcctcatttggatatgtaaaccttactcagcctgggagatgaatacatcttccactctggataactcaactcctgggcccatcagtcctcaaatttttctgcttctgacttgaacctggtaaaggaagtgacaccgaaaaattgaaagaaactgtcaaaaggccactttgatgtatatctcagatgttaaagtcatcttattctcttgtgtctaagcaagagttctaagtaaagagtggtttttgttttctttggaaaatcatcattgtctctcattcttgtgttgtcccaccaatgtgtttgctggagtgagtgcatcaaggatgctttcctgaaactgtaactgtggagtttctagaagaatctgattgcagaactaattctctttcagtatatatttgaaatcttaaagtaatgctttttctttttctttttcttttttttttttttgagacggagtcttgccctgtcgcccaggctgcagtgcagtggcacaatctcggctcactgcaacctccgcctcctcatctcaagcaattctcctgtctcagtctccccagtagctgggattacaggcatgtgccaccacacctggctaatttttttgtattttagtagagatagggttttaccatgttcaccaggctagtctcgaaatcctggcctcaagagatccacccgtcttggcctcccaaagtgttgggattacaggtgtgagccactgcacccagccaagtaatgctttttctgtgtaccagtgacaattttgacagctaaaaactcacagttgatcttgtagagaacataatagattatgcaagggccgcaggatcgctcacaagagctgtcagattgtttctaatataaaaataccaaaggttgcaaaatccagcaaattgtattttactgtgatatatgtatatttttaactctacccatctgtgccagtgagtacacaggcactaataacctgaaatgctgggagtcctgtaaagccccatcttggaacagtcagcacctttcatgctcttgtcagtgtttccttttgaagggcatattggtgtttatctacagaaacatatattatttttattgtgtacataaaggagtatatggctgttgtcccgtggggtatgtttaattcctctaaatgtttaaagtacttttctgcctgtactctccagttctgtcgttgagtatacactcaggcttgagatacaaccaaaatttgcttgcctttctctagccactggctgccagtgagttcgtgtgatgggcacacagaaatgcacacagatgtacatacacgtatgtatgcacacacagtatatgattccataaaattcaaatgcagattaattctcctaatgagttttcagtgttgaatcgtaaatagtctgaagcaggccagtgttccttttggctgccagtcttggattagtaaaaggaggtaattctttcagattccctggttctttgccactcagagtattgtacttttgatatagaatagagaaggttacctttggtttaaaaactatttttatatactagctctttcatgtataaaacagagacaatcatcctaacaaaagagttcctgttatttttctgcacaaatgtcttgtgttgaaacactgttacagttccatataaatgtgtgctatataaaataaactttggagat

SEQ ID NO: 60396 - DNA, 427 bp, Homo Sapiens
gcgtcgacatagcctgagtctctgtttgaatgcaagtaaagacccttaaaatttgtttgccaagtatcatattagaattggtgtttttgttatccggcattaatacaaacttcatccaaaaaaaaaaaaagaaataggccgggcgcgagccaccgcgctcatagctgtagtcccagcactttgggaggccgaagcgggcagatcacaagatcaggagatcgagaacatcctggctaacatggtgaaacaccatctctactaaaaatacaaaaaattagctgggcatggtggcgggcgcctgtagtcccagctactcgggaggctgaggcaggagaatggtgtgaacccaggaggcggagcttgcagtaagccgagaccgtgccactgccctccagcctgggcaacagagcgagactctgtctcaaaa

SEQ ID NO: 60397 - DNA, 640 bp, Homo Sapiens
  misc_feature (2)..(2): n is a, c, g, or t
tnactgcaacctccacctccctggttacaagcgattctcccacctcagcctacccgagtatccgggattacaggcatgtgaccaccacacctggctgattttatgtattttattggtagagacaaggtttcaccatgttggccargctggtctcaaattcctggcctmmagcagtgctcctgtcttggcctcccaaagacgttgggattataggcaatgaaccaccamamccaaatactactgtgtraaatttaatatccaatgttttttcttctattacaaaagtatctttacaaacwtatcttaccctaagccattgaaattgttccatatttaagttgtactgaaaaaggatccaaatttacagtttctgctcagmtgtgtagcaaagtattaaggaaagggttacatgttcacactttraggccaagtggtagtractccaaggacaaaatgaacagtcaaaaaacagggctgtataatccatccattctttccaacagtagaatttcctccaattatcaattmtrgagattctggggttattcaattaagaagagtaacacatacttcagtcacatgaggacactctcaaaatacaagtatgaaaataacaaaactcctmataacaatgtcaagt

SEQ ID NO: 60398 - DNA, 503 bp, Homo Sapiens
tttttttttagtataagcatatcccatgcaatttttggaacatatactgaaaaattatactgaaagtcaaatcaaactgatctggcaaccctatctagttacctacaatctaccgtgttcccataaaggctttaagtaatttggaatccgttaacacatttagcttattctttccccattggttccctgggcttagagcagacagcaagcctttctttcacttggccaagaaggcacctccttttcccatctaacaggttgggatcacagctagttggtggcaaagcagtccacatgcatgttgtttatctttttaaggatatggtcatagtttccacccctccttacctctcctgactcaccatctctaagccttcccacacaggccctgctgcagccgccggagaactgaccgtgcttgtgggtccactccctcctcccacatcttccttaagcctcaatccatcccagttcatccatgccctttccaaagtcctgtgatt

SEQ ID NO: 60399 - DNA, 535 bp, Homo Sapiens
  misc_feature (423)..(423): n is a, c, g, or t
  misc_feature (476)..(476): n is a, c, g, or t
  misc_feature (516)..(516): n is a, c, g, or t
aagcggcagaatcttgctccaggatcaagtgcagtggcacaatcatagctcagtgtaaccctgaactcccgggcttaagtgatcctcccacctcagccacctgagtagctgggactaaaggtgtgtgccaccatacccagctaagattcatttttatagtctaattattttatattagtttttaacacaattgcagattttgcatgtttattctaaacaacaatttgccagttactggaggataagactgttaaactggcaattttctatataaaaggttactatattagaatggcagcaacagccagagatttgggatacaatcttaaatggacagaagtaaaacaaaaagtttacacaagagagctggatccttaatttagattcaaggagttttgggcaaacagggttatgtggaggggnaaaaccgggaaatttttttccagcccctacaggcccgtatggttcccccggtngtaaccactccagccttagccctttggtaatggtgggaancggcccccaaaccaaccgg

SEQ ID NO: 60400 - DNA, 389 bp, Homo Sapiens
tttttttttttttttttccccgaagcaggcagtcctcctgttgaggtggagtgtgtatgttcaacttccctctgggccgcaccaacatcacccaggcaaaagtggagcaatgactcacactgttttgttgcagatgggtgggacggaagttcagctccactcttagtcccaatgaaagtagggcaccaacctgtatcacctcactgcctctgagtaggggtgtaagctcacctccctgctgggccccactgatgacagggaggaggaaagcagagggctgactcaaacttctttgttgctgcactataaagccaaaagctcagctccccaaaggacccagctaacaacaggggagggtagagaaggaagcagaatgccacctcgttccg

SEQ ID NO: 60401 - DNA, 556 bp, Homo Sapiens
ttttttagtcaatcaacatttattgatcacttattatgtaccaggcactgggataaagatgactgttagtcactcacagtaaggaagaaaactagcaaataagacgattacaatatgatgtagaaaatgctaagccagagatatagaaaggtcctattgggtccttctgtcaccttgtctttccacatccctacccttcacaggccttccctccagcttcctgcccccgctccccactgcagatcccctggatttttgcctagagctaaacgaggagatgggccccctggccctggcatgacttgaacccaaccacagactggaaaggagcctttcgagagtggatcactttgataagaaaacacataggaatgaagagaagtccacaaatggccacccgtgctggtgctcaagaaaagtttgcagaatggataaatgaaggatcaaggaattaatagatgaataattgaatggtggctcaatagatgacttcatgaatgagtcagaaaataaacttccaatcttgaggcaaaactgaattttagcatttccaatg

SEQ ID NO: 60402 - DNA, 508 bp, Homo Sapiens
tttttttttttttttttggacatgttttccagtttttattaggatatttggcatggtacagataacaacttgtcccttaccaccaaacacataatagctggtcaaaatgattattttcaaaggaaactatttaaaataaagccactagtacatataaattaggaaagaaaagtcaagctggagccatcttgatattctaatgagcaggcctatctagttctacatcttttttttttactgtatgcaagacctttaatatatattgctccaactggccagtagaaataacttaaaagtaaccgcatcatacacccagtaaatctttctcttagaaatgaacagagaacaattctttagaatgcctctcagggagaaaatgagaagttttgagaagcagttttgtttgggtcaaggggtactttcaaattacacttatgagtcagtatctataaaaagtttcagaagtacctacaatttagccctctacatccaagcagtagctttgcag

SEQ ID NO: 60403 - DNA, 478 bp, Homo Sapiens
cccactactaacacatcccaatggtagatatgtataagtgaaatgagtgcgttcttcctgcccctataatgacaagcctgacagagaacacatcacacagaagaatgtgccaagaatcaagacctcttagaagaatgttagaaagttttctctccaaatggattctgtctaagtaggaaggccttggaactagaaaggtctaagatcaaatttatgacttgaaaactctatggctttgggcaaattatctgaacttaattctggactcaatttcttatctacaaaatgggaattaaggcatcaacctcaaagggttgtttaaagaatgtgattatgtatttctgtaaagcacattgcaaagtatctgacacatagtaggtactctctgtaaatattagcttcacttctctcactcctccaactgaactgcagttatgtaaagaaaagcaagcatccagcagttttgaagaatgtttgg

SEQ ID NO: 60404 - DNA, 481 bp, Homo Sapiens
gagttctattgcacagcatggtgaatagttaacagagtactgtatgtttcaaaattgctgagagagtacatttcaaatgttctcaccacaaaaaatgttaagcatttggggtgatgagtatgttaactagtttgacttaattattccacactgtatttatagattataacattactttgtaccccatacatttatgtcatatgtaattgtcaatttacaataaaaagaaaaaaagagatccctctacttgtatacacgctattctaaaaacctgtgccaaatctgatcatatacaagagcacagtagtcccagctaccaaacaagacctcagactggcccccttgctaatttactcatctcaccgggaccttatcttccttgacgtaacttggaataaattaccaaactcacacatctaggttgggttttgtctgagatagcaataataaaccatgtgccgagtacagtgcaaaacatgca

SEQ ID NO: 60405 - DNA, 471 bp, Homo Sapiens
ttttttttttttagctcatcagctattgttagtgttagtgtattttatgtgtggctgaagacaattttcttcttccagtgtggcccagggaaaccaaaagattggacacacctgctctagccaacgttcattccagccctcctgtgtcaatctgctcttcaactcagcctttcaacacactcaggtcctgcttacctgggcagtttgtggcaggagctgtggaggctagggcatacccccttccaccctctccaaagcattacttttactattaatataataactttggaggtggcaaagagaaatttatgttagagcaaaactacaaaaactctcatagatctgatactgatgacttgtacacttcagatcattatcagtgatgtagaatacaacgtattctcagctagcacgttctgctaccaattagctgctttttacagtgctaacgtacacattctgtcaccttaa

SEQ ID NO: 60406 - DNA, 455 bp, Homo Sapiens
taaaagaaaagcaattcatcacttttgaattccttataaaataactgtttcaagtaatgattattaatggatagaaccattagttaaaagcatgccagggaactttacaacggaggaatcagctgcaaccactggagcccatcacttaaagtgggggcaaccaggtattgtaagcctcctgatgtaatagggaccacacggtattagctgtgaaataatcttgctaaaacagtttaaccaaaaacagaatagaggatcaagctaataacactaagggaataaaaaaaaatttccatactcctaggaaaagactaattgttatgtaaccatggtaacaagagaaccaccagaactggttttaaatcctttcagttggtttaaaatccattgaattgatcaatgacaacttgcctggtgaacacctgcaaagatgagtaactgctctttgtctctga

SEQ ID NO: 60407 - DNA, 3544 bp, Homo Sapiens
gttgactgtgacacgggtgttacatatcttcctgtgccccttctccctgtagggtgaagctctgggcctcggcttttggtggggagataaaatccattgctgctaagtactccggttcccagcttctgcaaaagaaatacaaagagtatgagaaagacgttgccatagaagaaatcgatggcctccaactggtaaagaagctggcaaagaacatggaagagatgtttcacaagaagtctgaggccgtcaggcgtctggtggaggctgcagaagaagcacacctgaaacatgaatttgatgcagacttacagtatgaatacttcaatgctgtgctgataaatgaaagggacaaagacgggaattttttggagctgggaaaggaattcatcttagccccaaatgaccattttaataatttgcctgtgaacatcagtctaagtgacgtccaagtaccaacgaacatgtacaacaaagaccctgcaattgtcaatggggtttattggtctgaatctctaaacaaagtttttgtagataactttgaccgtgacccatctctcatatggcagtactttggaagtgcaaagggcttttttaggcagtatccggggattaaatgggaaccagatgagaatggagtcattgccttcgactgcaggaaccgaaaatggtacatccaggcagcaacttctccgaaagacgtggtcattttagttgacgtcagtggcagcatgaaaggactccgtctgactatcgcgaagcaaacagtctcatccattttggatacacttggggatgatgacttcttcaacataattgcttataatgaggagcttcactatgtggaaccttgcctgaatggaactttggtgcaagccgacaggacaaacaaagagcacttcagggagcatctggacaaacttttcgccaaaggaattggaatgttggatatagctctgaatgaggccttcaacattctgagtgatttcaaccacacgggacaaggaagtatctgcagtcaggccatcatgctcataactgatggggcggtggacacctatgatacaatctttgcaaaatacaattggccagatcgaaaggttcgcatcttcacatacctcattggacgagaggctgcgtttgcagacaatctaaagtggatggcctgtgccaacaaaggattttttacccaaatctccaccttggctgatgtgcaggagaatgtcatggaataccttcacgtgcttagccggcccaaagtcatcgaccaggagcatgatgtggtgtggaccgaagcttacattgacagcactctccctcaggcacaaaagctgactgatgatcagggccccgtcctgatgaccactgtagccatgcctgtgtttagtaagcagaacgaaaccagatcgaagggcattcttctgggagtggttggcacagatgtcccagtgaaagaacttctgaagaccatccccaaatacaagttagggattcacggttatgcctttgcaatcacaaataatggatatatcctgacgcatccggaactcaggctgctgtacgaagaaggaaaaaagcgaaggaaacctaactatagtagcgttgacctctctgaggtggagtgggaagaccgagatgacgtgttgagaaatgctatggtgaatcgaaagacggggaagttttccatggaggtgaagaagacagtggacaaagggaaacgggttttggtgatgacaaatgactactattatacagacatcaagggtactcctttcagtttaggtgtggcgctttccagaggtcatgggaaatatttcttccgagggaatgtaaccatcgaagaaggcctgcatgacttagaacatcccgatgtgtccttggcagatgaatggtcctactgcaacactgacctacaccctgagcaccgccatctgtctcagttagaagcgattaagctctacctaaaaggcaaagaacctctgctccagtgtgataaagaattgatccaagaagtcctttttgacgcggtggtgagtgcccccattgaagcgtattggaccagcctggccctcaacaaatctgaaaattctgacaagggcgtggaggttgccttcctcggcactcgcacgggcctctccagaatcaacctgtttgtcggggctgagcagctcaccaatcaggacttcctgaaagctggtgacaaggagaacatttttaacgcagaccatttccctctctggtaccgaagagccgctgagcagattccagggagcttcgtctactcgatcccattcagcactggaccagtcaataaaagcaatgtggtgacagcaagtacatccatccagctcctggatgaacggaaatctcctgtggtggcagctgtaggcattcagatgaaacttgaatttttccaaaggaagttctggactgccagcagacagtgtgcttccctggatggcaaatgctccatcagctgtgatgatgagactgtgaattgttacctcatagacaataatggatttattttggtgtctgaagactacacacagactggagacttttttggtgagatcgagggagctgtgatgaacaaattgctaacaatgggctcctttaaaagaattaccctttatgactaccaagccatgtgtagagccaacaaggaaagcagcgatggcgcccatggcctcctggatccttataatgccttcctctctgcagtaaaatggatcatgacagaacttgtcttgttcctggtggaatttaacctctgcagttggtggcactccgatatgacagctaaagcccagaaattgaaacagaccctggagccttgtgatactgaatatccagcattcgtctctgagcgcaccatcaaggagactacagggaatattgcttgtgaagactgctccaagtcctttgtcatccagcaaatcccaagcagcaacctgttcatggtggtggtggacagcagctgcctctgtgaatctgtggcccccatcaccatggcacccattgaaatcaggtataatgaatcccttaagtgtgaacgtctaaaggcccagaagatcagaaggcgcccagaatcttgtcatggcttccatcctgaggagaatgcaagggagtgtgggggtgcgccgagtctccaagcccagacagtcctccttctgctccctctgcttttgatgctcttctcaaggtgacactgactgagatgttctcttggcatgctaaatcatggataaactgtgaaccaaaatatggtgcaacatacgagacatgaatatagtccaaccatcagcatctcatcatgattttaaactgtgcgtgatataaactcttaaagatatgttgacaaaaagttatctttttactttgccagtcatgcaaatgtgagtttgccacatgataatcacccttcatcagaaatgggaccgcaagtggtaggcagtgtcccttctgcttgaaacctattgaaaccaatttaaaactgtgtactttttaaataaagtatattaaaatcataaaaaaaaaaaaaaaa

SEQ ID NO: 60408 - DNA, 343 bp, Homo Sapiens
tggctgtgtagttaagaattaagaattgggttttttaaagttgtggagagtaactgatgaggagatgggacagcataatattcaactacggtatttctttttcaaagcttattcaggtaaaacagtttcattaaagggtagaggccctctttagcaacatgctagtggagaatacccccctttgcctgcccaagacatacagaaaagaaggattgtagaaggtcccacgaaaacattagaattaggaggctggaatttaaacttagcaaaggaaagcagtatcggaacagtggtttcaagaacccagtcacgtcgcacattctcaaggatgctgctgagaaaa

SEQ ID NO: 60409 - DNA, 454 bp, Homo Sapiens
tttcacaaatccatcttattccttcaaaacaatttttggggcaaaaaaaagttttaaccaaaacaccacacattacaaagatatatattattattaaacttactaacccctccaggaaggactaccagcagaagagctagagctcctacctcatgctacaagaaggtctattagcaagaaggaattgtttgtgggcacaatatgaaaactatttgctcccatgtaattccaaaaataagattccttctgatgatgtttctactatttcaaaataatttaaatttcttcaaatgcacactgattaatattcttatcagagtaaacccacaaagcagtgaatttgccccacaagctgcataataaatatgatgtaaattaaaaacagacatactatgctggaaatgttctagatcttgatctgggcagtggtttacagagctatgtaaatgtaaaa

SEQ ID NO: 60410 - DNA, 454 bp, Homo Sapiens
cttcttaatagacgtggcaaaaaaaaaaaaaaaaaaaaaaccctctgcccagtgacagcacttccatataatcaggttgggggaaggagcatgggttggcagccagtgggaagtgggagggggggttgaataaggaaatcaatttcagcttgaaagctctgaaaggagaggggacgtgtgaatggctttttaagtggcatcattaaacctgggcagaaaggtcgattgggcacagcaaaccgcataaatacaaacagaggacatttatgtctggcagaattgtttttcatttttgtttttttgtttttttaaatcactgaggtagaagactgataggcttcttaccaccagaaatcacatctatggaaaggaattgtttggagaaataaaatccacaggcatctttcccaaattaaaagatagaatccaataatatcttggtatttttcctttt

SEQ ID NO: 60411 - DNA, 540 bp, Homo Sapiens
  misc_feature (10)..(10): n is a, c, g, or t
  misc_feature (43)..(43): n is a, c, g, or t
  misc_feature (247)..(247): n is a, c, g, or t
  misc_feature (308)..(308): n is a, c, g, or t
  misc_feature (361)..(361): n is a, c, g, or t
  misc_feature (412)..(412): n is a, c, g, or t
  misc_feature (439)..(439): n is a, c, g, or t
  misc_feature (489)..(489): n is a, c, g, or t
  misc_feature (494)..(494): n is a, c, g, or t
  misc_feature (520)..(520): n is a, c, g, or t
  misc_feature (532)..(532): n is a, c, g, or t
tttttaattnattgagaccaggtcttgcgtttgttgcctaggntagccacaaactcatggcctcaagtaatcctcctgcttcggcctctcaaaagtgctgggatgacaggcatgaaccaatgcacctggcctaaattacttaatttcatcatctatattatgaaatgataaagttcaataaaaaggctatgagaagtaactaaaattataccttagcacagaccccagtgcatataaaatattcaantttaccacccactttgtattctatctagagaaagtaaagagagaactctgaggcaagggantgcaagttccctaactttatttcagttccagcttccactgaggctgcagccgntttcagggggcaaaaacggctttctttcggaaattggattttgagggaaanaaaggacacctggccaaggggcccttntccacaggtacacatttttggatggggcccttaggggggtcattcagttnggggnaggtggccctcactttttatgtgggngtgatctggggngcgtgggg

SEQ ID NO: 60412 - DNA, 463 bp, Homo Sapiens
acaatttcaactatctgcctatccatgtgaaacatataaaactttagaatggtggttctgaatgctgactgtgcactgtggagttctttaaaaacagatccccaggctccacaccagaggtgtctgacttgggtctcgggtgagcttaggcttgaagctgtggctgatgttttttaggagccgtaggtgcatataaagcacagtctcaggaatcggctttggaatacagtttaaaaaaaaaaaacactatatttttcaaagatatatattttttaaatatttatattacttctataacaaacaattcagttttaaaaactcatatgaccaacatattttaaatcaccattgtattgcatgggtctttagaaatataattgcaacaatcactgtcaattttttggccaaataattagtcatcaatattggtgaatttctaaaatatgcttgcagatgtaaaatt

SEQ ID NO: 60413 - DNA, 2296 bp, Homo Sapiens
cctactggagatcgcggcggcctcgcgggcggtctggtcggtgaggtcttggccgcgcgcggcaatgctgaggctgctggcgtccgggtgcgcccggggcccggggcccggcgtgggcgcgcgtcctgccgcagggctctttcatccggggcgccgccagagccgccaggcttccgatgcgccccggaaccagccccccagccccgagttcgtggcccggccggtgggcgtctgctccatgatgcgcctgccggtgcagacctcccccgaggggctggacgctgccttcatcggggtgcccctggatactgggacctccaaccggcctggggcgagattcggacctcgccgcatccgggaagaatcagtgatgcttcggacagtcaatcctagcacgggggccctccccttccagtccctcatggttgcagacctaggcgatgtgaatgtcaatctttacaaccttcaggacagctgccggcgaattcaagaggcctgtgagaaaattgtagcagctggctgtattcctctgaccttgggtggagatcacacaatcacatatcccatattgcaagcgatggcaaaaaagcatggcccagtggggctgctgcacgtggatgcgcacacggacacgaccgacaaggccctaggagagaagctctaccacggggcgcccttccgccggtgtgtggatgagggtctcctggactgtaagcgtgtggtgcagattggcatccggggctcttccacgaccttggatccctacagatacaaccggagccagggcttccgggtagtcctggctgaagactgctggatgaagtcgctggttcctctgatgggggaagtcaggcagcagatgggaggcaaacccatttatatcagctttgatattgacgctctggatcctgcctatgcgccagggacagggacacctgaaattgctggtctcactcctagtcaggctctggagatcatcaggggttgtcaaggcctgaacgtgatgggctgtgatcttgtcgaagtttcaccaccgtatgatctttctgggaacacagccctgctggcggctaacctgctgtttgagatgctatgtgctctccccaaagtgacaaccgtctgagtcttgtgctcttcaagacaaaacagattgcgtcgctgacaagttctcaagaagaacttatgagtaagcagtctgagaactaaagagtttatgccaagaaaactttctgctgaaagtgtcattgctggctgtgaagtcgggataatcagtagaattctcacccaaacagcaacatttctaaggaacttggattaattgggggaaaaaaaaaggagtacttgtactgctttgattttttttcctttgatgaaagatggaggataaaggggaagtgaggagaatttctttcaagattatctaaacattagaaacatgacatttaaaaaaactatgaaataatactgtataagcattccatatttctatatcttccttttaaacattttttttttttgagatagagttttgcttgtcacccaggctggagtgcagtggcccgatcttagctcacgcctgtaatcccaggcctaggcgggaagatcacttgagatcaggagttcaagatcagcctgcccaacatggtgaaacctcgtctctactaaaaatacaaaaaagattagccagacgtggtgtggtgcacacccattgtcccaactacttgggaggctgaggcaggagaatcgcttaagcccaggaagcggaggctgcagtgagccgagatcgtgtcactgcactccaccctgggcaacacagtaagattccctctcaagaaaaaaaaaaaaaaaaattagttgagaaagaaaacccaactgttgtgcgtttgttggattttctctggaaacgccatccagtctgtaataaaatttcagttgtcattaccctggatggaattcatcttggctggagtgagtggcttcatgcagggcaaccccactgcaaagaatgtgagcatcagctaggctgacacaggggtccgcagacccaggcccctcattccatcagtttctttcagcatgtttccatgttttcatattttgaaaaaagtcaaaatccaaattgattttcaatgtgtttccctttggttattccccactcccatgcctgtcctctcttaaaatctctgttgttggtactgtttgtttttggctgttggaactgttgtgatcccccaccacaagcagattaaaaggtataccacattaagaagaaaaaaaaaaaaaaaaaaaaaaaaaa

SEQ ID NO: 60414 - DNA, 526 bp, Homo Sapiens
tttttactaaactccgaacattaatgctttctcattgtgggaaatgagagctgggataaagacatgctcaactcaacagaacaaacacaacctatatgtgactttatgttagtctaggaactgtgcactgatgcacacccaggaggcactaagttaacacacatgcatgcatacctgcctgcctgctgggtaaggagggctgggcaggggaggggggccgccctggctggggacacggctggggccattgttgccactttctcctctttgtagacatcaatttttacaaagggccgaatgataaaggtccacaagacctcacccagaacggctgttgcaggaagcagaggcctgagcagcctatagccagaagcccaggcagggggtgtgccaactacacaggcccacatgaagagactccatgaggaagacgttatggcaagaatcctctaagtctccaagggacgagatcagaacaatgtatggaaggtgaagtgatacagatttcagcttaataaaaggaagg

SEQ ID NO: 60415 - DNA, 1831 bp, Homo Sapiens
ctatgatgaaagcagccatcagtgagacggaagatatgccaatgtttgagcctaaaatgacacgctctaaactgaaggaagtagtggaaaaaggagtggtaattccaacatggaatatttcaccaattaagaaggccaatgaaattaagcctcctcagtttgtggatatccaccttgaagaagatgattcctcagatgaagaataccagccggatgatgaagaagaagatgatactgctgaagagagcttattggaaagtgatgttgaaagcactgcttcatctccacgtggggcaaagaaatccagattgaggcagtcttctgagatgactgaaacagatgaggagagtggcatattatcagaggctgagaaagtcaccacaccagccatcaggcacatcagtgctgaggtagtgcccatggggcccccgccccctccaaagccgaaacagaccagagatagtactttcatggagaagttacatgcggtagatgaggagctggcttccagtccagtctgcatggattctttccagcccatggatgacagtctcattgcatttcgaacgcgttctaagatgcccctgaaagatgttcccctgggccaattagaggcagagctccaagctccagacatcactccagatatgtatgaccccaatacggcagatgatgaggactggaagatgtggctggggggacttatgaatgatgatgtggggaatgaagatgaagcagatgatgatgatgatccagaatataatttcctggaagacctcgatgaaccagacacagaggatttccggactgaccgggcagtgagaatcaccaaaaaggaagtaaatgagctgatggaagagctgtttgaaactgtgagtaatgatcctcgagtgagaacatgggattttaagtcagttctccagcaagatgtgtcatttggtctctgtgatgctccctctaggagagggggtctgactgaaccaattctccttttagtctacctgggaaagaatataatgacaagggaattttgctaactactagactcttgattatatacatgtatgttgttcttattaacattttccttgaaacttctttttgtttgagggggttcttgctccatcacccaagccagagtgcagtggtgaaattacagctcacagcagccttgaccttctaggctcaagcagtccttcgtctaagcctcctgagtagctgggacataccaacacacccagctaattattttatttgtagagacagggtcttaccacattgctcaggttgttctggaacttctgggctcaagcaattttcctgccttgggcctcccagtgctggaattataggtgtgagccagcatgcctggcccctggaaaacttttgatgacttcccctactgtcatttggtgtgtccttaaagattgtcaactagttttaaactactttgtgtacaaataattacctttttcataaatttgtttcaaaagatttttcattttaagagattgatcattttgaggctgggtgcagtggctcacgcttataatcccagcactttgggaggccacggcaggtggatcatctgaggtcaggagtttgagaccagcctggccaacatgatgaaaccctgtctctattaaaaatacaaaaattaggcatggtggcgggcacctgtagtcacggttactgcagaggctgaggcaggaaaattgcttgaacctgggaggcggaggttgcagtaagcccagattgtgccactgcactccagcctgggcaatagagcaagactgcaagactctgtctcaaaaaaaaaaaaaaaaaaaaa

SEQ ID NO: 60416 - DNA, 1890 bp, Homo Sapiens
gtttgatgtatttcataatgaacggcgaaattggtgtttgcccattgacatttcagtgtcaatgtattttaagcttcagtgtgttaaaactctgttgaaaattttaacttttgaaatgttcaagtatagattatttttcattgttcttccaaccttggggttgttctgtccacaagttcagcagaatccgtttttctttggcaaccaagaaacttcaatatgtaacagaaaacatggaatggcatttagatcttcaaaaagcagggcaaactggaatggaatgtactgtttctcacagtggtctatgctgacagcaaggctgaagatttccagtaggttatgggtaatcagtgaaagttcatgcttggtggtgacagctgcagtacatcttgaataccagttttcttcaatctttgccaaaaacccaaatttaacacagtttgctgtagtgccattaagatatactcctatacaatttcctccaactcggttcatttgatacagctgcaaaaatactgtctttggtggtcaagtagaaggctcacgaaaacagcacacccacagttttgaaagccttattctgaatgtaagcaaagtacagttttcttcatcagtagattcatctcaaccaacagcaataaaagatgagccgatttttttttttttttgagatggagtcttgctctattgcccaggctggagtgcagtggctcagtctcggcttactgcaagctccgcctcccaggttcatgtcattctcctgcctcagcctcttgcgagctgatgttttttaagatctgaagtttgatatatacagtcattaattcagagttaagactgcagaagtagatgaagaaattctggaattccttaatttatttgtggcagcactcagaatgcaaggtttcacaagtgtctccatttttttctcctttgcaattaaaagggctgtttaatattaagctttcacggcttggaagattcctgtgaatatttcaatactgtccagtcttaaagctgcagagaatcgggctttgcagaacactccactgtttttaatggcatgaatttaacagtgtttggcatggtgtcactgcccaacactttcagataactcaactgaagaagttgaccctatcttctgcaaaataacatgagtatatacttgagaaaagcctcaacatttttttttggctgccatttttagctacctcaaaggagataacagaaaaacaaggagtactgatgatggaagcatctggtccctcttgcagagtgatgaatgattttattggtggcagctgggtggcaggacaatccaggcatccagttatgcctgatccccaataagtgaaatctttgttcattttctttttatacacccgtctgcttcctaaaacctgacaccatttaatggtgcccttggtcaaatctaaatgatcttactttcataattctttgattctaggctggcagagtcaagacgaactctaactcatgggatggacaaactggaagatgtaaaataagtaaggctttctgggccaaaaagcctcttcttacagaaaatcaaattttaaaagaacattgacctcaaaacaataaaactgtcctggttatgcaatagaaatagctatataaatggaatcatatccttaatgaacacctcctgtggctacccaacttttcacacatcttactgattataggccttgctgtgaatgctttcttgctctatctgaagtattcccaccagagttgtttccaactttatttcctatattatgaaaaatgaagtttttttaacattgtaacaaagtatatgaaagataatgtatactgtattaaataaaccattatacaaaaataaaaaaaaaaaaaaaaaaaaaa

SEQ ID NO: 60417 - DNA, 482 bp, Homo Sapiens
  misc_feature (255)..(255): n is a, c, g, or t
  misc_feature (257)..(257): n is a, c, g, or t
  misc_feature (428)..(428): n is a, c, g, or t
  misc_feature (442)..(442): n is a, c, g, or t
  misc_feature (447)..(447): n is a, c, g, or t
  misc_feature (460)..(460): n is a, c, g, or t
  misc_feature (482)..(482): n is a, c, g, or t
tgttctggtatcttgcctactaaaccttcactttctggttggtgtttaatcaaaggtggaggctttgaaagagatgttataaatgaagtcagagtttgaggattagctgctgccgctgcaagggcattactctgtttatcaccgtaaatatttgaaacttctttcggatgggtatgatcttggtggttcattgaccacactattagacaatgtagtgaaatagttactttggggtaaactctgaggcactgagtncntcattttataaagatctgatactgagcgttctacatccatatcttgtttgatgatatggcttttaggacttggaagatgatgatgccactctggaataattctctctctcaccctcaatgtcccttgattttaagttgtaaagggagcaacatcaatactttcttgaagantcgacggtgttccnctttngtaattgtttaanctctctccagtctcctggggcn

SEQ ID NO: 60418 - DNA, 2083 bp, Homo Sapiens
gttttatatggaagatagcttttgccattataatatgtttaaccatcatttctttgatggaaagactgcccttgaagtatgcagagcatttttacaggaagataaaggcgaaggaatcattatggtgacggatcctccgtttggtggcttggttgaacctctggctattacattcaagaagttaattgctatgtggaaagaaggtcaaagccaagatgacagtcacaaagaactacccattttctggattttcccctatttttttgaatcccgaatttgtcagttttttccaagcttccagatgctggattaccaggtagattatgataatcatgcactttataaacacggaaagacaggtcgaaaacagtctcccgtgcgtattttcaccaacattccgcccaacaaaataatccttcctactgaagaagggtacagattttgctctccgtgtcaacggtatgtttctctagagaatcaacactgtgagcactgtaattcttgcacatccaaggatggcaggaaatggaaccattgctttctctgtaaaaagtgtgtaaagccttcctggatccactgtagcatctgcaatcactgtgctgttccagatcattcttgtgagggccccaaacatggctgctttatttgtggtgaactggatcataaacgcagtacttgtcctaacattgctacatctaagagagctaacaaagctgtcagaaagcagaagcaaagaaaaagtaataagatgaaaatggagaccacgaaaggacaatccatgaatcatacatctgctacaaggagaaagaaaaggagggaaagagcccatcaatatcttggctcttaaatgtccagtgactggagaataagaaagatttatggtccaacctttgatgccattttctgaaagtgccacactggacttaaattcagctgcttccagaggtgtgcacctttctgagctagataacaggcaggtggcatttgctggtttacagtcccttatctgcctctctggagacttggggagttgttccatcttcagccagtttactagttctttcagcattcatttttcctcactttaagtctctcccagtcacattgttctatttttatgttttcattttttttgagatggagtcttgctctgtctcccaggctagagtgcaatggcacaacctcagctcactgcaacctctgcctcccgggttcaagcaattctcctgccttagcctcctgagtagctggaattataggcacatgccaccacgactggctaatttttgtatttttagtagagacggggtttcaccatgttggccaggctggtctcgaactcctggcctcaagtgatttgcctgccttggcctcccaaagtgctgggattacaggcatgagccacctcacccagctccggtcacattattctagcctttttatccaaaaaatgggcagaccattcttttgcagaagatgtcagaagaaaatgaaagtgaaaacctatgcagtttgtttaccgtgaacataaaagtatgttaatttaaataggaaaatattttatgttaaatatgaaacaatagtttaaaccccacttgaaaagtatagcgtacaattatttttagactgaatttgaagatgatggaaagggtttttacaaaggcactgtttagatatacagattataattataattacattattattaaatatttattcttcaagtactttttgcagttgtcctctgacggtctagaatcacttaaatgcttgttgaatgagtgagatgtttagaactacgacttgctctgtcattccagtgtcgtttaacctatgcagtaagattctgtctttgtaaaagtagttcgtagcagaagccaggatagtttggtaattaaacgcccaaactaaactcctcattcctacccttaatatttcctggctgtatgatcttggccaggtcactctctaaaagccccggtttcttcattattatcattattataatggggagaataacagctatacctgaggtttgttttgtgattaaattaaatgagacccaaaaaaaaaaaaaaaaaaa

SEQ ID NO: 60419 - DNA, 395 bp, Homo Sapiens
tttttttttttttttttaattaaagtgatttgaaacaatttggtaatgcagactgggacaatgtcactatacccactgaggtaactgagacatgagagctttccaacccaaggtcagaaatcactgaaacagcttatgaaaccctcactattttagtgttttaaattgagaatgctgtatttttctcttgggcaacagataaccttcatttttgacgtaaatgataatggtggcttcacatggcccaggcaaacttcaaaacaaaactgtaggaccacatttttctaacctgaaaataagtcatataaggtacaaataagtaaaattggaattaaattattctaggaaaaatatgtggttatcttgtatctagtcagtaatcagatttattctgt

SEQ ID NO: 60420 - DNA, 563 bp, Homo Sapiens
tttttttttgatttttatattttattatgtgtttccttttactgaagatctttgtatcttcataaggctttgaataagagagtttggtaaggtttatgggtacagatcaatataataataacggttaacaattttttttttttgagatagggtctctctctgtagcccaggttggagcgcagtggcgcgatcacagcccactgcagccttggtctcccgggttcaagtgattctcccacctcagcctcctgagtcatgggaacacaggcccatgccacaaggcctggataatttttgtattctttgtagagacggggttccgccatgttgcccaggctagtatcaaactcctgggctcaagtgatctgcctgcattggcctcccaaagtgctgggatgacaagcatgagccaccatgcctggccaatagttaaaaattttgtttgcatttattatgtaccagacattgtgctaagtatgttaagtgtaaaatctattaatattcacatcaatcatgtgagaggactacagtaaccaccctgttttacagagttggaaactgag

SEQ ID NO: 60421 - DNA, 565 bp, Homo Sapiens
tttttttttttttttttttttttacattaaaaatctttttattattaaggtacccaccacaatacataaactataaagtgacagctaattccacaagacatttaagcaattactttgatcatttaaccagcataaactactaaactggatatatcagaacaaaattgtgctttgaggttttgtccactttcaaaaacaacaaaataaacacccagaaaaggcaggataatgatgtagccattctcttatgataacaacagttataaaaatctgtacaggtaaggattatctaaaaggtgtattttgtgacaacacaagcctagacctccacattttcccccattggatagatgaatggcttgcaatgacatcattatacggcaattttaaagtattagttcacattttcagtctactgtgtgttccaaagtaagccaactacttaatatgctttcaaaggtgatagtttcctgtctcaagcaagtaaccttttttcctcttttttaagtaaatgtggtcacacagtatacagctacaatgcatgcataatttaaatatgcatgtt

SEQ ID NO: 60422 - DNA, 451 bp, Homo Sapiens
tgtctttcttgatgttagttagcaaagaaagtaaaaaaacaaaaaagttatatccccaaatttaagaaataagtaatatatgacctaatgaatacatttatggatggtacttgggactgcttttttggtggtggtggttgttttttggttatgtcttaataactgtgtttaagttgaaaaaataacatgtaacttggatgatattaagaattaaataaaaatatgtgactgttcatgctgattctgtatgtgatcttcgattaatttgacagttgcatataagttagcataggctgttaaggcctgatagaacctaaaaggcagaatataccaaaggtatttgtaggggcactagaatgcaagcaagacattttctgctctgatgttaacagttgtcagtaagtgaaaaattctacaatgaggtatagcatgtgtatcttcacggtgagat

SEQ ID NO: 60423 - DNA, 583 bp, Homo Sapiens
tttttttcatagtacaaaatttttaatatacatgcaacaggtatagtacgcatcaaggcaacagaatacacatggaaatattggcgtataattcagcattcttttggaggcaagagggagggtgaacaataaacactaccacctaaaattaaagattgagacatacatggtttcctcatgcaaacagtaacaaactacctttagtgtgaaacgaactctgtagaaacctgattttataacagcagatgaattttataccaagatctccaagaaaggaggaaaagtcatgatcctcagatgtaatgtttaaatctgcatttagcagcatgtgaagatgcacaaattacacattagacaaatctgaaaaattttacgattatggaatcttgaatttccttctacattataaaaatgtatgtaaaaccattgtttaattactaaaggataataaatgttggttgagagtggaccatgaatgataaagcatttaaacattctgatagttcataggaaagcagcaatagtgctcaagtccagcctaaaattttcaaatttctctttatccatttcctcactcccttct

SEQ ID NO: 60424 - DNA, 543 bp, Homo Sapiens
tttcattccacgtattatttattgtgtatttcagaaagccctaattgaacaaattctacaggaaaacatgcaccagtaaggatgttgggcgtcactggcaagatcacaaatttttcagatggttcaatggttattctattaaatatggagcaggttgtttggaggagaaaggtaatgtttgatcttgagatttgaagaattccgcaattcttccagataatttgaggaacaagcactctcatatacgttgaattgtgactgccctctagaaagttccctatagcttgttgtaaattctccaatgaaatcatgacttccatctcggtcccagtcatacacctctactttgattgttctgtcatagtctccattacataatgctctgactgagatcttgaatgcttgccatactggatttagagtgtttttgacaacttctgtcttgtgacaaattgtaaaactgccatcttcattacttcgataaaatacaaggaaaggatctgattttccaaagaagtccttcttgtccaatttgttcgcaca

SEQ ID NO: 60425 - DNA, 497 bp, Homo Sapiens
  misc_feature (435)..(435): n is a, c, g, or t
  misc_feature (475)..(475): n is a, c, g, or t
aattttaatagtatattttatttaatgcaaaatatccaaaacattatttcaatgtggagtcaatatgaaatattactgagatgttttacatcttcatactgttttctaataatatatgaattattgaatgaagtacgtattttacacttacactgtatcagaatttggactagccacatttcaagtgctcttggacagcacaggtctattattctccaggcctcagtcattttctgaaccaactggaggcaagaaaacgagtgtgtcattgaaatagtgtccaaatgccctgagccggtacaggccatacatcattacttccatcttttggggggtcagtccattgaaagtaatagccatatctgaacagcagccttctactacttgctgagggttattagacaatgcctcttcaataagctgtgcgattggttntgtattaaatacatctcttccttcataatcctctgcattntctgcatgaactcctgcatatt

SEQ ID NO: 60426 - DNA, 496 bp, Homo Sapiens
tttttttttttttaagatttccaatgacctttatttttgaatgtaaaaattcagatagtaaaaataaatctaaaggatatctcttaattttacgattttcacagaaattagaaatgatgatatggtctggctgtgtccccacccaaaatctcatcttgaattgtaaaccaagttgtgattcccaggtgctggggtggaaccttgtgggaggtgatcagatcacgggggcagtcccccagtgctgttctcctgataatgagtgagttcccacgagatctgatggttttataaggggcttttccccgcttcgctctgcacttctctctcctgccaccatgtgaaggatgtgtttgcttccccttctgccatgattataagtttcctggggcctcccagccatgcagaactctgagtcaattaaacctctttcctttatacattacccagtctcgggtagtcctttatagcagcgtgagaatcaactagtacagatggt

SEQ ID NO: 60427 - DNA, 428 bp, Homo Sapiens
  misc_feature (127)..(127): n is a, c, g, or t
cttttttttttttttttagtagagatggggtttcactgtattggccagactggcctcaaactcctgacctcatgatccctccaccttggcctcccaaagtgctgggattacaggtgtgagtcaccgngccttttttttttttttttttttgagacagcgtctggctctgtcgcccaggccccggagtgcaatggcatgatctcagctcactgcaacctccgcctcccgggttcgagcgattctcctgcctcagcctcccaaagtgctgggattacaggcctgagccacagcgcccgacccggagagctgtttcttaatctgcctggaggaaaatcccagcccccaaatttccacatacttcacatagataacactgtaacaactttgaaactaagagggagagaattaagttttcaaatttgaaattg

SEQ ID NO: 60428 - DNA, 2155 bp, Homo Sapiens
gtgctcgcttcggcagcacatatactaaaattggaacgatacagagaagattagcatggcccctgcgcaaggatgacacgcgaattcgtgaagcgttccatatttttacctgctttgaaacgccagcgactagaaatcaattgccaggatccatctataaagtcattcctgtattccatcaaccagacaatctgcttgcggttggatagcattgaagccaaattgcaagccctggaggctacttgtaaatccttagaagaaaagctggatctggtcacgaacaagcagcacagccccatccaggtccccatggtggccggctcccctctcggggcaacccagacgtgcaacaaagtgcgatgcgctgtgcctgggcgtcggcagaacaccattgtggtgaaggtgccgggccaagaagacagccaccacgaggacggggagagcggctcggaggccagcgactctgtgtccagctgtgggcaggcgggcagtcagagcatcgggagcaacgtcacgctcatcaccctgaactcggaagaggactaccccaatggcacctggctgggcgacgagaacaaccccgagatgcgggtacgctgcgccatcatcccctccgacatgctgcacatcagcaccaactgccgcacggccgagaagatggcgctaacgctgctggactacctcttccaccgcgaggtgcaggctgtgtccaacctctcggggcagggcaagcacgggaagaagcagctggacccgctcaccatctacggcatccggtgtcaccttttctataaatttggcatcacagaatccgactggtaccgaatcaagcagagcattgactccaagtgccgcacggcgtggcggcgcaagcagcggggccagagcctggcggtcaagagcttctcgcggagaacgtccaactcgtcctcctactgcccttcagagccgatgatgagcaccccacctcctgccagcgagctcccgcagccacagccgcagccgcaggccctgcactacgcgctggccaacgcacagcaggtgcagatccaccagatcggagaagacggacaggtgcaagtaggacacctccacatcgcccaggtgccgcagggggagcaagtccagatcacgcaggacagcgagggcaacctccagatccatcacgtggggcaggacggtcaggtgctgcagggtgcacagctgatcgccgtggcctcctcggaccccgcggcagcgggcgtggatgggtcgccactccagggcagcgacatccaggttcagtacgtgcagctggcgccagtgagtgaccacacggccggggcacagacggccgaagccctgcagcccacgctacagccggagatgcagctcgagcacggggccatccagattcagtgagcggtgcccatggcaccaggagcccctcgccggctccgcctacggcccggcccccacgcgccctgctctcacggcctcggcacaggcagcggctgcacgtgttctgctgaagtgcgtctgaaggccgctgcctccgcggggaacagcatcctatcaactgaaagagcagccgccgccgcccccagccggagacccctttcgtttgagtcctgctgttggtgtcggagcacgaggggaggcacggtgcggagagcgtcgcatatgcgcgggaaatcaagaactatgatatttttctgtttaaacagctttttttaatttgctatggtgtttataacaaaaaagaaaatttgaaaaaaaaaatcccaggggagtagcaggagccctttgctgtgtgctctgtccagtgtcatgagacgggagccctttgctgtgtgctctgtccagtgtcatgagacgggagccctttgctgtgtgctctgtccagtgtcatgagacgggagccctttgctgtgtgctctgtccagtgtcatgagacgggagccctttgctgtgtgctctgtccagtgtcatgagacgggagccctttgctgtgtgctctgtccagtgtcatgaggcaggtgtttgcaaagccagctctcggttccgatggggtattgctgacctacttttctaggggaaatgctcttaaacactgtaattatgcatttctaatgaaataaaatgtatttatgaccacaaaaaaaaaaaaaaaaaa

SEQ ID NO: 60429 - DNA, 455 bp, Homo Sapiens
tttgggttacagtatttttattcatatttaaacatttttacaaaataaataaagtgttttacatagtaaggaatatgtacgtatttccaagtattaagaagccaagtgtttttttttttgacgtattattgacaaatgtattcagcgccatacacaagagaaatattattactccaaagaacgaaagttaacaaaactccaaagcaaaaacccttttaatggaggtgagaaataaatttaatgtaacaacagctagatggtttttaggatttttcttttcttttggggaaacttcttgacttgacttttcatctgaacagtttttccccccaagattttaatcttatatgtcatacttaagtttaggaacagcttgaataattagcattctagataacacaagggccatgattcactaaaattccaagctactgtaattttatggcatttatttg

SEQ ID NO: 60430 - DNA, 493 bp, Homo Sapiens
tttttttttttaatatacattcttgatttaatggaaatatttatatgcagtgaaacataaaacaaattattggttgtattgctatatttaaacaattttcttaactaaaatataattaagaatcccaaaattgtcctagacaactattttagaatcaaaaagtacatgatcacaagtacttaaaactataataaaattaatatttatctgtacatccataataaaagttactattttagtttgctaacaagaatgatttttaacaagggtgatctggtttaaatagctgatttcctatgtttccattattattttaaatatatattgacatttatgtttaaggaaacaacagagctgaaccagtgaagcacatttcatgataagcactaaagagaaaatatgagatcactaaaatccccaaattacttcataagggaaacagtctgagggatattattaaaaatcaatttaagtacatattggatttgtgaaa

SEQ ID NO: 60431 - DNA, 546 bp, Homo Sapiens
  misc_feature (142)..(142): n is a, c, g, or t
  misc_feature (166)..(166): n is a, c, g, or t
  misc_feature (194)..(194): n is a, c, g, or t
  misc_feature (200)..(200): n is a, c, g, or t
  misc_feature (244)..(244): n is a, c, g, or t
  misc_feature (444)..(444): n is a, c, g, or t
  misc_feature (449)..(449): n is a, c, g, or t
  misc_feature (459)..(459): n is a, c, g, or t
  misc_feature (488)..(488): n is a, c, g, or t
  misc_feature (503)..(503): n is a, c, g, or t
  misc_feature (512)..(512): n is a, c, g, or t
  misc_feature (528)..(528): n is a, c, g, or t
attaaaattttttttttttttgcttcaagaactttgaaaagtgatcatccataaagctttaattcctttcctcttaacttgttcaaaaaaaagaagaggttgacaaactttataaggaacaatcaggcagctcagcagaccnagacccatgtctgacccctgacantcactatcatacccagagttatgtgggntcagtntgaggaagtggaaagacattggcctgacagttaagagttctggnctctatcactaaccctttcacaacagctcagtcatttattttatttattttagagatggggtttctatgttgcccagactggactcaaactcctggggctcaagtgatcctcctgcctcagcctcctgaggtagcctgaggactacaggcacacatcagtcaccacgcctggggagctctgccattttaatcattcagtntctcngggttccaantctgccaaaatgaagggagcttcccagtntcaactttataattnttgtggggnggaaataatctaaccngtggtaccaaaggcacca

SEQ ID NO: 60432 - DNA, 438 bp, Homo Sapiens
  misc_feature (438)..(438): n is a, c, g, or t
tgtttttacttaaagctttggaaaaagaaattaagtaatactgtaattacttttgtgttttggtgttttcacttagttttttttaaaatatattctaccaaaataatcactattttgtgccttgtgtacaaacttctcttgtgaccatttatattatggatctgagagctccttttaaatcatagccacagtttgagtataacaacttaatttaatccttggttccatctgagaaaaacaaaatgggcaagtgtgataaatgttaatatgcaaatacagaaaaacaacaatttatgtactaaaaatcaaaaggctttttcgtggattgtaataaagtacaatccacaatggaaatgcacatccatactaacagcatccatacagtacggttttcccccaaaattagatacctcagcctcagaaccgtggatagcccan

SEQ ID NO: 60433 - DNA, 463 bp, Homo Sapiens
  misc_feature (9)..(9): n is a, c, g, or t
  misc_feature (11)..(11): n is a, c, g, or t
  misc_feature (301)..(301): n is a, c, g, or t
  misc_feature (427)..(427): n is a, c, g, or t
  misc_feature (436)..(436): n is a, c, g, or t
  misc_feature (457)..(457): n is a, c, g, or t
acattatgngnaactgaacacatttattcaatttccaacaatcaccaattagaaatgggcttaaatgacaatacaaagaaagctataagcaaacattttgacagggggatgtgaagaattagaacaaactgcttaggaaactacagtgtgtgcctgtgtttgtgtcgtgtgtgtgtgtgtgtgtgtgtgtgtgtgtgtgtgtctgtgatgttatcgttcttttcccctccttctaaaattagggaaaacatttcctaaagatacagagcaaggtaagatttcttcttcagggtaatttccngcagtgggttctcggggggttgatgaggaaaatcttagggagggaaaatgcacttcattttatttttaattttagggtattgcaggatgtaccctcccataattaaggaagtttttttccatcctnaatactttnttttccccgttataaaagggncccctt

SEQ ID NO: 60434 - DNA, 463 bp, Homo Sapiens
  misc_feature (447)..(447): n is a, c, g, or t
ttttttttcaagtttcatcttatatacttttaatttgtaatataccaaagtcatttttgcaatactatattatgtactttcaagtatataattactgcttctttaaatacaaatgatcaagatattcagattattatgagttttttttggttatcatctattgctgctgcacaaattaccagatttcataattggtttaaataagcctccaatttgtttatatttattaacatgtatgattttgtgcatgtagaataagcttggcatagaaatggcctaaatgctcctgtagctcttcattcctttgtcgttctcactctccatgccagtatgtctcatttctagatcccatagaactttcaattgaaagtaataaccaaggcaactcactttccatgagtaatacaccacacttctagaaatcagcctatattactgtcacactgnggataagtaaaaaaaa

SEQ ID NO: 60435 - DNA, 489 bp, Homo Sapiens
  misc_feature (385)..(385): n is a, c, g, or t
gcttctaaaacaatgagtcagaattaatccacaggtgtgttttccccaagcacagcagaaaagttatgtgtgtattgtcaggagacaaaaataaattgttaccctaacccttttgtcccccagttatcagctttaagcctcatggaatgagcagcacagagggtgactattgagagaacacagtgagatagtttgcttttaaaaatccttgacatcaccaagccttccttttcttctccctgcatttctagtccaccaaacatctactaccctgagcaagaagatgcctaggaaatcaacaggtggtgattcctgggcttatgagatgaacagtgggactggaagagcaattttcaaaaatgaaacctatcttgttggggctcangacacaccaccccaaaatatgactggaggagactagaatatgccaccccaaaatatacttctctggcatattttgagctggttattctgagaaactgcagacat

SEQ ID NO: 60436 - DNA, 1821 bp, Homo Sapiens
cagggcactaaagaggggacagacggccattgacgcggccctcacctctgtggtggaccaggatggaggggtccacatactacaggtgcctgtgtggaaccagcaggaggtggaaattcacatcccgatcaccctgtatcccagcatcttgacatttccgtggcaaccaaagacgggcgcctatcagtacacaataagggcccacggtggcagtgggaacttcagctggtcttcgtcaagccacctggttgccacagttactgtcaagggcgtgatgaccacaggcagtgacatcgggttcagtgtgatccaggcacatgatgtgcagaacccactccatttcggtgagatgaaggtgtatgtgatcgagccccacagcatggagtttgccccgtgccaggtggaggcacgtgtgggccaggccctggagctgcccctgaggatcagtggcctcatgcccggcggggccagtgaggtggtcaccttgagcgactgctcccactttgactcggctgtcgaggtggagaaccagggtgtgttccagccactcccagggaggctgccgccaggctctgagcactgcagcggcgtccgggtaaaggccgaggcccagggctctaccacgcttcttgtgagctacagacacggccacgtccacctgagtgccaagatcaccattgctgcctacctgcccctcaaggctgtggatccctcctctgttgccttggtaaccctgggctcctcaaaggagatgctgtttgaaggaggtcccagaccttggatcctcgagccgtccaaattcttccagaacgtcaccgctgaggacactgacagcatcggcctggctctctttgccccccattcctcccggaattatcagcaacactggatccttgtgacctgtcaggccttgggtgagcaggtcatcgccctgtcggtggggaacaagcccagcctcaccaacccctttcctgcggtggagcctgccgtggtgaagttcgtctgcgccccaccgtccaggctcaccctcgcgcctgtctacaccagcccccagctggacatgtcctgtccgctgctgcagcagaacaagcaggtggtcccagtgtccagccaccgcaaccccctgctggacctggctgcttacgaccaggagggccgccggttcgacaacttcagctctctgagcatccagtgggagtccaccaggccagtgttggccagcatcgagcctgagctgcccatgcagctggtgtcccaggacgatgagagtggccaaaagaagctgcacggtttgcaggccattttggttcacgaggcatcaggaaccacagccatcactgccactgccactggctaccaggagtcccacctcagctctgccagaacaaagcagccgcatgaccctctggtgcctctgtcggcctccatagagctcatcctggtggaggacgtgagggtgagcccagaagaggtgaccatctacaaccaccctggcatccaggcagagctccgcatcagggaaggctcaggttacttcttcctcaacaccagcaccgcagatgttgtcaaggtggcctaccaggaggccaggggtgtcgccatggtaagcttgggccatcggtccccactgttggttttcattccttatctgggctgttgtgtggttaattgattgatcattttgaaagctagcacttgactcacactcggaatcccagaactttgggaggtcaaggcaggaagatcacttgagcccaggagttcaagaccagcctggacaatatagtgagacccccatctctacaaaaaaaaaaaaaaaaa

SEQ ID NO: 60437 - DNA, 458 bp, Homo Sapiens
  misc_feature (343)..(343): n is a, c, g, or t
  misc_feature (356)..(356): n is a, c, g, or t
  misc_feature (384)..(384): n is a, c, g, or t
  misc_feature (399)..(399): n is a, c, g, or t
  misc_feature (417)..(417): n is a, c, g, or t
  misc_feature (440)..(440): n is a, c, g, or t
  misc_feature (452)..(452): n is a, c, g, or t
cccattcttctttttaaattttattaagaaatatcatacatacaaaagcacataaacatacagattaaaaaaggaaatgcccacaggcttcagaaacagaccctcaccagttcttctgaagacccctgtgccctcatgatcacctctccctcccatcaaaacggctaacattaaattttgtcttaatcgtttccttttatcatgtatttgacagcctgtttttgactttcattgaaatggaaccatagtgatgtattcttctgtgacttgctttttttgatccttctattgttgagttttggccatgttcacatacataagctggcagttcaggttcacttcngggggaattccantggttgggaatataccccagtatttatnccacacactggtggnggacacctggggaacttncccgggtttttcctcctttcctnccattacacaanaatggg

SEQ ID NO: 60438 - DNA, 503 bp, Homo Sapiens
  misc_feature (381)..(381): n is a, c, g, or t
  misc_feature (389)..(389): n is a, c, g, or t
  misc_feature (464)..(464): n is a, c, g, or t
agattggccgtgatctggcgattgctggcactagtggtgggtacacaggagttctttctatgtgggaagctctccatcattaaagagtttagataaagaaaagagccaccactcaaatacctggacttcgtggggattccgctgcaggcgcacaggagggatctgacagggtgacgctgacagttccattcgctcaagtattttgttagctttggattttttttttttctttcctaggaccaaggcttaggtgtcagggaaggtctgaaggcactggttcaccttcagggtgctgcagaaactttggagatagtctagcagcggttctaggccagctcggcatcctttctcacacaagcagagatctctctcctggccctncccagctnacccgtccctggccacctgttctgggatacccgctttgaatggaaggatatcaccaggaaatggataccctcctncccacggcagtgctctctgaccctggcctgcctcaaccc

SEQ ID NO: 60439 - DNA, 448 bp, Homo Sapiens
aaacttaagcatcaggatctcactctgtcactcaggctgaagtacagtggcacgatcatggctcactcagccccaactcctgggttcaagtggtcctccaggctcagcgtccagcctgagcctcccaaatagctagaactataggcgcacaccaccatggctggctaatttttaaattatttgtacagacgggatctcattatgttgcccaggctggtcttcaactcctgagctcaagcgatctgggaagcctgcgcttctcagattcactactgggattacaggcatgagtcactgtgcttggcatgttatctaaaatccttaaaaagttttttcattttttcacctgaaacttggtttaaagagcctttccctaaactatataaaaaccaaacaccaataaagaagtttttgttttcaatgacttagtgctgctatccaatgccct

SEQ ID NO: 60440 - DNA, 311 bp, Homo Sapiens
gcggccgctggattctcggcctcgggctgaggaggcaggagggaaagtgggtcagcgcggggccgcggcagggctgctgttgtgcttggaaaggggcccggggtgccggaggcctctcccaggcgcggcggcaggagcgcccgcgcgtgacactccaggcacaaaggggccgggccgccgcctgcactggggctcgggcgtgcggggagaggctgtcgggcgccgcacgcatggactgtgttccccttcccggccacggctcggggcggcgggggcccggggctctcctgtccccgagcgatgtccccaag

SEQ ID NO: 60441 - DNA, 419 bp, Homo Sapiens
caacatgtttgccagcttattttctgtgggaaattcaggcctaattacctcgaccactgttatttgggagtataactccccactcaaggtttcattattctccctctagcctgcctgcacaaggccgtctggtccagaggatgggagaaggggttggaaggagacagggaagatgagattgcatctctgttctttatgaccttgtttcagggggaggagaaacttaaagaaaaacctttttttttttttttttttttttttttcagaaaaaggagacacattgacctggagtttccccgcttagacaatttcatatggttcaacttatccgcactttgtccagtaggtcacatgataggagatggcagtctcctgccatctggcaaaggtcagaaggcaggaggggcctggtccaggat

SEQ ID NO: 60442 - DNA, 466 bp, Homo Sapiens
  misc_feature (443)..(443): n is a, c, g, or t
  misc_feature (462)..(462): n is a, c, g, or t
ttttttattatactttaagttctagggtacttgtgcacaacgaaaaagcactccttttttaaccaggttttatttagaagaaaacaaaaaagaaactcaaagtcaagcagttcctagttaaccacggttaaatatgtggcatttatttgtccctcattaaaaagaaaaagcatcctaagaattccaaactcaccaatttaacactctctgggactggaaaaatacattcccaagatagttttcctaaaaatttcccgtagagggcactagagaggtatgattgaggctagcttgggaatcacagtcatttctggtaaaagttctttgatgtgaggaatgtcccagtctggtacagttggcaaaagttcactctggggaattttgtgtgtgtgtgtgtgtgtgtgtgtgtgtgtgtgtgtgtgtgtgtgtcctgggaaggggtngttgaggaagaagagtgcnagtc

SEQ ID NO: 60443 - DNA, 2334 bp, Homo Sapiens
  misc_feature (374)..(374): n is a, c, g, or t
ttactcagctccccgcagagtcccctcgcggcagcagatgtgtgtggggtcagcccacggcggggactatggtgaaattcccggcgctcacgcactactggcccctgatccggttcttggtgcccctgggcatcaccaacatagccatcgacttcggggagcaggccttgaaccggggcattgctgctgtcaaggaggatgcagtcgagatgctggccagctacgggctggcgtactccctcatgaagttcttcacgggtcccatgagtgacttcaaaaatgtgggcctggtgtttgtgagcagcaagagagacaggaccaaagccgtcctgtgtatggtggtggcaggggccatcgctgctgtctttcacacnctgatagcttatagtgatttaggatactacattatcaataaactgcaccatgtggacgagtcggtggggagcaagacgagaagggccttcctgtacctcgccgcctttcctttcatggacgcaatggcatggacccatgctggcattctcttaaaacacaaatacagtttcctggtgggatgtgcctcaatctcagatgtcatagctcaggttgtttttgtagccattttgcttcacagtcacctggaatgccgggagcccctgctcatcccgatcctctccttgtacatgggcgcacttgtgcgctgcaccaccctgtgcctgggctactacaagaacattcacgacatcatccctgacagaagtggcccggagctggggggagatgcaacaataagaaagatgctgagcttctggtggcctttggctctaattctggccacacagagaatcagtcggcctattgtcaacctctttgtttcccgggaccttggtggcagttctgcagccacagaagcagtggcgattttgacagccacataccctgtgggtcacatgccatacggctggttgacggaaatccgtgctgtgtatcctgctttcgacaagaataaccccagcaacaaactggtgagcacgagcaacacagtcacggcagcccacatcaagaagttcaccttcgtctgcatggctctgtcactcacgctctgtttcgtgatgttttggacacccaacgtgtctgagaaaatcttgatagacatcatcggagtggactttgcctttgcagaactctgtgttgttcctttgcggatcttctccttcttcccagttccagtcacagtgagggcgcatctcaccgggtggctgatgacactgaagaaaaccttcgtccttgcccccagctctgtgctgcggatcatcgtcctcatcgccagcctcgtggtcctaccctacctgggggtgcacggtgcgaccctgggcgtgggctccctcctggcgggctttgtgggagaatccaccatggtcgccatcgctgcgtgctatgtctaccggaagcagaaaaagaagatggagaatgagtcggccacggagggggaagactctgccatgacagacatgcctccgacagaggaggtgacagacatcgtggaaatgagagaggagaatgaataaggcacgggacggccatgggcactgcagggacagtcagtcaggatgacacttcggcatcatctcttccctctcccatcgtattttgttcccttttttttgttttgttttggtaatgaaagaggccttgatttaaaggtttcgtgtcaattctctagcatactgggtatgcccttcctgatctaacattctgtttatgatctaggatttagaacgtcgtatgagatcctacaatggaagaataaaatcacctcattcttcatttcagatctgaacattagcagtgatctagatttttttttttttaaacaaaattaagtgtgcttagagtcatccctctacatgggctgtggctgtcagcccataggtttgtcagtttcacatcaaaactgtgggtataaactgttgaaaccaatcacattaaaatatttagctgggcacagtggtgtgcatctgtagtcccagctacttgggaggctgaggcaggaggatcgcttaagcacaggagttggaatccagcctgagcaacagagcaaaaccccgtctctaaaatacaaataaaatatttgtgtagtttttgattaaaattgactacagcggtcagtataaaatacatgtcgcttttaaggaagtgctctttatgtatctaacagatggaagtttttgcattggtaagagcatttatatatgctttgtttcagggtttatggatttgtattcatatattgtcaaataggtttcatactctaattttactttaagtaaagcttaaacacttggcatacaactg

SEQ ID NO: 60444 - DNA, 391 bp, Homo Sapiens
tgtttttttttttccatatttcttggctaagcgactcatctgtgaggtttttcacaaaattgttgccatcgccaaaaatattccatttactgaaaaaaatccacatataagtgtactcacgcagttcaaactaatgtggttcaagagtcaactgtataaaaggtattaatatgtctggaaagagatatgtttccaatttaacagacactaccaatgagaagagttgggctaggcaggaaacttcaaattttccttttttactttatatattctatttgtatctcaacttataacctgtggaccacgtttattagaagaaaatgcagattcctgaaacttcctgcagaccccatgagtgacaatctcagggagatggagttccagaatctgc

SEQ ID NO: 60445 - DNA, 549 bp, Homo Sapiens
  misc_feature (486)..(486): n is a, c, g, or t
  misc_feature (512)..(512): n is a, c, g, or t
ctttctttcctgtaccactgtcactattctctacagaaaaaaagggaaataaaaatttaaccccataacttacattacctcattgcccatcattaacgtttaaaaccctgcccttattttcctatggatcccctcagaaaaaccacacagcacacacaatgctacctaagaggcttcacagatcaaattcatcatgtatttcatacgtaagaatgttagtctaagaatggagtgacacaaaatattaggggtattgtaactgctaagaaagagtaagatgaagtgatgatgcctccactagggagaggtggccctaaggatccctgtcatccctcatgaacaaagtcattaactcaacccagctttagccaacaggtggaacacttgtttaagtctatataacggcttgtctcatgggagagagaacaccggaataggttagactttcttgctatagccagctccaattgtgtcagacagttttgntcatctgccacagagtgttgcttgcnatattccagtttaatgaaggggggccccttttaccag

SEQ ID NO: 60446 - DNA, 1436 bp, Homo Sapiens
aattgcttccggggagttgcgagggagcgagggggaataaaggacccgcgaggaagggcccgcggatggcgcgtccctgagggtcgtggcgagttcgcggagcgtgggaaggagcggaccctgctctccccgggctgcgggccatggccacggcggagcggagagccctcggcatcggcttccagtggctctcacggccactctggtgctcatctgcgccgggcaagggggacgcagggaggatgggggtccagcctgctacggcggatttgacctgtacttcattttggacaaatcaggaagtgtgctgcaccactggaatgaaatctattactttgtggaacagttggctcacaaattcatcagcccacagttgagaatgtcctttattgttttctccacccgaggaacaaccttaatgaaactgacagaagacagagaacaaatccgtcaaggcctagaagaactccagaaagttctgccaggaggagacacttacatgcatgaaggatttgaaagggccagtgagcagatttattatgaaaacagacaagggtacaggacagctagcgtcatcattgctttgactgatggagaactccatgaagatctctttttctattcagagagggaggctaataggtctcgagatcttggtgcaattgtttactgtgttggtgtgaaagatttcaatgagacacagctggcccggattgcggacagtaaggatcatgtgtttcccgtgaatgacggctttcaggctctgcaaggcatcatccactcaattttgaagaagtcctgcatcgaaattctagcagctgaaccatccaccatatgtgcaggagagtcatttcaagttgtcgtgagaggaaacggcttccgacatgcccgcaacgtggacagggtcctctgcagcttcaagatcaatgactcggtcacactcagtaagtccttgcagagtccatgggtttcttcgacaagtggcttcaaggaagggaattcccacccttgtcttccagcaaggccacacacatgaaaccagcagaaaagagtcttatttgctggaaagacccccagcaagggcatagtgagcccttacagtggttccagtcagaaaaggcaccacttgggtgggcacagccccatgggtgtccaacttggtaagcagagcaaggctggacttgagtccccgtcctccacaaaacacagagccacaagccccagccctgcagcagccctccggaagcagcggggcactggtttccttgtcccctgccatctaccgagtggctcactctcaggtgggagtgctggtgatggttaattaggactgcagaaacatgagcctccttaacaaagtattgggactcttaagggtaagtgtgaaaaaggaatggtctaaatgcattaatcttgaataaaccgaaaaccaaacc

SEQ ID NO: 60447 - DNA, 474 bp, Homo Sapiens
tagtagagacggggtttcaccgtgttagccaggatggtctcgatctcctgacctcgtgatcggcccgccttggcctcccaaagcatgattctattttatttgggaatagcattcgtgtttgggggcaactgtaactctctatagtggtgtagaacacaagatgacatggtgatgcttctctttcttggtagaacattccattcgtagggtagagaactgattttagaagctacattcagtgccaagttgactgaatgcgattgtggctgtttaataacgtttttatttgggtatgttacataaatgcccaccagagttaaatgaataaggatttctctggcccttaagtggatgggtatctaggaaaaattaacaatgccacataacatgaaaggcttaatgcaatcatctgaaagtattataaaggaattagctgcagtgtttcacccctctctagtatatgtaggtgtttgt

SEQ ID NO: 60448 - DNA, 701 bp, Homo Sapiens
  misc_feature (613)..(613): n is a, c, g, or t
gtcaaggaaagcaaattcaaacagcaatgtaacctccttattaccttattaacctgcttattacagagagcgagactgtgataacagactgtaggtctgtgctgcctgctgcagtgcatctccccatgctcttggtgctcccatacacgccaggcgccttccaggtgccagcactggcttccttcctgggcagcaggctggacgtaccatcaggagttggtatataaactggctcccagagctgcccatagtgtcgctggcttgcacatgtcctggatggcctactgggcccagaaaaggtgaaatgtgaggagcacactaatcacaaaatgacccgagccaagtcgagccaatcctgtgctagactggccaaaccccatgatatgatttggctgtgcccccacccaaatctcaacttgaattgtatctcccagaattcccctgtgttgtgggagggacccagggaggtaattgaatcatgggggctggtcttcccatgctattctcgtgatagtgaatacgtctcaagagatctgatggatttatcaaggatttctgcctttgcttctcatttttctcttgcccgctgcatgtaagaagtgccttttgcctnctgccatgattctgagaccctctcaacactgtggaactgtaagacaattaaatctttttttttccccccaaaaaaaaaaaaaaaaaaa

SEQ ID NO: 60449 - DNA, 417 bp, Homo Sapiens
tttttcaactgataatcttggattttctatgcagatgatgacatttacagcaaatgataacaggggcctatctttaaaaggacaagcaaaaagactagggaaaatatttctaaaatatattaaagacaaaaacaatcaatgtttacaacgtataaagagtgccaaggccaggagcggtactcatgtgcatgagtacctgtaccactaaaacagatttgggaggccgagcattttgggaggctgaggcggatggatcacttgaggtcaggagtttgagaccagcttggccaacatggtaaaacccagtctctactagaaatacaaaaattagacaggcctggtggcacatgcctgtagccccagctattcaggaggctgagactacagacgtgcaccaccatgcccggataattgttg

SEQ ID NO: 60450 - DNA, 539 bp, Homo Sapiens
cttttcttacccaaatcagagtcaacgcttttataacattttcattaatattttattgaaactgtcctgatgattttgcaaaaaacttttaagattacatacaaacctggttcatttgactcaaatacttaaaatctaccttgattatgtaactaaagaactacatgggatcccaggtctactgcaaatgtacgattaatctctgcagtatttgataatattcttcaacgtctttctctttactccttccttacccttctgtcacagagaaagaaatgtctctactccctgttgggtcaaacctttctagctgtgctgtagatcccatatacactcttgacttttatgggaccggaaataatctccattctttcagtcttcaggtccttctggcaactctcctctctagctacaagtgtgctcaagcctgtcctaacctagaggaaaaataaagcaccaattatcttttttttcaaaccagccttatccttaagctatcacttggattctctgctttccttcaccaccaaacttcttga

SEQ ID NO: 60451 - DNA, 525 bp, Homo Sapiens
accaaccagctctcatttgaatcaatagagcgtaacctttttgattatcaaaaggatggtgccaaaccatttatgaggaatttgctcccccacgacccaaacaccacccaccaggtcccacatcaaacaggaggattatattgcagcatgaggtttagagaaaatggacatcctctaaccttaggccaaccatatcatatcaccaactaggcttaacagatatgtacaaaacttaccaggcaaaagcaagagaatacacacaatattcttacttgctcctagtgtgttctgttacgacacataccaagtcttattaaatttatgaatactggctgagtgcagaggctcatatctataatctcaacaccttgggaaaatcacatggggcaaaaagtttgggaccagcctacacaacatagtgagaccctgtcgccaccaataaatcaaaaaattaaccaggggtagtagtgcatttctgtagtcccagctcaaaaatttgaggtaaaaggatcacttgagcccagc

SEQ ID NO: 60452 - DNA, 421 bp, Homo Sapiens
tttacttttgggagtggagttttttattaggaattgtccattgaatgttagctaaaacagtcaataaaatgcattaagtgccagctgcatgcaagaccctaagttagatacaatcagccctcttcatcagcaggtccacatcttcagattcaactagatgaggctgaatatttgaagaaagaaaaaataaaaatacaaatagaaagtacagtataacaactgttgccattatacaatatctatacattttgttagtgatgacttcaagtacatgggaccaggcacggtgactcacacttgtaatcccaacactttgggaggccaacctgggcagcatagtgagaccttgtctttaataaaaataaaaataaaaaaattagccaggtgtgtggtatgcacctgtagtcccagctactcaaga

SEQ ID NO: 60453 - DNA, 304 bp, Homo Sapiens
attttagagatggggtttatcatgttccccatgctggtctcaaactcctgggctcatgcaatctacccacctaggcctctcaaagtgctgggattacatgcttgaaccatcatacgtggccatgaattaaaaatcttaagttttgaggcttaactgggagtttttttttttttagcagaacaacatgatcctatagatgataggtaaagttcactaaagattttttcatccaagcctaagtagaccgtattttactatcaagtgcagataaacaatcccacttaacagatgataacaattaagt

SEQ ID NO: 60454 - DNA, 581 bp, Homo Sapiens
cctttttttttttttttttgctgtatccctccagaaatagttgatgcattataagtatatatgatcatgtatataaggagaggcataatgtacatgcctttatattacatcattcttaactatttttgttgcaactaagtaggccatggagctcattcttggatagattagattaaatttcacaactacatactccaaggaattgactcagtttttgttggttatgtcagaggtgttgaaaccacagcaacaccatcttgaataggggctgggtaaaataaggctgagacctactgggctgcattcccaggaggtttggcattgttactcacaggatgagatagcaggtcggcacaaaatataggtcacaatgacctgatgataaaacaggatgcagtaaagaagccggccaaaaccaagatggtgatgaaagtgatgtctggttgtcctcactcctcgttgtacactaattataatgtgttagcatgctaaaagacactttcaccagcaccatgacagtctacaaatacccatagcaatgcccagaagttaccctaaatagtctaaaaagggaggaacct

SEQ ID NO: 60455 - DNA, 445 bp, Homo Sapiens
tttttttttccattttgtggagaatgaggtgttgccatgttgccaggcaggtcttgaactcctgggctcaagcgatcctcctgcctctgcctccctaagtgctgggattccaggtgtgaggttttggtaaggatggagggaactgagaactctcacacagtcccgagggaaggtgaagctatggcgcctctggggagcaatgtggcaacaccaagtagagcaatgcggctcattccactgcagccctgcatgagagagagaggaagcagaaacaaatcatccccaagaggggaacagctgcagagtgggtcattcatacaacacagtactatacagccatccagatgaactccatgtgcgtgtactgattttgtttaaagtggaatgaaaaatacacatagaaggtatcacatgttgcgctcatcttcctgcaaaatttcagaca

SEQ ID NO: 60456 - DNA, 532 bp, Homo Sapiens
tttttttttgctaataattttagagtttaattagctgagacaaagaaagtatttgccacttaaattcccagacagtgacttggcaaaatgagacctactagattaagagtaaaaatgaagagaaaagaaaaacaaattaggtatcatttcatggtagttgggtatcagtatatgagaacggtaaatgtttcactttttaatttccagattcaaattattagtgcagctcatgtagagatacaggaacaagagatttaatattatttgaaataatattgaatactgaataatatcattgaatatataatattgaatattattatttcggccaggtgtggtggctcacgtctttaatctcagcactttgggaggctgagggaggcagatcacttgagcccaggagtttgagactagcctgggcaacacagggagagcccatctctctctctctctctttttttttaaattcattacataaaaacagattggggcaacggtttgtttatttacttgcttttgacatcatatttgc

SEQ ID NO: 60457 - DNA, 443 bp, Homo Sapiens
ttttttttaagtttcaactaaatttaatataggtcagtcagattgagtatgttacacattttgttccaaccatttccatggttaaaaaataactggcgccccttagcgctcacatttggaaatactcaatttaagagttccagcatttttttttttttttgacattccagaaagttttctgcctccacaatctttcaaatgccaacacaaataggaaaagcagaaccccttaaagggacagctcaggttttctctggagcaacttgaaattaacagatttgctattccaacagcggaaaatgcccatttcaacgttggtgagtgctgtatgtttaacatacggaagcaaaacgacgagaaagccgtaacacctaaccattttctacttttaagttgtttctatgactttcaagacaacagaactcctgggatttttctttaac

SEQ ID NO: 60458 - DNA, 2089 bp, Homo Sapiens
ggaggctgcggagccggcggccgcgggagctgaccctgcggggtcccggggggggagggggagccgcgaagcccccactgaggccgccgctgccgggcctcccctcccccccgggcgggcgccatgcgggggagcccgggcgacgcggagcggcggcagcgctggggtcgcctgttcgaggagctggacagtaacaaggatggccgcgtggacgtgcacgagttgcgccaggggctggccaggctgggcgggggcaacccagaccccggcgcccaacagggtatctcctctgagggtgatgctgacccagatggcgggctcgacctggaggaattttcccgctatctgcaggagcgggaacagcgtctgctgctcatgtttcacagtcttgaccggaaccaggatggtcacattgatgtctctgagatccaacagagtttccgagctctgggcatttccatctcgctggagcaggctgagaaaattttgcacagcatggaccgagacggcacaatgaccattgactggcaagaatggcgcgaccacttcctgttgcattcgctggaaaatgtggaggacgtgctgtatttctggaagcattccacgctctcttctgctgggttctctgcctggataaaagattctacggctgaacagaatcgttcaaaaaccacggtcttggccaggcgcagtggctcacacctgaaatcccagcactttgggaggccgaagtgggcggatcacgaggtcctggacattggcgagtgcctgacagtgccggacgagttctcaaagcaagagaagctgacgggcatgtggtggaaacagctggtggccggcgcagtggcaggtgccgtgtcacggacaggcacggcccctctggaccgcctcaaggtcttcatgcaggtccatgcctcaaagaccaaccggctgaacatccttggggggcttcgaagcatggtccttgagggaggcatccgctccctgtggcgcggcaatggtattaatgtactcaagattgcccccgagtcagctatcaagttcatggcctatgaacagatcaagagggccatcctggggcagcaggagacactgcatgtgcaggagcgcttcgtggctggctccctggctggtgccacagcccaaaccatcatttaccctatggaggtgctgaagacgcggctgaccttgcgccggacgggccagtataaggggctgctggactgcgccaggcgtatcctggagagggaggggccccgtgccttctaccgcggctacctccccaacgtgctgggcatcatcccctatgcgggcatcgacctggccgtctacgagactctgaagaactggtggcttcagcagtacagccacgactcggcagacccaggcatcctcgtgctcctggcctgcggtaccatatccagcacctgcggccagatagccagttacccgctggccctggtccggacccgcatgcaggcacaaggctggagtacagtggctcgatttcagatcactgcaacctctgccttccaggttcaagcgattctcctgcctcagcctccagagtagctggtattacaggatttcatcatgttgcccaggctcatctcgaactcgtggggtcaaggaattcgccagccttcagcctcccaacgtgctgggattacagccggtggtcatgccatgagcagccttatggagaggaccatgtggtaaggaactcagccaatagccatgtaactgagcttggaagaggatcttgctgtcctggccaacatctcactgcaattctatcagttgaattccctggatagtccaagctttgtggatccctccaccagaacaactggatcccagtacctgaatcctgaatcttagactcttatacttcaaacactgatcacgggaacagccggctcagcagctcctgagttcctaatgctcagaacatggatgagatgataaatgtttgttgtgttaagctgccaacctttggcgggggggtaattcgtcacatggcaacagctggctaatacatatatacctacatgtaaaaaaaaaaaaaaaaaaaaaaaaaaaaaaaaaa

SEQ ID NO: 60459 - DNA, 512 bp, Homo Sapiens
tttttttttttttttagcttgtagtttttttcttttggtgagaaaatagggtccttttcctatagaagtaaaacagtctttttggggataacatcttagcatcattttgctgctgagtaataaccaagacgtattccacctgcttggtcatatctacttctgaatcttcctagtcctgagtttcccttcaaggccttctaatttgtgcattttaccagcctcccaacaatatctgacctcccatcaaagagtagggccaccaaaactaggactctagaatgaaccctttgcagaagagtaagcattgtcctatatatggtttggtgaatcacaatactgtatacagatagttcagttgttatgaaggatcattttcaaaagctaaatgtccactttccatctaaaacttcatcatattcaccccagcaagtcatttgaactggaaaaaagaatgagggggaattttaagccatttctcctatttcaaaacatggacaattgaagaaatcaag

SEQ ID NO: 60460 - DNA, 544 bp, Homo Sapiens
gtgctgtgttttgaagcccagtgtgttttatgtattacagcacatcttggtttggacagaccacatagtggccagtggtgccatattggacagcactggtgtaagagggtccatctctcactcccacatcaatgtccaatggtttctcattcaactggaaagtgaaattggaaatcttgtgaaagatgaagaattatgaatgtggtacgttgaactgctgggcccacccacaagacatcaacaaatgaaggtgtggaagggttaaaccagttaacgttgaacaaaggacaatggatatgatgagttacaagctgagttgtatccctccacaattcacatgttgaagtcctaacctttagtacttcagggtgtaacttatttggaaactagatcattatagaagttaaaacgaggtcataagggtgggccctaatcttactaacctgtccctataaaagggaaatttgaacacagtgacacccagagggaagatgatgtgaagacagagagagaagacagccatcagcaagccaaggagagaagt

SEQ ID NO: 60461 - DNA, 307 bp, Homo Sapiens
tttttttttttttttttcacagcaatataaaaactttattgagtgctttctatttgctacaacctattcccctgatggactgtcaaagctgtcaggggccagggcttccttttactctctccctttcaaacttctcccattcccctgcctcagcgcagaccctactccaaaaggcggatgaatggggaaccccacactggaagtggctgaggttaggacctgcaggcctgaggctggcgccaggaccaagcccgggcaggagaggctcggccccctcccggagagggcccacgccagcctcgtgccg

SEQ ID NO: 60462 - DNA, 466 bp, Homo Sapiens
taagatggtgtctcgctctgtcacccaggctagagtgcagtggtgcaatcttggctcactgcagcctccacttcccaggctcatgcgattctcctgcctcagcctcccaagtagctgggattacaggcacctgcaccatgcccaaccaacccttgtatttttttttttttttagtagagacagggtttcatcacataagtcaggctggtttcgaactcctgacctcaagtgatccgcctgcctcagtctcccaaagtgctgagattagaggcataagcaccatgctcggtgacatttcacttttgaaaatttaagacttaccttctcagagcaactgtacaagcaatgtacaaataaaggatgataacatcagcaccaaactacacacttattcattcctgggttaattctgtggctctatgactttatttcttcattttactttctcatctacttgtactttgtt

SEQ ID NO: 60463 - DNA, 490 bp, Homo Sapiens
ctctctcaaattagtgtttggggctaggctttaggaagtggattatctgcccagtgtctcagatttccagagccccaaagatgaggttgtttcccatctcttcccatcttcttcttccctccttccccggaattcatattccaaaccacacttcccaaggcagcctggaaacctcccctcccctgctagcctcttcacatccctgatcctgcaagaaatttccttgctcacaaccatgcaattgagaagccaccactcctttggaactgggggaggagctggaaaataaaagcaagtatagagtgggagtcttccaccatgcaggccttctgtcctggctaccctagaggagacccggtagagtgctgtggcaccctgtgtgcgcttcctcccaagaagccagggctcagaggcccagggttggggtgaggctgagaagggaggcacctgctatcacagaatctaaactctgaaaccactgttcagtccc

SEQ ID NO: 60464 - DNA, 446 bp, Homo Sapiens
  misc_feature (331)..(331): n is a, c, g, or t
  misc_feature (357)..(357): n is a, c, g, or t
  misc_feature (403)..(403): n is a, c, g, or t
  misc_feature (407)..(407): n is a, c, g, or t
ttttttaaaggcaatttaagaaaaaaaatttgcttggacttttgcttctggccatgatggactagatttactctcccagatgactcaattaaaaaaccaaagacaaaatacatgaagaacagtttcaggccctgaaccccagcgtgaacacgagtgtgatccctgagagggacatgaacaggggagttggccttcagtgcctgggccgcagagccggcagggtaagcctgcagatggccttccccacatcttcagcctgggaaacaaccgcctgagggatgagagggaacaagcccagggaaggctcaccaagagaggaatggtttgtttncccaccggccacagtggaaaactctnctaaacacacaggatagcagggacagtgctcagaagggcactgctntcgnagtggggaaaatgagccctagagaaaaggctgctctgat

SEQ ID NO: 60465 - DNA, 325 bp, Homo Sapiens
gcatgacatatatagattaactgtgactaaactttacttccgtaacagtaaatattacttaacccattcctgaaatataaagctcatacacaggtcagggaaaaagtattctaagtatctgamtggagaaamatctagagtgactattttagatgactgtagagggcagcaaagcaacagtagtatcctcaaagaaaaacatgtatttbtcttagggaacttcaaatttgttttatatttcaagagatgctgtcaggattaaagcttttgaaggaaaaggggctttggggcatgccaaatacaaatttcaccagctacttatata

SEQ ID NO: 60466 - DNA, 450 bp, Homo Sapiens
  misc_feature (316)..(316): n is a, c, g, or t
tttttttttttttttttcagagtcaagagactttttatttcatgggaggtaaacagttcaaaatgaacatgctggaagaactcgagtaagaatgaaacggttggttttctgatatttttgagaaatgagtcttaattttgttactaatcaaaaagtaatggaaggttgaaagataagtgaataataaggtaggtgtaccacatatcatggtgaaattcaagcctattgctttctgtttgtagagtgcagcaaaatgtgtatataggccattggaaaaccagtccttcgttataggaggtggcgggttttgaggtanagctgtagcctgctttcctgagagtcttatttggaagtcccaaaccattttgtgctattctttgaatgtttttacccagatattttcccatttctgtgtgtgatcccctggttcttcatccacagggaagaaac

SEQ ID NO: 60467 - DNA, 480 bp, Homo Sapiens
  misc_feature (1)..(1): n is a, c, g, or t
  misc_feature (473)..(473): n is a, c, g, or t
nctaggtcttgctctgttgcctgactgcagtgcatggtttcaattatggctcactgaagccttgtattcctgggctcaagcgagtctcctgccttagcctcctgagtagttgggactagagacatgtgtcaccacacccagctaattttaaaaattttttgtagagatggggtcttgctatgttgcccaggctgatcttgaactcctgggctcaagtgatcctccagcctcctgaagtgccgggatcacaggcaggagccactgcatttggctgcattttaaaaaaatatattgcccaaaggcatacaataggaaggtctactgttacttactgggaacaaaattgagggtgggtataaataaacggacagagccaatttcctttaaaaatccagacaggggcattgacacatgttaaggaggttttaactttgaaaagaagttcaacattgctcccaatcccaataactggnttgattt

SEQ ID NO: 60468 - DNA, 999 bp, Homo Sapiens
ctcaagtttctgcggttggtaaagagaacaagggaagaacaaacatcccttttattgctccaaatggtgatttaatccctacatggtgctgggtggacaatgtgtcactgtcacatgcctttactgtataaatccaaccttctgccagagagaatctgtggttctggccatggagggaggatagtggaaatgatatagttggactggtgcttgatgtcactaataaatgaaactgtcagctgaaaaaaaaaaaaaaaaaaaaaaaaaaaaaaaaaaaaaaaaaaaaaaaaaaaaaaaaaaaaaaaaaaaaaaaaaaaaaaaaaaaaaagagagaggggggggcgcgcggccaaaaattatcccccgcggggggcgccccaaagcgacgccccccgctttttttggaaaaagggggcccccctctatggggggagggtcttttataaacgcagggggggggggggagtataaaaacagggaagatagggggaaaaaaagggagagggaggaaatttggtggagagaggaagacacctacagggggggggggaaaaaaagagggggacaacaccccccacaaagaaataaaacaccccacaaaggaaaaaatacacccccagcgcgaataagcggggacacacgcgcacaaaacagggagcgcgacaaagacacgagcgccaagaagagagacacccaaaaacaattatacacggggggggccaaagcacaaaaacaagcaaagaaaaacaaccaaaacgacacaacagatcggggaagaagggatcacaagaacataggcgggagagaagatggaggagagatgagtagaacagaaaaccacaaacaggaacgaaaaaaaaaactaaaacacggcggagagaacaagaagagcggaggaaagaggggagagaaaaaacaagaaagaaagaggaagaaaaaaagtagggacaaagtggaaggagaagacaaaggaggagcagacgccagaagtgagcacaa

SEQ ID NO: 60469 - DNA, 438 bp, Homo Sapiens
ttaattttccaaatatttatttagttcataaaattcacattttattttttaaacattataggttagaagaattacaattgtaattccctggcaccatgatagcattattgtggtagtactgctaggtgagggaatggtatgttaagtctgtttttgaaaagtaaaatgaatacgagttcacaatcacgaaatacagattgttaaaagtcttgtaacagaaaaatccaaagttagtatagtttttaaataagccaaaactacatggagcaagttgctgtcataaaagctgccttaaaaaaaaaaaaaaaaaagcaagtaagtcagtgttgatacatgagttttgaaaagtgagaaacttacttaaaggatgacaaaatcatggtttgttgaatgaaattagccttggaatttaagcaacttaagtcacattttaaaatt

SEQ ID NO: 60470 - DNA, 340 bp, Homo Sapiens
tcgacctcaatcaagatacggctcattccacccttgggcaggagggcaatgctgatgaggctgtttatagcttcggtgcctgcgcctccatgttatttagttgttgttcctccgctgtttccaaacaagcagtctgtccaaaaaaaaaaaaaggatcaaatggaaaactttataaatactccaaatggcggaaacaggaagtggaataaaaatgatgtggctcttcacagaaaacatgctgtcatttttttttttctctgtaaatatacaccattcattttcagaaagaggctgtgctaacagaagaattaaaaaaaaaaaaaaaagtcgacgcggccgg

SEQ ID NO: 60471 - DNA, 485 bp, Homo Sapiens
tttttttttctaagagcagagtctcattatgttgcccagtctggagtacaatgatgcaatcgtagctcactttagcctcacactcttgggttcaagtgattctcccacctcagcctcccaagtagctaggactacagccatatgccaccatggccagctaatatttttattttttgcagaaataggggtcttgctatgttgcccaggcttgtcttgaactcttggcctcaagtgatcctcacgccttggcctcccaatatcattatctgaattcacacttgaactgaaaataataaagtataaaagctttataaaattgtttaacctatgaaagaattgtacatggagctttatataacaacatcatatgaacaaaccaatcttttgtatcaaaatcatgttctgactcataatttgagtgatatttctcaaatatggggtaaggagtacatgcaagatggaatggagacgtgagtttagtgtag

SEQ ID NO: 60472 - DNA, 588 bp, Homo Sapiens
  misc_feature (80)..(80): n is a, c, g, or t
  misc_feature (541)..(541): n is a, c, g, or t
  misc_feature (583)..(583): n is a, c, g, or t
gtatttttagtagagacggtgtttcatcgtgttagccaggatggtcttgatctcctgacctcgtgttccacctgccttgnctcccaaagtgctgggattacaggcgtgagtcatcgcgccgacctacagttgctttttagaaatgaaaggcttctaggtcaagtgtttcctgcctgagattctgtgtgtagagttagctaggccagaaatgcactgggtccaccagttggcacacagtggctttgagaataaggacactccaccgtagataccttccaagggcctctggtgacatgaacagcaaggggggcatctgatacaggacgttctaacccacagggcactcgcacatgggtaggatgtgacttctatgtactgctctgctctcacagaggccactcaacagtgtaacaccaaagtacatacatggcattcaaaaaggaaaagcaaattatgctttccaagcggcagtgtgttttaccttatcaaaatcatctgagcagtcaagatgaccaagcagtccatttttaatacaaattantggctggctagacactggagatcccaaatagataagaccccnctttt

SEQ ID NO: 60473 - DNA, 474 bp, Homo Sapiens
ttttttttttttttttttcttgatccagaccatcttttattcctcatgcttctacattggtagaactttaatgttcttcgaaaatttactgacaatcaaacacttcaagaagtaagagttgagcatgttaaagcattcaaacctttaggaacactttcctaaatgacagtgttttctggcttcaactacagaattctgtgaagaatcaaagactccaactgtaattgcatttaatcagagaatgctcttctgtaaggcattctttgagaaatccatataaaaattagatgtttaagaatctgtatattcatttagccatacaaaagacatttaaatgaaaattttattaactggaattttgttatgccacagagctaacttaggagcaagattccaaggcagaagtgaaactgatggcagcactgctttcatatttagcatataatactatagtggcattaataattcagcaga

SEQ ID NO: 60474 - DNA, 2805 bp, Homo Sapiens
gaatcttcctagttctagtggttggacaagtctttaactccatagcctagctccagctaggttcatgagctggccctactgctctctcctttccccttttcctcttatcccattgcattagtctggattcttgcttacagataaccaaaaccttagtcaatctgatttaagcaaaaaccagaattgataggctcacataactgaaattccagggtagaccctaaggccgggctggatgcagggactcagtcatctcactcgggctaggtctctctcaatgcctagtccctatttcatctgagttggcttccctctcaggtgggctttttctcatggagatcctcagcagcccatggaaggagagtctgtttttcccatcatcttgtacaagtccccaggttgagtctcattggcctgctggccccatgcccatccctgaacaatactgcaattggtcacctgcagtcacatgccctgtgactgcaggaaggtggggatgggctagttacccaaaggaaagtccaggtgctgtgcccagaagggagaatggatgtggggcagagcaaaccgtagatgtctaccttacccagccagacaagactgcatgtaagaaccaggcttacgggccagcccctctctgcaggcccacactgtacactcctgaaatgccattccttagtctggccaaccctcattcacccttccaatctcagcttatatagatggctccccatgctgcctaggaactaccccacattgcactcccatctctgcatgctccctggaggcagggaggaggttttgtccacctctatatccccagtctctggcccacatcagtgttttcagtaagtgttagtgtgttagtggcatcacttccaactgatatacctccttggtactacccttcccagacttaggaggccatctttggacaatggtgtatggtgggaaagtgctcagcaaggaggctctccttccatcctaggaccctgggccagttgtttcacctccggtcctcataccccagactgtgctgatacggttttccttcctaccccacaagataggatcaaatgagatgctgtgtggaaagccctctgacatacacagatatgaggggttgtttggattaggggtggaggcagcaggatgagcagaaaggaaactgcacagtgtccccaggaggccatggttaggttatctccaactatgagatacaggagacagaaagtatccaaccaggacaatgtgaccaaactaaagtgagaaaaatgtaggctttggggcagtgtaagtgggtatatcttctgtgaatagcaatttggcaaaatccattacatttcagagcaagcacattctttgacctgaaattccatgcccaggagtttatataagagagacagtgatgagcaaagatttatttgctgaagtgttacttaccatagcagaagattgaaaatgacccaaatgcacgtcctttggggataaataagttagagcatatctaaacaagaaaatattacgtaaaataaattggaggtctccacaaaaaaaaaaaaaaacccattttttttcagacaggatctcacaccgttgcccaggctggagggcagtgacgtgatcagagctcactgcagcttcaacaccccagggctcgagcagttgtcccacttcagcctcccaaatagctgggactacaggtctacaccaccactcccggctaattttttaatattttgtaatgacagggtctccatatgttgcccaggctggtctcgaactcctggcctcgagcagtcttcctgcctcgggctcccaacatgctggcattacaggtatgagccaccgcgcccagcccatctcacttctgaaaatgactcagtgccatgaacccttcatccctagtggcctttgggggtgggaggtcttcaaagtacagccgtctctttctacctaatgtgtgtctgcaacatcgaacttgttcatcataagtacgtattacttctgtaaccaggaaaagttacaagaagagggggccaggcacagtggctcatgcccgtaattctcacattttgggaggtcgaggcaggagtattgcttgagcccggaagttcgagaccagctttgggcaacacagtgagacctcatctctaaaaaaaagttcttttaattagctgggcatggtggtgtgctgcgtgcctgtggtcccagctacttggaaggctaaggtaggaggaggattcctttagcctggaggtcaaggctgcagtgagccatgttcatgacactgcactccagcctgggtgatagagtgagaacttgtctcaaaggaaagaaaaaaaaaataagaaaatgttgggttctcagcacttccagcccacccccatccatatacattccagcacattgttggggccatttgcaagctctgagatgagattctgcacaagtcagcagtgcagagactcccagggaaggcctgaggccgccaagagcaactctgcagggtctgctccaagaggcagaggtgggccccaccgtccttggcaaaatggagattggtctgagggttccatgaggcaggcttgcaggagcaagggagtgatagaaagccatgtgaggggacgagagggaggacaccctcccctgcagaagtcaggaaggtctttgagcttgttctgagaggaaaacccattctctgggtagaggaatgaagactcagaggagactggggttcgctttgtgtgatactgatatggttactgaaaggctagcccagtcccaggctacgtgaacagactt

SEQ ID NO: 60475 - DNA, 409 bp, Homo Sapiens
tttttttttttttttttgccagtggatagggtctaggtttccaggatagaaaggcactcataagaccccagctttgcagttcaggtttcgctcgggtgcctgagagggcaccaaggtgcaccgtcagcagaagtttccatcacaaacccttgttttggaaccagtcagagtgcacacaaacggtctcgactcagttcacttttgtctgagtacagagctcagcgatgattctaggttactgaggcactcattaggccctgggcaaatctaaacatgcagttcttttccgtacactctacatctgcctgtgtcacccccggctcggagactgggaaggccacatgcagatatgcttcttagccttgtggggtgggactatggctgtagctacttctgctgaaactgccct

SEQ ID NO: 60476 - DNA, 522 bp, Homo Sapiens
ttttttttttttttttttttttttttttaaatagaagcaattatttcttaagaacttctgatctactaccccaatgtaaaacctaagagttaacagctattcaatctgcacattaatacaatgtagttcttaagagttagatgacattatactgtttcttaatgcaaaaagccccagaataaggagatatctctgaataaaagtctgaatacattttatagaacagacctgaagaaaaatgacaatgtaaaggacccatgcagaaaatgagaaattaaagcatatccaagtataaaattttgtaggtatgggagatgaatgtcacttgctgccttaagtatattcagaggaagagaaaggttcaatacatgattaatatatgagaagcttgtgcaagcatatgataatcagaaacaatcccaacatataaaggggcaaaagtcatccacaggcccattacaaatagaaaatgttatttgttaacaaacaaatgggaaaatcagtcttaacagtcttcaaata

SEQ ID NO: 60477 - DNA, 520 bp, Homo Sapiens
tttttttgtatttttagtagagccttaccatgttgcccaggctggtcaccaactcctgagctcaggcaatccgcctgcctcggcctcccaaagtgctgggattacaggcgtgagctcccacgcctggctctatcaaggttttcaaagccctttgcagatctgccaggtatggggatgggcacgagtggatggactgtctgaagcgaacactcccatctcccaggtactcgggaggcctggccccacctaataaccatatgtccattctccaggtgggcctcgacaaaggtgaactctgcaactctcagctgcctttgctcggagaagagcacctcacagcatggccagaagctcagggctgcccacgtcaagccctcaccagcgcgtccttcagcgccccgggaacaacgcttccccctgcaggcggggagcagccacgcacaaatgcttggcactgcagggcacacacaggagccgcagccatggagcgcagagcaccctgctcacctgcctccaccag

SEQ ID NO: 60478 - DNA, 649 bp, Homo Sapiens
ttttagacagggtctcactctgtcacccaggctggagtacagtggcactatcatagctcactgtagcctggaattcctgggctcaagtcatcctcctgcttcagcctccagagtagcaggcactatatcactgtgcccatctaattctcttttttagagacatggtcccgctttgttttccaggctggtctcgaactcctggcttgaagtgatccttctgtcttggcctcccgaaatgctgagatttcaagcgtgagtcatcatgtctggtctcacagctcagtttttaacatatgtatgaaatatcaactgtgtttggttcaaaggactttatgatcttacagataggaactaaggaataataacataagaaataaaaaatgtggaaataaaaacgttcaatcataatatgattaaaaggtaaggcaccaggtggggggtcgaagtaagttcaaatccaaaatagagaccactgggctagtagacacttcacattagaagcatggctaggtgtctactccctgagaaccaaaattccaccagatacaatgaacaaagctttagagagagaaaacaatttgaccttttacggggcagaaaatggccccacatactctataagacaatacaatttcctttaaggcaaaac

SEQ ID NO: 60479 - DNA, 429 bp, Homo Sapiens
  misc_feature (308)..(308): n is a, c, g, or t
tttttttttttttttttttttccttcccttaaacagcatttactggaagtggcatacacctctttcatttacatctcattgtctatgaaatggacatggcacatgtagctacaaaatttttgcatgctctttgtatctagcaactttactaaatttgcttattagtaataaaagaatatttattctgggcaaccatgtgcccaactaaacagcaaaagttctaatattatgtgaggaggaaaaaacatactgggcacaatcaccaatctctgtcacaatggtgagtgtaagggtcaggaaaggcaaantccaccacacacccatcaacatttttttccaatttcttaacaaagtatttccattggccaccaaaccaatatttacacatcatcactgtgatctctccaaaaaatcaagccaattctgtat

SEQ ID NO: 60480 - DNA, 2706 bp, Homo Sapiens
tgaaaatgtaaccagcagatgacgtttcttccatctcccttgcaggcacagggccatgggtgaccacggtggccgccgggaaccagcccaccctgatcgcacactcctatggagtggcccagcctcccaccttcagcccggctgtgaacgtccaggccccggtcattggggtgaccccctcactgcctccccacgtggggccccagctcccgctgatgccaggccactactcgctccctcagccgccctctcagccactgagcagcgtggtggtcaacatgcctgcccaggccctgtatgccagccctcagcccctggccgtgtccacactgcccggtgtggggcaggtggcccgcccaggacccaccgctgtgggcaacggccacatggcagggcccctgctgcctccaccgccgccagcccagccgtccgccactctccccagtggtgcccctgccaccaatgggccccccacaaccgactcggcccacgggctgcagatgctgcggaccattggcgtggggaagtatgagttcaccgacccggggcaccccagaggtaagtcctgctgccacgtgcctccccacgggcctgcgtctgcacctccctgcgcggtcactgcaacaccaccgggacagggggtgcttcatgccagctccttcactggcctccccaacccagaggctgcagtggagcctccacctgcccaagacaactggcctgagatgggggagggagggggaaggtgtggagggcgggacaaacaaagtgggaaaatgcgccggggtaagaagaggaaggaagggagagcctgcaaagcccagagcccgtccccctccagcccaagccctggccattctcacctccaacccccaaggccaggccaagctgcaaaagggtgagagtcatccactcctcttagggcaccgcagcagaacagtccctttgggggccttctccacattccatccatgaggacattcagagcatgtactgtgtccttcccagggaaggcactctctgtcgtgccatcggatgagagcactgtccacggcaaacagtctggcccaacggggtgtctacatctcttttgaaagaggacactagacggtcccagaaagtatgcatctctgggcacaacttcccagccttcccacataaaaccccttgagatggcatttcggggtgctctgcctttcggcagagcaaggaaccccactagccactctcctgtcttctctcccaagtctcttcctttgtcatttcaagcaattttcatgccttgtcaagcatcccaacaataaagctcatgtctggatctctgttgggtttaattcccaatctgactgagccctgactgcctttgttttggaaatcagcactagttttaaatgacaaaattgtagaaaattacatctaaattctggtaaactcttgctttaagatctttttttaaaaaatgactaaattgatttttttctttgcattgttttggttaagctctgtctccctttaaaaaaaaaaaaaaaaaagaaagaaagaaacttactcccagttcaagttcatgagttaccaactctgacaactgggcagcgggcatcctacttccaaggctatgccaaagcccaaggcaccgggtggcatattctgtccccacatagcccctctgggctaatgcaagatcttgctggcttgccacgttccaggcacgcatctaggaaaaggagctgttttgtgcaaaaaggtaactagctgagataggactggagtccctagtttggggctcagcaccaagctgggatctgccccaccaaagctgctgggtgcaggcagctaaacattgtcagccctgagcccatgagatcagaaagacacaggtggcggggacaggaccctgcaggacttctgtgcccactgggtcaatgaccattgcagagctgttcctgtaacctctgtgcaaggacctgagggtgtgaaccatcctctgtggtggtcctgagccaatggaagggaggggacaagaaataggggccctgctaagattccctctaccaggccccactgggcagaccgagggccaggtgtgagggccagggatggggtgggcctagaaagtgtcctcagccctgccttctggtgagccagcgggacccaccagctctagccagtgacaacaactgaccggtccatcaccctgatttccagaggttgccagcacactggctctttcctcgaaattccatgtaactcgcttctctatttacggcctcatcagctgatggagccccttatatttgcagggaagaaagagtgacgcacgcgcctacaaatgcctccaaactcaagcctgggtgggttttttctttttttaatatataagtaatttctcttttcatttctaatcttaaaagcctttattgctgaagctataatttgtctgtcagatctaatgtcaaacaactgcatattttttaaaataagaaacccgaattttgaaactaaatctttgaaacttgccatgtgagagtcgtgttcctgacaggaccacgtgggcttggatctgggtcacttttaattttgcccctagggattttacatctctgaagcccaattgatttcacactcctaaatgacagacagctggctccaggcaggaacaggaggctctgcgtgatggcgtcaacacaagtcagaactccactttag

SEQ ID NO: 60481 - DNA, 685 bp, Homo Sapiens
  misc_feature (302)..(302): n is a, c, g, or t
  misc_feature (308)..(308): n is a, c, g, or t
  misc_feature (311)..(311): n is a, c, g, or t
  misc_feature (313)..(313): n is a, c, g, or t
  misc_feature (322)..(322): n is a, c, g, or t
gcttgtgaagagggaactaaaacatgagggcatctaaggggcattcatgggagaggckgctgacagcacaaacaaaaagrggatggtcagtatggatagagcaaggtgactaagagaaagagtaataaarvacaaggccagagrggtttaagargtggtgtgggkaggsagatcattacagggtcttaaaaggccttataggtaattgcvgaggtaaagattttdaracaaccattatcacatttctaacttcagttatcttaaaatgatggcrgctgttcttgtctttgtttcccagtttnaactgngcncnctgttattntaagrrracaaaaatttraagratcagatatatattctatcacccccscbggctccattttgckgcsttgtgtttggsgggcattaggtaggtgtkaggkagtgggtataggggsgggtcaagtaatagttatagtggtcattatatctcttaatgcactcatattcttttaacatttttaaatggccaaaacagctacttttaatttgctcagaatataaaccacaaatttttaaaaatgaagagcttccaaaataaaatacattttttcagaaaatagtattttcaaatttaaattagaataaagtacttcaaatgattcatattaatgtaggamaaaatgtagaacttaataaagaaagc

SEQ ID NO: 60482 - DNA, 424 bp, Homo Sapiens
attgaatttaggtgacactatagaagatctatgacgtcgcatgcacgcgtacgtaagcttggatcctctagagcggccgcctactactactaaattcgcggccgcgtcgacttttttttttttttttgcttcttttaatagctagtgattttgagatgatggggtttctgggaggcattgggaacctttaagaattctgttaacttttagaactttaataccagatgggatcagataaataaatagttgtaggtagaagaattcccagagtaggtgtattagtgttaggtgcaggataaactatggggcccttccagtaacaggacatctggatgtgatcggtttttttttttttttgagacggagtgtaactctgttaccaggctggttgacggggacggtaaattaatagtactagtggtct

SEQ ID NO: 60483 - DNA, 427 bp, Homo Sapiens
  misc_feature (371)..(371): n is a, c, g, or t
  misc_feature (377)..(377): n is a, c, g, or t
aaaattgacaacttttttgatgcaactttgtgaaatcatggtgttcctggtttttctggtctggtttttgttgttgttttgttttgttttgccacagtttagttcctcacctgatctttccttgtatccacttcagagtctctgaaatgttatctgtttgttggttcctgggaaattgagagccttttcaaagactccatctagaagcatatttaaaagtgtgaaagaagacatttatgcgaccaacaaacatatgaaaaaaagcttatcatcatgggtcattaggagaaatgcacagcaggaaccacaattgaggataccatcttcataccagttaggatgggtgatcacttaaaaagtcagggaaaggnccaggngggtggactcattgcctgttaatcccagcactttggggaggctgaggcgg

SEQ ID NO: 60484 - DNA, 2219 bp, Homo Sapiens
tctgtagatggaccacacatccccgacctacatgcctgctaacttaacccacttgcattctgaacaacttctgcagggcttgaatcttcttcgccaacatcacgaactctgtgacatcattctccgagtaggtgatgttaaaattcatgctcacaaagtggtacttgccagcgtcagcccgtatttcaaagctatgttcactggaaacctttctgaaaaagagaacagtgaggttgagtttcaatgcattgatgaaactgctctccaggcctttgtggagtatgcctatacagggactgtttttatttctcaggacacagttgaatctctcctgccagcagcaaacctactccagataaaacttgtcctgaaagaatgttgtgcatttcttgaaagccaacttgatcctggtaattgtattggaatttctcgttttgcagaaacatatggttgccgtgacctttatttggcagccactaaatacatatgccagaattttgaagctgtttgccagactgaagagttttttgagcttacacatgctgacttggatgaaattgtttccaatgactgtttgaatgtagctaccgaagagactgttttttatgcattagagtcttggatcaagtatgatgtacaagaacgccagaaatacttagcacagttactaaacagtgtacgattaccattgttgagtgttaagtttctcactagactatatgaagcaaatcatcttattcgtgatgatcgcacttgtaaacatcttttgaatgaagccctaaagtaccactttatgcctgaacatagactctcccatcagacagtcttgatgacacgacctcgctgtgctcccaaagtactttgtgcagtaggagggaaatctggactctttgcctgtttggataggtaaatagaaggctttcctaaatgaatgatgctaattgattttatgctttttaaatgtgcagattttctatattttaaaaatagtttgattttcctttttacttttctttgcttctttttagtttttttcttcttcctaaaatacttacgtgattgtttttattatattgtcattcattctttacaatactctcaattattaaccatctccccaagtgcacactttatccacctggttactcacaaacttttattccattttctctctttctttctttttttctttctggaaccatttacatgtttatttgagtcagaccacatcagaagagatttattattgtcaattatatcagaagatagcaaagaagagaactaggaacctgtggtgagggaactggggacaggaatgggtttgaatgaaaacagttcactagaagcgctaccaaagaaatgagaaaaaataggatgctgatataaattatgtactttgagtgtaatttgttttcttcagtgtatttttaaaagacagcattaagaaatatgtttttccccccaataacttagattaggaattgtcagactttttctataaaagaccaaacagtaaatattttagactttgtgagccatgtaatctttgtggcatctacttaactctgccattgtagtgtgagagcagccatagataatacataagtgaatgaacatggatgtgttccaataaaactttatttataaaaatagctagtgggctaaatttggcccatggtgatagcttgccaacccttaatttggtgcattatactagtaacttttatacattgaaaatatagcttgaagttatttttgctttttcttagataggattgcttcatgaaaacttttgtgtttaatacatattttttaatactgtggatttctgaccatttccaaaaatttggtagattgcttttccctttccaatgttaggaaacttgacgtttcatcaatggcaactgataaattctgcatctttaaaaaagtctcaaaatacctgtaatcccagcactttgggaggccaacacaggaggatcacttgagactggagtttgagacaagcctgggcattataacgagatcctgtccttacaaaaaatttaaaatattatctgggagtggtgttgcactcctgtagtcccagctaatcaggaggctgaggcaagaggattgcttgggcccgggagtttgaagttgcagtgagctatgaatgcaccattgcacactaacctgggtgacagaatgagaccctgttttgaaaaaaaaaaaaaaaa

SEQ ID NO: 60485 - DNA, 467 bp, Homo Sapiens
  misc_feature (27)..(27): n is a, c, g, or t
  misc_feature (82)..(82): n is a, c, g, or t
  misc_feature (90)..(90): n is a, c, g, or t
  misc_feature (97)..(97): n is a, c, g, or t
  misc_feature (101)..(101): n is a, c, g, or t
  misc_feature (169)..(169): n is a, c, g, or t
  misc_feature (180)..(181): n is a, c, g, or t
  misc_feature (185)..(185): n is a, c, g, or t
  misc_feature (187)..(187): n is a, c, g, or t
  misc_feature (198)..(198): n is a, c, g, or t
  misc_feature (214)..(214): n is a, c, g, or t
  misc_feature (222)..(222): n is a, c, g, or t
  misc_feature (224)..(224): n is a, c, g, or t
  misc_feature (229)..(229): n is a, c, g, or t
  misc_feature (239)..(239): n is a, c, g, or t
  misc_feature (247)..(247): n is a, c, g, or t
  misc_feature (254)..(254): n is a, c, g, or t
  misc_feature (261)..(261): n is a, c, g, or t
  misc_feature (263)..(264): n is a, c, g, or t
  misc_feature (270)..(270): n is a, c, g, or t
  misc_feature (274)..(274): n is a, c, g, or t
  misc_feature (293)..(293): n is a, c, g, or t
  misc_feature (302)..(302): n is a, c, g, or t
  misc_feature (308)..(308): n is a, c, g, or t
  misc_feature (316)..(316): n is a, c, g, or t
  misc_feature (322)..(322): n is a, c, g, or t
  misc_feature (324)..(324): n is a, c, g, or t
  misc_feature (329)..(329): n is a, c, g, or t
  misc_feature (331)..(334): n is a, c, g, or t
  misc_feature (341)..(341): n is a, c, g, or t
  misc_feature (351)..(351): n is a, c, g, or t
  misc_feature (370)..(371): n is a, c, g, or t
  misc_feature (384)..(384): n is a, c, g, or t
  misc_feature (391)..(393): n is a, c, g, or t
  misc_feature (402)..(404): n is a, c, g, or t
  misc_feature (411)..(413): n is a, c, g, or t
  misc_feature (419)..(419): n is a, c, g, or t
  misc_feature (438)..(438): n is a, c, g, or t
  misc_feature (443)..(443): n is a, c, g, or t
  misc_feature (447)..(447): n is a, c, g, or t
  misc_feature (450)..(450): n is a, c, g, or t
  misc_feature (457)..(457): n is a, c, g, or t
  misc_feature (461)..(461): n is a, c, g, or t
tttttttttttttttatgtgttgtcgngcaggtagaggcttactagaagtgtgaaaacgtaggcttggattaaggcgacagngatttctnggatagncagnagaattagaattgtgaagatgataagtgtagagggaaggttaatggttgatattgctagggtggcgcncccaattaggnncatnantaggtggcccncagaaatgttagcggntaggcgtncngccanggctattggntgaatgantaggctnatggtcncnntaatanctantattgggataaggggtgtnggtcccccncggggnaagaagtngccctncngcatntnnnntcttacncctcagactntcccccccccggctccctnngcttccccccccncacttannncagaacacnnncccgcgnnnccccanccacacgcaggcccacaancaacncctntcnccgctcncacncccccc

SEQ ID NO: 60486 - DNA, 268 bp, Homo Sapiens
  misc_feature (66)..(66): n is a, c, g, or t
  misc_feature (105)..(105): n is a, c, g, or t
  misc_feature (218)..(218): n is a, c, g, or t
  misc_feature (261)..(261): n is a, c, g, or t
tcggtttttaaaaatctttttattgatatctcgttttcttcatgcatcacttctaatattcttttnttgtctatgttctgttttttttcattaagcacttttttntaattacattttaatgtaattagaatgccacctttacaatacacaaatacagtaacggtaactcgcactaaaacaaagcatacttctgatagccattatttttttctttgggncaaatttaaagttttttttttgtcacaaaaacaggaatgtacncatacaa

SEQ ID NO: 60487 - DNA, 519 bp, Homo Sapiens
gcgtcgacttttttttttttttttttttttagctactcagcaaatctggtcaaactaggtattagaaaagtgaaaagtgggacctgcatttgttttgaaatgtgttttaaatttaaataaattttttaagtaaaattgatggtaaattctgctgatctgtggaaagggattaactttagtttcaagttccagaagcagagattcatctggttctcagtgaattgaaagagattcagttggccatcagtgaatgtagaaagccactcagtcagctgtgctactttgagctcccctcaaactcctagtccagttgtctatgctcataactcacacatgtagagttatatctaggattaacccaggacaaaagcactcgctcatcacccatttaaaatatcctttctatggatgatgagaatcccagaaaaatctgtggggctggattctggagaaacatgggtaacatttctagatttcctcaatgtactgtgattcaatttatcagataaatgaacatgt

SEQ ID NO: 60488 - DNA, 473 bp, Homo Sapiens
tcagaaaatgattttaaacaagctaaatttaaatgcctgtgggacattcaaatgcaaacatttggttagacacattgtctggagctcgagggaataagctaagatgtagcattagatttgagaatcatcagggtatttgcagccaaatatgaggtcaagttcatataatttgaagtataaaaagaatcagcttactgattatacagcttgtaaagggagaaatggtgacaatcgtgtgcctatttcaatatgggcctctctcaaccactctatccttggcatctctgattttctctttggcttgattaccctaagaaaactgaggcagttacataaaaagctgtcactgaattccaagtttttattttctgttgctcatactgttgacatcgagaatattcagccgattaaagagtaatctactgaatacacttatttggttaattaaacacaggaggaccactaagaggggt

SEQ ID NO: 60489 - DNA, 469 bp, Homo Sapiens
  misc_feature (361)..(361): n is a, c, g, or t
gcacttaagtctttgaaatccagtgtgtattttatagttctagcacatctcaattataagtagccacctgtagttactggtactatattgaacactgcaattgtagaaaacaacataggagtttataaccctggaataggggaaatttaaacatcaaaagggctacaataaagaagaagattgattcattggactgcacctaaattaggaacttctctaacaagacatcctaagtcaaaagtcaagtaaaagtaggaaaatatttgcaacatacggctgcagaacccaaaaggcccagatcctgaattaagaaaaatacaagaaagaggatactgagatcattttctagattttgtaattntctgtaggagcacatagtacctttaacccacccaccaaatacattttcttctgtgcaactacagttcacgagactattatggtgagatgagtctgtcagacaggcaga

SEQ ID NO: 60490 - DNA, 542 bp, Homo Sapiens
tttttttttttttttttaacactttttaccaacacatatgtatataaacatccaaggccagacagggaaactacttatatgacatcagcatctctgaagcatgagtttctatcctttgtgtatcttctcagtcccccaaatctactctctgaatcactggagaaggtgtgaggagaggcagaccgaccaccgaagacaagtcctgactttcctcctcactctcctcccttccctcctggggtttggtgattgatccctcaacctcccaggggcagttcagcctgccgggaacctacaccttggtcaatacctgccactgtttggtgactgcccacacacatcaggtgccccagtaaggcgctggggaataacagaggagccatgtggttcctgcacccacagggctcagtcccatgcaggagacaggcatgagcagcaactcacatgcaatgtgactaggaccccattgcgggagcgaaggacgctatgggaagagggacaagaggcgacaattcagctaaggcctgaagctgaagagaagt

SEQ ID NO: 60491 - DNA, 483 bp, Homo Sapiens
caagtatgaaggtagttttaaatttcttcatcaggctgtcagtgttcactggctaagttcggacgtctatccaggcttttttctaatataatgccattagttacagcctgggaagccaggtaactaaactaattagaattacaggtaaattaataaggacttcctgagtaagcactagaggccctcctataagaaataccatacattgtttgccgtcgattttggctgctgaggatgatttagcttcccactgccttttctctctagtaccccaagatgtttttttcaatgagctaaggccgctctacaactctaagttaactccagacaagtcaggtgttgccatctacagtgatttctagctggatctgactccgccactcattacgtgtaaaaagacactggggaatggaacggttgtcaaaatgcccagttaacgacaacaaatataaacttttcttcgtataccttcgcagtaagtag

SEQ ID NO: 60492 - DNA, 427 bp, Homo Sapiens
aagacagggtcttggtctgtcacctaggctggaatgcagtgggcaatcacacactgcagcctctaactcctggcctcaagcaatctcacctcagcttcttgagcagttgggactataggtgcatgattttttaagttttttattttattttattttattttgttttgcagagacgaggtcttactctgttgaccaggacggtcatgaactcctggcctcgagtgatcctcctaccttggcctcccaaagttgctgggattacaggcaagaaccaccatacccagcctaaacgtatttttgaaatcactcattaccatcaaaaaaaaaaaaaatcttgcttatgcaaggacaattactgctcagattggtctgttagtatgcttcattgaccagcaatgacacacactaaaaaactgaaggggcaatc

SEQ ID NO: 60493 - DNA, 375 bp, Homo Sapiens
atagtatatgagcccatttatttgaactgttaagaatgggaaaacacacagagacataaagcatattcatgattgtaatgatttttagggatggaagggctaggggattcaggttgtgtttctttttaggtgatgagaaggttttaaagttgattgtggtaatagtttcatgactgtgaacatgctaaagggcatcgaattatatactttagtaagtgaactatatggtactgaggcatgatagatagtcaaggagatgaccacgtccttgggacatggtaaccacactgtcaacagtacaatgagccctgtaaccatgttcattgggacatagcaaccgcaccaacaacacaacagacctcagccgtcacattg

SEQ ID NO: 60494 - DNA, 2129 bp, Homo Sapiens
actgtttcacacttttctgcttctggaaggtgctggacaaaaacatggaactaatttccccaacagtgattataatcctgggttgccttgctctgttcttactccttcagcggaagaatttgcgtagacccccgtgcatcaagggctggattccttggattggagttggatttgagtttgggaaagcccctctagaatttatagagaaagcaagaatcaagtatggaccaatatttacagtctttgctatgggaaaccgaatgacctttgttactgaagaagaaggaattaatgtgtttctaaaatccaaaaaagtagattttgaactagcagtgcaaaatatcgtttatcgtacagcatcaattccaaagaatgtctttttagcactgcatgaaaaactctatattatgttgaaagggaaaatggggactgtcaatctccatcagtttactgggcaactgactgaagaattacatgaacaactggagaatttaggcactcatgggacaatggacctgaacaacttagtaagacatctcctttatccagtcacagtgaatatgctctttaataaaagtttgttttccacaaacaagaaaaaaatcaaggagttccatcagtattttcaagtttatgatgaagattttgagtatgggtcccagttgccagagtgtcttctaagaaactggtcaaaatccaaaaagtggttcctggaactgtttgagaaaaacattccagatataaaagcatgtaaatctgcaaaagataattccatgacattattgcaagctacgctggatattgtagagacggaaacaagtaaggaaaactcacccaattatgggctcttactgctttgggcttctctgtctaatgctgttcctgttgcattttggacacttgcatacgtcctttctcatcctgatatccacaaggccattatggaaggcatatcttctgtgtttggcaaagcaggcaaagataagattaaagtgtctgaggatgacctggagaaactccttctaattaaatggtgtgttttggaaaccattcgtttaaaagctcctggtgtcattactagaaaagtggtgaagcctgtggaaattttgaattacatcattccttctggtgacttgttgatgttgtctccattttggctgcatagaaatccaaagtattttcctgagcctgaattgttcaaacctgaacgttggaaaaaggcaaatttagagaagcactctttcttggactgcttcatggcatttggaagcgggaagttccagtgtcctgcaaggtggtttgctctgttagaggttcagatgtgtattattttaatactttataaatatgactgtagtcttctggacccattacccaaacagagttatctccatttggtgggtgtcccccagccggaagggcaatgccgaattgaatataaacaaagaatatgacatctgttgggcctcacaaggaccagggccttctggaggagtggcactaccccacctggcagcacctagacctgagctctacaaaaacacactgcttcactttgttttaggacttagttcaagaacacattcaaatggtgcatgtgtttggtatcttcaacagtagaccaagaatctaacatcactctcagtaatatagagaccggaatacatggtttataggaaatgatcaaatgatccaaaaaaactccacattttttaagaagttggaatttgatttcatgcataactgtattaaaacattaaatagaaataatgtcatttgaatgaaaatcttatcacattaaattcactgtgaaggcagcatacttaaaggaatttgatttcatgcataactgtattaaaacattaaatagaaataatgtcatttgaatgaaaatcttatcacattaaattcactgtgaaggcagcatacttaaatttttattttgaaaagtctaaaaggcttagatttttaaaatttaataattatttctacaaattttctatttttcttgaggtgattctcaactagcaattggaactcctaggctctattaacataattctttattgtaaacgtatctaatgctaaaagtaataaaatggtagttttctgagacctgtgaggacagg

SEQ ID NO: 60495 - DNA, 459 bp, Homo Sapiens
  misc_feature (313)..(316): n is a, c, g, or t
taaagagctataacgaaacaaaatttatatgttatatatttttaaaaatacatcttatagattaaaggactcaagaaacaatagcaagactgtaaaacgttgccacatcaggtgacactttggccagagttatggaaaatgctgacaaaacaagaatttgccgcatgggcaaagatatactgtaccaacccaacttgttaaaatattaatattgagctaattagaagtagtttttttttttttgttttttttttttttgagacagagtctcattctgttgcccaggcaggagtgcaatggtgtgacctaaggnnnntgaaacatggggggcctgggtgtaagcgattcttgtgcctcagcctcctggaattacaggcgcctgccaccacgcccggctaatttttgaatttttggtagagactgggtttctccatggcggccaggctggtctcgaaacta

SEQ ID NO: 60496 - DNA, 486 bp, Homo Sapiens
tgttcttgaaacattttatttttttctaaatataaacccttaaaatgcacattattttttaaaataaaaactggcatgaatcctaatctttatacaatttcacagcaataatagcagcatgattttagcctcttaaaagatttcctcctttgctctaaataaaaattaatttcaagttctaaaaagccagagcagcaaccatccagtaattggaatgcaattctcctagtgtcttctacagaccgagcatttaaaatacgtgaatgtataaaacttgagtattattaagagttatggaatgaaatgacaatctaaactcgttttgtaaacataggactgccttgctagtctgatgtattttggggggtggagggagctgagaacatagaatggagttgggctagagagttcctactctaataaggaatgcaactttcaaaactcgtgggtgttaaacatgttttacatgtctccagagttataaag

SEQ ID NO: 60497 - DNA, 572 bp, Homo Sapiens
taaattgacccaataaatttaataaaatcaattatatcaattttacaaagtaaaatgatcaataactaaacaaaaattggattaaatagcattctctaattgaaacaaaatgtaaaatatactaaataacatacaataatacactcagtgtgaaattacatgtgaaaattattttatgaacaccattaaattttatcagtcactttcataatctctgaggggatagtacaaataatgttttctgaaattagatgacaagaaaatgatatattatgcctatggtgaacaacaagaaaacagacaaaaaaaaaaaaaaagaatttgcaaaagatgattctaagtcaggagcaataacatttcagataaatgaatttaatacaaagcagagaaaacagattttctttcaaaatctttgaaattactggtttgctggcaagatatcaacacatgtaaaattatctgtttcactctaatatttttcttttcttctcaaaataggtatacaaccataaacaaatacgaatattttctctataaatctgttacacttaaagtttattttacagtgatac

SEQ ID NO: 60498 - DNA, 513 bp, Homo Sapiens
ctgagacagggtctcactctgtcttccaggctggagtgcagtggcatgatcacagctcgatgcagtctcaatctcccaggctcaagtgatcctcccacctctctgcctcctgagtatctcggatgacaggtgcatgccaccacgcctggccaatttttatattttttgtagagacagttttgccatgttgcctgggctggtctcaaactcctgggctcaagcaacacacccacctcgacctcctaacatgctagaatcacaaacatgagccactgagcccagccagagtattttctttctgttaggtacatgaaatgattcaggctcatcttctttttctcccaatctccgactaggaatcatccctggtccccttttttgtggatagtatttaggaaataataacttggcagttggtgtgtttactgttactgagctgtgactgcatttatgtcctctcggtagaatgaatcacaaaatatatgtatatgggcacacccaacaatttctcta

SEQ ID NO: 60499 - DNA, 429 bp, Homo Sapiens
ctactactactaaattcgcggccgcgtcgacttttttttttttttttttaggtaaaagccagagctgtacagagaagattcctctattttctcagccactactcctaggcaacctatacatcctgatgggggtggggatatgcatgctggaaacttcctatgacaatttttatttgactggtgttcttgttagatctgttagtaatgagaaaagatgggactggaacttaaaaaggtaaaaaatttacaactttaggcaatgcacaaccaaatgagttttatattttataaattatgctaccgagaaatgtaatatatgagtcagagagaaacttgaatggtgaattcctagaaaaatcaaacaaattctcaagcaaattaagttctgactgctgaagacctgtttgatctcaggtcgacgcggccgcg

SEQ ID NO: 60500 - DNA, 2071 bp, Homo Sapiens
acaactctctcaactcatatctaagggctaagtccactttaaccttccaatatcattacatcatatttaaacattgactctatctggtcaaggacgacaacattttatttctcctgacccttttgctatcagatctggccttgtcagttttcaatttcattcttagaatggaaacttaattcacacaagttgaacaagtagtcatcagggggcaaaacccagtggatgatggttttgtgtgctgtttggagactgggtgtttaccacacagcagtggatttcataaattccagggtcagacaagattccagtagcgacacacttgactaatatgagaaaatgcaggattaggcaatcaacaatgaggaagtcagccaagttgccacccaaaaattacttaccacagcagctgcagtccagaaatgctaacaagccagtctccctaggagtgggccatactcagctgtggaccactcacaacattttctcactttattttgcttcagagtcagtgtactgcaatgatttctcctttgcttgctttatatgtttaaaattgtcttccctaaaagctgaacttaaaattaatgtttgctaccaaaagggggtagcagtgcctggtcatgtaggcatatgtcccactctgtcggtacagagggtaagcagcctcttcctttttaaaaaatttattatgatgatttacaaaaattgaagcttacaggataaacactcaacaaaaaagtagccagtctcaagaaaccaatttttatgtatgaattaatattattttattaatccatggccaggatgattcttaagattatttcttaattctctgaacagcttaaaagagagatactccttcttttttatttacttgctttgaggttgatactcttaggtttttaacataactctctagctttgacaactcctcttataatttaaaatccttatagcttccatttacaagtaaggattatatctattttagtctcctcaatcagctacctaggagaagacttgccacttggaaagagaaagatagcacccactctccagttctcttctcccaaagttgcccgtatttcccttccctgaagccaatcaaatactttattgtttctcgctaagagtaatttttcactcttaagtacaaacagctcaacaaaaattcccggtagcataaatatgcacatcaataaaataattactactcacaatagactttccattacatatgtttcacaagcattggttttcttaaaaagaaccacgcatacagcactcaaattattgcagattctaactcagtagagtttgatttaatgtttttacaatattttttttaaagaagtgtccttccaacgctaaagaaaaaaatcagaatcaagaaaattctgtttcttagcaacagaaaaatcaaacttctgttactaagtttggtaacagaacagtactctaaattatcctctgaaccacctgatttaccatgtgatgctgggcacattgctgctaattaatcttcctaatctcgtgggatcacaatatgaataacaaggatgaacataagacacatctgtgggaattatgagggggagattataaagagtcaaaccttgtccccatatttaaattttataactataactactagtagaaatataactactaccctctcatatatatgtgatgttattaagtttataaagtgttttgatatgtttcttatttcatcttcatggctgctatttattcatagaaaaataattctcagtatctgtagcattattgttaatgtcaatcctatagaggctggaacaggctcagagaggctaagtaacttgcctaactaagtctccttgttgacaataggtcttaatgcagtgttttccgaatccctcgttcttacatcaaaacagaactgtggctgggtgtggtggctcatgcctgtaatcccagcaatttaggaggccaaggtgggaagatcacttgagcccaggaatttgagaccagcctgggcaacatagtgagtgagacctcaatctctgccaaaaaaaaaaaaaaaaaa

SEQ ID NO: 60501 - DNA, 499 bp, Homo Sapiens
taaactaattagtactaaaagagatttgccaaagcttaaatggaaacaaagactactattaccacatggcatatattctaccatgctgttgaaagtatattcaaaattacaatggtacttatttaactttctaataatacaaacaagaaacattctggaaatcaatcctaaggtagcactatttggagacattagcaatgaagaatgaacttggagtaaagagtcaacaagagtagcgtgattcccttctttctcctcataaaaacaaagctcttctggtctctggtccgccctcatccctccccattcctggtgtgcatttgtgttattctgcagataagactttctaataccatgtcaggatactatttcaagacttcctattgtaagcattgaagtattttattgtgttgcaatgtagctttttacaaaacaattaaatgatactgcaacaaacacagaatgatacaatataacttcataggacaattataaataa

SEQ ID NO: 60502 - DNA, 351 bp, Homo Sapiens
ttttttttttttttttttttttttttttttattttttttttagcaacatggaaaagcttgtgatataatgttcatggcttaaacaatgtaatgataacaatataaagtatatattcatgtaaacaaaaaccagtcatacaaaaatgaaaagttattgttgttaacattgattattaatttttaaccttattgagatgttatctttttaattaaacagcaataggagttatttattaatcataccaatttcttttctaagttccagtagatagtgctactaaatccatttggaacactaaaaagaagacttgtgggttttatccgagttaggtatcctgataaatcattacc

SEQ ID NO: 60503 - DNA, 566 bp, Homo Sapiens
aacgctttttttttttttttttgtttttttgtttttagtctgttagtgtctgcaaagtacagtataagtgagaaacaaaaacatggtgctttatctgggttctaaggaataactatgctggcattcagaaaatgagtataagggcagctaatcactgaatactagttctgtccacaaatctcaaataaaaaaaacttttaaagtaagtattagatttggctaaaatcttgcattgctatgcaatactgactgatcatctctaaactgtattctgtaaaaccttttaaaaactcctgattctcaaatcaatctactccagggactattacaccacctggcatttttttcctaaatcaattttaaaggtaaaaacctccccgtattctcttttaagcatacacttacattaaaaataactttcactgtggaaggaagctaacctaaaatcctgtacaatggaggaacacctttagtcaagctgacacttctgtctttgttatgttttgttctaagtcaatcttcctacacttctgacctgatcacagataaagtaacatttgctgata

SEQ ID NO: 60504 - DNA, 520 bp, Homo Sapiens
ttttttgagacagagtctcattgtgttgcccaggctggagtgcagtggcttgatcttggctcactgcaacctccacctcccgggttcaagcaattctcctgcctcagcctcccaagtggctgggaccacaggcgtgtgccaccacgcccagctaatttttgtacttttagtagagacggggtttcaccatgttggtcaggctggtctcgaactcctgacctcgtgatccacccgccttggcctcccaaagtgctgggattacaggcgtgtgccactgcgcctggccgatcactggcctctttgactgtaggcagatcaaggacttgtgcccatctccctagggaattagggccaatacgagaaagcagatgagaagggccagagtgcgggactgccttcgggggatctgagctctgatggactcatggaccatggaaaacccttctgatcagtatctgggggacaggagaacctgtgttatgcggtgggctagttctccactgctctccaagcctaatgt

SEQ ID NO: 60505 - DNA, 592 bp, Homo Sapiens
ttgaatttaggtgacactatagaagagctatgacgtcgcatgcacgcgtacgtaagcttggatcctctagagcggccgcctactactactaaattcgcggccgcgtcgactttttttttttttttcatcataagcagacaaggatatagattcaaagaacgaggatatctaaccaaactcactgagtcattttataactgtacaggaaagtcaaaataattctatcaccttgacatatgttttttgcagcacaccatggtaatttacacataagtataggaaagggttttttattgtttttttctctttaattttcacaccgaattatacacacagacacacacacatagaacaggtactttccatgacacaccaactctttaccagaaagagtagaaaataatgaatgaccattataccacacaacaacctgcaagttgtttatcattttctctgctcttttttttttttttttttttgagtctctgtcgcccaaactggagtggaatggtgggatcttgactcactgcaacctccacctcctggttcaagagattctcctgccttggcctcccgagtagctaaaattaca

SEQ ID NO: 60506 - DNA, 407 bp, Homo Sapiens
  misc_feature (9)..(9): n is a, c, g, or t
  misc_feature (12)..(12): n is a, c, g, or t
  misc_feature (337)..(337): n is a, c, g, or t
  misc_feature (387)..(387): n is a, c, g, or t
  misc_feature (393)..(393): n is a, c, g, or t
aatacaaanatngtctcacatacttgaactcctgtatgtaagcaatcctcctgctttggcctcccaaagcgctgggattataggcatgaaccaccacgcccagcctattactgaaattttaatgatgatgacaacctcatgacaatcccaaagtactagtatatccattttactgatgagaaaagcacagctaatatgcagtaaatctagtttctgaattcagggcattcttattccagagcccatgctattaattcctatactatactgtctctatataaggcatgtaggcatattaatctttttaaggggggggagtattaggcagggcccacangggagcaggtagctgcctaatgtggtaaaggtggacagggccgggggggnaaaccnggaaaaatctactg

SEQ ID NO: 60507 - DNA, 511 bp, Homo Sapiens
gaaatagacatgttttcatataaccttgagctagctctttcttaagtaaaggaaacagtggcagaaaaacggtcccaacttttctgagaggtataccgtttataaggtttactgtgcaacagagataaatccaattatttgtttgaaaacattcaaccatatatttttctaatctaaggaaatgacatatatttcagttattctaaattactacaagaacccagagaaataaaaatatactttaacgtagccccacctgtgtaggttgtatcgacataggctttcatcactaccaaagaaattaattaggtccctgtatagcataccagctatacaaacatctgggattcagattagtctgatctactttttgccaattcaagttctttaatattttcatataactaaaagtatataatgggagttgaatttttaccttcttctgagtgtattgtgtttaacactgaaaagaggtatcctggttcaaaatgctcgagaccaggaatgtttc

SEQ ID NO: 60508 - DNA, 509 bp, Homo Sapiens
  misc_feature (483)..(483): n is a, c, g, or t
tattaattaacttgactttattgatagttacagcacaatttattaattaacttgactttattgatagttacagcacaatctgtccaaaaccaccagaatatacattcttttcaagagctcaaatggaacatttaccacaaaagaccatattctgggcttcaaaataagcctaaataaatacaaaagcatttaggacctatgaatcagaagactgaatatgcacatatacaaaatgagaatcattctctcacatacaaaacttatataggtagtaaagatacagttgattaggtagatttgaatgttgaatcactgacatttcctgaaggtagagctacaaattacttttttaaatccactaacccaccccacttacctcacttactcttttggcttacactactttgtcatacctatcagtactcagccaaaggcctcataacaactcgtataggggtaatagctatgccatcctcacattanatcctgggctgcagtttgcactactg

SEQ ID NO: 60509 - DNA, 1604 bp, Homo Sapiens
tttttttttttttttggggacaccatgttgcccaggctggccctgaactcctgggcccaagcaatcctcctgcttcagtctggcaaagtgtttggattacaaataacttactacttgccaagttcctttctaagtgtttttgttttgttttgttaatttttaaaaagagacagcgtcttactatgttgcccaggctggtctcaatctcctgggcccaagagatcctcccacctcggcctcccaaagtgctgggggctacaggtgtgagccaccatgcctggcccctttctaagtgttttacacatactgattcatctatagcccttcaacaatccaatgaggaaggtactatttttatctctattttacagacaaggaaatggaggcccaaagaggctaagtgacttgcccaggatcacatagctagtaagtggcaatgccaggctcaaatgcaggcatttgagtccacatggataagcacctactaagatgcccctttgaaaagaacctctatgtgaacttcagcatgagctgccttctctcgggggagagtgtggggtcacagccacatccactacagtggaggttgtcatcctcttactgaggaggaaacaggagctcagaaaggttaagccacttaccccaagccgcacagcaggggagaaacagaccctggacccactgaccccagtccatgctccttccctgaccccacagccgtctgcacccaactgaactggcccagtatgcaggaaagggctgtgagccaggaggcaaggtcacgcctgcctctgttgcccactcatgccatgccctctgagggactcagtttcccctcccgcacaatgcaagacctggatatattgaatgtgaagagcacgttccagtttggtatcctggctcccacaccctcccctcactctggctcagggccctcaatcacgatccttccccagaatccagacctggccatacctgatgaagagggtgcacaggaggaagatgatgaggcccacaatgctcggggcatcccaccactgggtctcatagccctcggggcctgccacaactgtctcgttgcccagctgggttggcaaatgggggttgcatttctgttctggagatgggagcacaatcaccctcagcccatgcaggccaggcctaggtagccaagtggccctgaggatggctagagagccacccctaatagacagacagatacacagccaaccactcaagtcccagcaacagagcgctcagcagtcacaagggcagagagacaactcaggaacagacggggccctcccatctcatgggaggactgagtctcagaatgggctggagcagggatgtccctgtcacctgtgagggtccccagccccacagtagactgatactgacccaggaacgaggccaggcctccttgagcctgggcccatacttaccagggatactggatagggctgaccaggtgacaaacatggtgtagagggtgatgaccgaggcctgcagcagacccgagttgggctgggcgtcctggcaagaggacccctggtaagacccctgccagaccagagacaccccaccccacccagcccactccg

SEQ ID NO: 60510 - DNA, 204 bp, Homo Sapiens
agttactgaagctaagctcatcctgtcttccttacattgctaatatctgacttacaatttacgaatatttgtaaggtgtcatttaagtaggtgtggaagcattagcctagattttgactagttctttggtgtcttctgcagctcatagaggcactataatcacaacccccacccgcgcccctcgcaaaaaaaaaaagaaaaaaa

SEQ ID NO: 60511 - DNA, 3545 bp, Homo Sapiens
aaatgcagctccagggttgcgaggcacccaccagcatcattccccgtgcgaggtggcaaatgcaacatgctctccagtttggggtgtctacttctctgtggaagtattacactagccctgggaaatgcacagaaattgccaaaaggtaaaaggccaaacctcaaagtccacatcaataccacaagtgactccatcctcttgaagttcttgcgtccaagtccaaatgtaaagcttgaaggtcttctcctgggatatggcagcaatgtatcaccaaaccagtacttccctcttcccgctgaagggaaattcacagaagctatagttgatgcagagccgaaatatctgatagttgtgcgacctgctccacctccaagtcaaaagaagtcatgttcaggtaaaactcgttctcgcaaacctctgcagctggtggttggcactctgacaccgagctcagtcttcctgtcctggggtttcctcatcaacccacaccatgactggacattgccaagtcactgtcccaatgacagattttatacaattcgctatcgagaaaaggataaagaaaagaagtggatttttcaaatctgtccagccactgaaacaattgtggaaaacctaaagcccaacacagtttatgaatttggagtgaaagacaatgtggaaggtggaatttggagtaagattttcaatcacaagactgttgttggaagtaaaaaagtaaatgggaaaatccaaagtacctatgaccaagaccacacagtgccagcatatgtcccaaggaaactaatcccaataacaatcatcaagcaagtgattcagaatgttactcacaaggattcagctaaatccccagaaaaagctccactgggaggagtgatactagtccaccttattattccaggtcttaatgaaactactgtaaaacttcctgcatccctaatgtttgagatttcagatgcactcaagacacaattagctaagaatgaaaccttggcattacctgccgaatctaaaacaccagaggttgaaaaaatctcagcacgacccacaacagtgactcctgaaacagttccaagaagcactaaacccactacgtctagtgcattagatgtttcagaaacaacactgggtaattctaagaacttttttttttctaaaaaaacaaaagtaacaacgaaataactcccaggactcacagaaaagaaacctggtgccttaacttctctctccctccccactttctccttttccttccttcctggcagtggttaaccttcctctttcttggacagattccactgaagagttaaccacatggctgatcctggtgactgaacttctgggcaaatctggatgctaattgctaactaaatgccctttttaaccagtctctgggttatacagacagaataccagccttttaactcccaaatcttgggggagaatgaaggaaacctggaagtcttgactctgtgctttctgcttagagtggctttgggaagtcttgtgcatactaaatttgggaagaatccccaaaagtgtcatgcttttaaacaagaatttcatggcacccatgtttgttgtttcttagcccaagagaatctaacttgctttgttgttctctttcccctgaagaaaaggagcagcatgtgttttgttctgtaatttgatgttgatcttctcagccacaccactgccctttgaatgtacaccttcatattttaacagctatgtaacttttccagggaaggttatttccattaaaggtattggctgctctgtgtgcaagagtctgttacaaagcttgctgtgcatgatcatggttaagccacaacatcaaaacccaagtccaggagttgctaactgcactcttttttattgtagttctcagcaaaaggaccccggaaacattgcaaactattctaatacctcagtttgaattgccactgagcactctaggtaaaaaataataaatactgcagctttattattaccttggatattgtatgcatgcttcaaagaagtcttttgaattaattacgctaatttatacccaatcccttaaaggtgacacagtcttcaagtttaggatcccaaagaggctctccctatgacaaattgtttggttgggttgtttttcttttaagtggtcatattttaatattatgtttgattcttttaattcagaatcaatatgtcactgaacaaattgatcatttctgtattttttgtaaatgtgtttactctattgtctctcttaacagagaagatatatttatgatatttctgcagactgcttcttataattcttagaattcttctgagtgaagtatgagaaaaatgagggcagggtgcagcggctcatgcctgtaagcccaacactttgggaggctgaggcaggtggattgcctgaggtcagtagttcaagaccaccctggccaacctggtgaaaccccgtctctattaaaaatacaaaaattagactggcatggtggcatgcgcctgtaatcccagctacccaggaggctgagacaggagaatcgcttgaacccaggaggtggaggttgcagtgagccaagatcgtgccacgcactgcaacctgggtgacagagcgagactccatctcaaaaaaaaaaaagaggttgggggaggagcttacatataaagccacgtagttaccaaaactctatttttaaaagctttcagatggacattttctagttcagatgtgtttgcttggtttaaatttaaatgaaatatatttaagaacacacataaacatagctgaagaaatcagcaaactggtttaataagggtggaaagaagagtccaaatacagtagcttaaatttagtcacttaactataaaaaactgaaaaagaaactttcttatattcaacattgaaacatagatgtaagaaatactactaatggtctcttaacatgatttgcctttttgtgtttgcttttgtttttgcaagcttaaaattttaaaaatctttcctgttactttcacctcaggtcgtaactttctttatgtgtttcattacagctccaaaaagccttccagaatttcctgaggcaaaaacacccttcccttttgagaaacctaggggcacattgggtaataagagtaccttaaatttaatattaaggctgtgggtggtgattgcttaattctgcaggacacatttactgcatcttatttctggaaacctcatgaactgatagttaggcaaacaaatggttgatttgatttttttttaataaatctatttggattttctgcaaattcggtaaaacccatcagtcttaattccacataatccacttagctttttgtccttaaaaatgctgacagtctgacaccaaactctggtctctctctgaccactaatcaaatgttctctggatggatacatactgatttcttactgatatataatgactttttattgtattggtatactgcaggcttctggtagccacttaaccataccagcaacctatttctgtctcgttctcctgttaaaaaaaaaaaaaaaa

SEQ ID NO: 60512 - DNA, 429 bp, Homo Sapiens
  misc_feature (343)..(343): n is a, c, g, or t
  misc_feature (399)..(399): n is a, c, g, or t
  misc_feature (406)..(406): n is a, c, g, or t
  misc_feature (424)..(424): n is a, c, g, or t
ctttagcaaagttgaataaaccattctcaaaagccataggtaattactgctcaaaagctaatctttgccaaactttttctgtgaaatgcacctgtctataaattcagcgtaacttctgataacaagcttactttctgtctctgacaacacagtaacaatcaggacttaaatgttaagataacaaaattcatctcattcttccatcatcatatatcgcatgaatatgacaatgaacacaagcagtccaagctgatagtctaagtataatctagaagacattttaactgaaagagggtaggtaagctacttctccccacctttttttaaacagccattctcaggnaaccacaggggtcaaaaactctgacccggggggggaattcaaggttttggaatccncatctcnggggtgttagggggaccntaggg

SEQ ID NO: 60513 - DNA, 575 bp, Homo Sapiens
tttttttttttttcaggtcactgcctcttcagtttagtgcttacactgtaggatacaccatccaaaaggctgtaagggtggccaagcaaagggaaaacaacttcagttgggggggtggaagcacaaattcaatggaaataagggtatacatcatttaacaacaaaatcaaaaaaatgctaaggatgaaacagggtactcaacaatcatgctgaaacaggcataaactaggaccacgccagcaagctaataggtagatgactctactttgaatattaaatcatattacgagccaactttcttaagaaaaaccacggatatctaggattacttgactagtgtaaaatacacagttgcctgaagaacttatctctaaaaactatcacaggccccagctacctcgcactggtaagagtatactgccttttaaaaacaatcactattgcccacattattagtagtattaatgctattaataatattgcactccaatgtgtccaataattgctttttgctaggtatatgcacagcatcatgggagccggagggagcttttacccaacctcatgaggaatga

SEQ ID NO: 60514 - DNA, 529 bp, Homo Sapiens
tttttgccaataaagaatattcttttctttattattatagttcccattaagctagcaaatgcttgttttgtagttcttcctgtaaaaatttaccccaagtattaacaaagtatttgatagatgaaaaaatttattaaagttgaatcttcaaacctaaatctctacacaaaaggaaaaacttcactattaaataacatgctcccaaggagattcttatatataaactgctccacaaatgaccaagtatctctttgagataaatgaagcagtaataacccaaaattctttgcaatgtttagcagtatgagccgatactacctgaagatcatatggattgttaaggggattaggacttttccgaggaaggcaataaacaaattctccatcatcttccaaaggtttctttaaagtaatcttctgaattgcaattttggagcttccgtatttcaaactgtgctgcggtaatatagtttgccaaccaagcttttctcgtagcctaataatatttcttatcacatcatcatctttt

SEQ ID NO: 60515 - DNA, 493 bp, Homo Sapiens
gtttttttttttttgtagagatgaggtctcgccattgttgctcaggctggtctcgatctcctgatctcaaacagtccgcttgccacagccttccaaaaagctggaattataggcgtgagccactgcacctggcccaggcccttaaaaacttttttttaattaagtaattgttttgagacagggtgttgctctgtcactcaggctgcaggattgttttttgttttttttgtttttttttttttgtagagatgaggtctcgctatgtccaggttggtctcaaacttttgggctcaagcaatcatcccaccttggcctcccaaagtgctggaattacagggataagccaccattcctggcctaatcccatttttagtttaaaactaaagttgttttgttaattttcgctttaagagactgagttttcaagaaaccagtctttttaaggttcagatgagtaacaaaccctttgacagagcaattctacttctaggaa

SEQ ID NO: 60516 - DNA, 654 bp, Homo Sapiens
actagaagaaaggttaacccaagaggttgatctttaaagtctttgaataagtgaaatacttttggaattaggacacaaaataaaacttgtcactgaatcagaggtagagtgtctgaaagggtggattgactcaggaaagtctaaagtcagatcgcatctgttaggaagagcccagaagaatatctttaacttagtttgtaaaagattgactcatctaagcagaatgaatctatttccttgcagtattcaaataggtgcaaagagaaagggaaggcagttggttctataagtaaaatataagtttgactaaagataaaatcttaacaaaaacctttttagaaccttaagaaaccttatataatgtaaaaaaaaaaaaaaaaaaaaaagataacgagagccccatagcaaataaatggattacatacattgtcagtgtatgttaatgtgtataattgtttgagacagcatttctccaactttcattgtcttgaaatcctcctctggtaataagttctctttttctcatttatgacaattgtagctgaatatgaaaagactatagctcacatgattgaatatgaacaaacgacacttatgatctcttagaagagctgtaagcaactgtccatgataaatggactagtcctggctgac

SEQ ID NO: 60517 - DNA, 566 bp, Homo Sapiens
ccggcgtaccgactgcagctgtgctcacctgtcacaattggtagactgatggagttacctgacagagaagagagcccaaggaagcacctgagtggtttctcatctctgggccactctgttaagggcctgtttgttgactttgggattttcatcttattctggagagttaaggtcgccagatgaataaaatactactgttagtgagcactgggggagctaatcccaaaactgtttagccacaaggttaagaagttacaaaaaaaaaagagactttgggtgtccttgtttcccatttctgtaaatcacatggctgataaattggccttggggaatgcaccctgcccatttcaggtactaggctcagttactggctacagatgggagattcccttttcagggctgatgctttaaacagtgatagttatacctgataagtacctaaactctgcggtgaggtatcaaaactgcgggatctatttgtgggtgcctctttaccattactccctctagagaatgtccataccataacaacatatttacatatttatcacactgcatttctatcc

SEQ ID NO: 60518 - DNA, 199 bp, Homo Sapiens
tacttgcagatatagtcataaacgttttaagatccataagcaaactaaagcaattatgccaataatgactaaggccactgcttcctcaattgagtctttgatataaaagccttcacttttggttaattaccaaaaaaaaaaaaaaaaaaaaaaaaaccgtgggagatatgtgacagtgagagtaggcctgctactgatg

SEQ ID NO: 60519 - DNA, 435 bp, Homo Sapiens
  misc_feature (168)..(170): n is a, c, g, or t
  misc_feature (176)..(176): n is a, c, g, or t
  misc_feature (193)..(193): n is a, c, g, or t
  misc_feature (204)..(204): n is a, c, g, or t
  misc_feature (207)..(207): n is a, c, g, or t
  misc_feature (219)..(219): n is a, c, g, or t
  misc_feature (223)..(223): n is a, c, g, or t
  misc_feature (341)..(341): n is a, c, g, or t
  misc_feature (380)..(380): n is a, c, g, or t
catattaaatcttcagaccctggtaggtatttactcaccgcacacctcaactctggattagccacatatcaagtgctcacagccacacatactcatggctcatggttacagtgctgggcagtgcagctcgaaagcatgacaggcttttgctaaccacaagcctttagnnncacagngtcctttttcccttccnacctccttttngtnatccccctcttnatcnagattcctcaaggtccaactcaagtagaacctcttgagaaaggcctatcccagcaactccagctcttaatgatcctgacccactacaataaaactgaatggcaaactgtggggcaatngagtatggggagggcctatttacagaaaaaaagttccangacaggaaacccctcaagggaatttgacccttttcggggttacaaatatggataa

SEQ ID NO: 60520 - DNA, 425 bp, Homo Sapiens
atggcttgaggttatttattactatttttgagaaaggaagagatgaaatatgagggggttaagtgtatttaatgtaaactaaaatgtttctgaagtgtgatagtgattatgtagtagaacaacttaagatccttgaaatccagtgtgaacaggttaaagagctctaggatggttaaaagtaaggtcacaataatagaaacaaaggttatgttcttgagacattaatttaggttgaatgatatagaattgtcaccttttaagataaaaaacagttgaatactggcaatttcatatggtccacttgatagacgttcaggagggaagaaatgcacaagtatggagtgtgaaggaaagggcataggtcttcaggtgtggtaccgtcaaccagggccatcactttttaatactgaatggctaggctcttg

SEQ ID NO: 60521 - DNA, 482 bp, Homo Sapiens
  misc_feature (1)..(1): n is a, c, g, or t
natcttttagaattaatagagttcaccaggatataaaaccaacatacaagtgcagcatcaaagaggaaatgtaatgttaaaaaagataccattgataatagaaaccaaaatgtcaggtactgcggaatcaatattacgaaatatgcatgtaactttagagaaaaataactgatattttagcagacctcaataaagatgtatttatatataggaagattcaagcttctgaagttgtcaattctccctttaataatctataaattcagtataattctaataaaacttccaacaggaatttatttgccctttgtaagtggatgctgctgtggccacatttgaagagaggcttggcctgaggatttgctctaccagatagggaagttatcttatttaaaatagccagtatttggccagggtgtggtggcttacgccttggcctcccaaagtccggggattacaggcctgagccactgcacccgggt

SEQ ID NO: 60522 - DNA, 496 bp, Homo Sapiens
tttttcatttaggccattaaccaggagtccatggatgggacttagtgggtccataagcccctgaaatcatatccaaatcacatgcaaaatgtcttaggtaaccacatttttctagagatcaggcaacacacatttcctcaaacaggtccattattcctcaaaaaccactgggaaacaataacaaaaatagtactataaaaatgttttcaatgctaagggataataggatggggaagagaaaggtagaaaataaagcatttgaccttcatggtaaaataatgcacactgacaggttataagctttgggggcattcctcaaaataaagaaacatttcaggaagaaaaaaatatgaatggaaagtttaaacaaaacggacaagaaggaagcagtatctgggcagtctgacagaatgaaggggaccagggcctgccaccattaaaatatttcttactgaatctcaaaatattctatacttggcccattaatgtaaaaagt

SEQ ID NO: 60523 - DNA, 2444 bp, Homo Sapiens
ggctccgggggtggcggtcggacagtgtctagcacgctcagtccgggcttggggccccgcggcggagaaggaggtagagggggcggcggcggcggcggcggtggtggcggcaccatgtttcttcactcagttaatctctggaacctggcgttttatgtcttcatggtctttctggcaaccctggggctgtgggatgtcttcttcggcttcgaggagaataagtgcagtatgagctacatgtttgagtacccggagtatcagaaaatagaacttccaaagaaactggcaaaacgctatcccgcatatgagttgtatctttatggagagggatcctatgctgaagaacacaaaattctccctttgacgggtattccagttctctttcttcctggtaatgctggaagttataagcaagttcgttctattggctccattgcacttagaaaagcagaggacattgacttcaagtaccactttgacttctttagtgtgaacttcaatgaagaactggtggctttgtatggtggaagtcttcagaagcagaccaagtttgtacatgaatgtattaaaacaattctcaaactctataagggtcaagaatttgctccaaaaagtgtggcaataattggtcattctatgggtggccttgttgcaagagcattgcttacactgaaaaattttaagcatgatctgataaatcttcttattacacaagccacacctcatgttgctcctgtgatgccattagatcgtttcattacagatttttatacgactgtaaacaactattggattctaaatgctcgacacataaatttaaccacactttctgtagctggaggattccgggattaccaagttcgttcaggattgacttttctaccaaaattaagccatcataccagtgccttatctgttgtgagttcagcagtgcctaagacctgggtctcaacagaccacctctccattgtgtggtgtaaacaattgcagttgactacagttcgagcattctttgatcttattggtgctgatactaaacaaataactcaaaattccaagaagaaactgtcagttttgtatcaccactttataagacacccatcaaaacattttgaggaaaatccagctataatttctgacttaacagggacatctatgtgggttctagtaaaagtgtccaaatggacctatgtagcttacaacgaatctgagaagatatattttacatttcctcttgaaaatcatagaaaaatctacactcatgtctattgtcagagcactatgctggatacaaatagttggatttttgcttgcataaacagcacttctatgtgcctgcaaggggttgatttatcatggaaagctgaactgctgccaacaattaagtatctgacattaagacttcaagactatccatctttgtctcatcttgttgtttatgtaccatctgttcgtggaagtaagtttgttgtagattgtgaattctttaaaaaagagaaaagatacatacagcttcctgtaactcatcttttttcctttggattgtcttcaaggaaagtggtgttaaatacaaatggcctatactacaatctagagcttctgaactttggacagatataccaagcttttaaaatcaacgtggtaagcaagtgctcagcagtcaaagaagaaataaccagtatctatagacttcatattccttggtcttatgaagattcactaaccattgcacaggctccatcttccacagaaatttctctgaaactccatattgctcaaccagaaaacaatacccatgtggcattatttaaaatgtacacgtcatcagactgtcggtacgaggtgacagttaagacttccttttcacaaatacttggacaggttgttgcttagaatatgctaccatgttggataaagaagccaaaccatacaaagttgatccttttgtaattatcattaagtttctgttggggtaagttttattatctgtgataatgattttaattgtgttttacatgtaacattatatttggttccataatgcaatataaattttcatacagatttggcagttgacttgtttcattaaatgaggtttttttttttctcttaggcaaaggtctaataagtatatcaatgtctacttcaatagtatcatttcaaaagtaattattcactttatgtatatcagtctaaacttagactgcctttaatgtttgtaaataggtgtatatggtccatgatctgtgagtatcctagattcaaacgcaaatcattacagggtattgatgaaacagtgcctctctgatcacttttaaaagtatattttagacctctctaccctagttaacattccattcttaatttagtcacattttcagatttttggttaagcatcaatatgtagatctttttttccatcattacaactaacttggctttct

SEQ ID NO: 60524 - DNA, 2125 bp, Homo Sapiens
aatgaaggcccatgtagcaaaatactgattcaatgtaaagcaaactttgaaaataagctaatagtccttaaagaaaaacttatttcagatagcaaaagacaagccaatgaactcattagttttaaaaaccaaagtcaagaaaggctgaataagaaaaagacagattatgaaaaagaattattggaaaaaagccggaagttggctttaactgtaaagggcaaagaattgagtgaggaagagttacatgagaaattcaatcaactttggaaaaagtgggtgtgtgatgtatccacaactctcccgcaagttacagagcctgacattgatttggattctgaaaacatcctttgggagtatttcaaaaacaagacgaatgtcgtgggtctactgacaaattctgcagagaagtttcaaatcaattatgataaacatatcaaggtgaataagaaatataaccatatcccaatgacattaacagtctttgagaaagagttcattaatatgactactgactacattgtttcaagatttaataaaattattaacaacatgtggaaacaacagtgtggttacaatccaaattatttccatgagattctaaagacaatagaagaagaagtgaaatctgcctctactcagaagagatacacatttacaaatacatttatcattgacttatgtgtgtgtttatttcaaagagcaagagagaattttaaggaaatgcacagggcattcaagagagcaaatgatcctgtaaactacctagaaagtaagaaagatgatttcttcacgagttttaagatctcctgtcaaggagcaacctccatcaaaacatttgttgatattctgtggtataagctcactcctgcagtctccactactatatgggaggacatgacctttaaaattgcgggggacatgcgagctacctgccctgcgttcaatggaaacaggactaacctggagaaacacattctcttctctctggcagaagaagaaaactttgataattactgggaataccttcataattcaaaatcgttttttaggagttacatcaaaaatcatattaaaagatattgttcagacaatggaggtgaaaaaatgaagactttttttgaaaaaagcttaattgatatcaagaataccatcctctctgccatccatgaatccacatcagtagctaaagataaaagcagcactgcttctgagtggttggatttattctgtgattgcctggggtgcaacttgatctttccacgaagggacttgataagcattgaacaccaggagataaaacatactgaatttcttaaagaagccatgagtgcagctttggatctcacaatgaagaaaatagaacagaattattcaagtaagcctatagaagcaatggtttctaaaattgagaaaatgctctctgaacatctctgtggctgctggaaacagtgtcccagctgtggagcaatttgtacaaacacaattcctacacatgaaggagaccatagtgttcccttccaccgtcctcaggctgtcaatggggaggaatggtatgaaacagatgattttgtcattgattgctgtactagtttggttgcaagtgattgtttgttggttttgagggatggcaggaatttcccatttaagaactatcgacaagcaggaggggattatgccatgtggagcatcaccccagatacctccatccagctatactggaaatggtttgtctctcacttcagatcaaatctagaagaaaaatatcagaaaaaatttgcaggtaaaggtaaaatccccaatgcatgggccaaaatcacaaagcaagatgtgcttgaagacttgaaaaaacagtaatactcagtgaccacaaaagagccccagtgtctgaagaaaagaggcagtgtacctgaacaatccaaaaacaactactcattacaattagaaccttcatcatttccatgtttaaaatgaaatgtgtaaaaatcaatcaattaacacattaagagatgaaaatttccagtaaaaggacttcatttctctctgcctcaattcctctagtttaaaaacaacttactaaaatctgttaatatatgatgaaatcaaataacattcattttagaaacct

SEQ ID NO: 60525 - DNA, 287 bp, Homo Sapiens
  misc_feature (4)..(7): n is a, c, g, or t
  misc_feature (139)..(139): n is a, c, g, or t
  misc_feature (165)..(165): n is a, c, g, or t
  misc_feature (196)..(196): n is a, c, g, or t
  misc_feature (201)..(201): n is a, c, g, or t
  misc_feature (239)..(239): n is a, c, g, or t
  misc_feature (257)..(257): n is a, c, g, or t
gtannnngcaatctgtaacagttttggtagtggtattacagaggatttgtaaaatggattggagtacttaccactatttcatctgctctgaaatagttcactaaccaaactactgacaacagtttaattttggttcttnccttaaaattatacagactgcaccangaacaccatatggacctagtaacacttcagnttttnagaccttacaacctttgcaagtgcttctatggatttcnggggctctttaggatttnctactgcttgaggtcactttgggtaattga

SEQ ID NO: 60526 - DNA, 263 bp, Homo Sapiens
gcgtcgacggattgttggggtagatggagctataaaagcactttgtaatcgtttggttgtagttgaacttaacaacaggactagcagagacttagccgaacagtgtgtaaaggtaagtattacttattggctcattacttatttttctcagacctctcagggatgagtattggctcatttaaacatcacttagagactgaaaaatgtatttactaaaaaaaaaaaatttctaaaaaaaaaaaaagtccgacgcggccgcgaat

SEQ ID NO: 60527 - DNA, 303 bp, Homo Sapiens
catccttgcctaatttcattttcttctgggtcttttgttttctttctggagaatctagcaagatatctggtggaacatctcgaggtgatgaacaaggtagagactgagattgtaggattaaaggtggtcttgagcctttaggagttccttcacttccagcaggggagcatactggctgtggagatctcaagggaaaagatgcagcattcctcattgttgaagaatctccatcgtcactacttagcctgtgcaccatgtgtaggtagtcctcacttgaaccatgtctaggattatcagcatgat

SEQ ID NO: 60528 - DNA, 212 bp, Homo Sapiens
tttttgtagaaacaaagtctctccccgtcacccagactggtctcaaactcccgcgcccaagagatcctctcaccccggcctcccaaagcgctggaactacatcacgcctagttcttcatctctaaacatggtcaaattcatagtctcagggaaaggaaaaaacatttagcatttttcagaacagacaaggaattgccttcattttttatatt

SEQ ID NO: 60529 - DNA, 547 bp, Homo Sapiens
tttttttttgaaatatttaaacaattttattctttctttcacaactaaacacaccttgaggctgaggaacatgtgatttgccatatgatttccaaccttttcttatccattatgttttaacacttgttttccctacttttagtcatttttacaaactgaaggtaaagatacagtaactacatgagtagtgagtacatgaatttttctatataaagaaagtgtgactctactaaaattgaagttttgactcacagacactgctacaatgagataacttgagatattgtctttggtatataatgggcaattatggggtattaatttatgaaactgaatacagaaaagtaaagaattgcctacttttctatattccatttcacatactgatacccctcaattgagtagagctgaaagaaaattcagaaatcattaaatcaaaacttaattcctacatataaagaatgcggcacagacttggctaaaatcacacttctcatagatgcttcagcaagaatcagagtttggggccaataattccaggtcaatt

SEQ ID NO: 60530 - DNA, 2465 bp, Homo Sapiens
atttatttcctgcttacaaggcagtcttcagcatgtgtatgtccatgtggtcattcagggatccaggctccttgtgttttctggctccacctcaccctagttcctaatcatcatccatatccacctgatggaatagaaaatagcgtgaggtgtgttcccaggaggctttgcatgggttagacctggaaggcaaacacatcacgtctgcttatgttccatctggaaaaacatttgagttgccacagcaaattgctagtgagaatgagagatggagttccctgtgtctccaagaagggtatgactttggcagagcagctcttctgttccctgacttctctttctcctgccagaacccagcaccgagagggaccatcagaggatgttccatgagaacttggtgagggttgtggagaggttggctggtgcttctccgtcttcatacagatgtccagacaggggaccagaagtctcaggtctgagctctacctggaagcccctcacgtctgtagccatcaaacctccagataagacgagccctgaagcattttggttgcatcagaaaacagatggaaggccagtcttcacagatgcatatacttcatcctggcttccacccacagaggttgcatctgtgcagaaattcatcccagagcaccaggcaggtgggtgtcaactcctgctgagatttcgctgtatcaggaaactcatgcatctggtgcagatgtcccggagtggctctgacagtccagggctgggcagtggagacactgatgacagccttgagcagagtggttttagtagaaatggcagagacaaaagccaggctagaggagtttaaggaaggaacagaggtaagtaagctagaaatgaacttttccagtcacttggaaaaaataagaccaaagatgattatgcatatcacaactgatacacacatagcccagggccaggttccctcctctctggaacccctgattcctgctggtgctgttttatctccccaggtagccactgtgtctttatctccctccagagaagcaacgcgctccagactctgatgcactggaggcaggagacagctgcaggtggtggtgtgctctggaagagtagaaacagagacccctcatagataccctgtcttcagaatagacctaggctcttcaccccaccacccctgccaccacccccacccaagccactgcagtgtcttgcccagacaaggggcatagccaactaactgatccctcagatcttgccctggtccccctaagataactctttatatggcagctttctccatcttagcactttgggaggccgagacaggtggactgcctgagctcaggagttcaagaccagcctgggcaacatggtgaagtccagtctgtattaaaactataaaaaattagctgggcatggtggcgcacacctctaatcccaactactgtggaggctgaggcatgagaatcacttgaacctgggaggcagaggatgcagtgagccgagatggtgccacttcactccagcctggacaacagagcaagactctgtctaaaacaacaacaacaaaaaaaaaaaaaaaaaacaaacaaaagaaggaagaaagaaagaagggagggaaggagggaaagaaaaaggaaggaaagaaagagaaagagaaaacactataacagagatgatgaaggcatttgatgggaccatcagtagactggacatagatgaggaaaaaatcagcctgaaggtatgttaatagaaccttcccaaactgtaatgcaaagaaaaaaatggggaaaaaaacagattatacaagaactgtgggatattttcaaaaggtatatgcacaattgaaacaccacaaggagaagaaagggagaacagagcagaaaaatcgtgaaagttataatggctcccaattttccaaaagtaaaggcagaccccaagccacggatccagtaagcttagagaacaccaaataggatacatacttaaaaaaaaaatcaacacctacatatatcatattcaaactgtagaaaaccaaagacaaacacaaaatcttgaaagaagccatagaaaaaaacccagcttacttatacaggaaacgaataagaattacagccttcttgtcagaacacgcaagcaagaagagaaaagggtgaaatatgtaaagtgttgaaagagaaaactggctgggcaagtggctcatgcctgtaatcccagcactttggaaggccgaggtgggtggatcacgaggtcaggatttcaagaccatcctggctaacacggtgaaaccccgtctctactaaaaatacaaaaaaattagccaggcgtggtggcagacgcctgtagtcccagctactcgggaggctgaggcaggagaatggcctgaacccgggaggtggagcttgcagtgagccgagatcgcgccattgcactccagtttgggcgacagagcaagactctgcctc

SEQ ID NO: 60531 - DNA, 449 bp, Homo Sapiens
aaagtcttgctctgtcacccaggctgaagtacaagcaagatcgtagctcactgcaagctcaaactcctaggctccagcaatccccctacctcagcctccagagtagctaggactataggcacacaccaccaccccggctaatttttttttttttttttttaagtagagataaagtctcactattttgtccaggctgttctcaaactcctggctcaagcctcatcctcccaaagtgctaggactacaggtgtgagccaccacacccagtgtgagttcacttttaatctttacaagcaactaactctggttttggctcatttaatttctagtttacatcttgcatattatgctaactgggcaattttttttttaaaaaaggaagcaatcttttacaattatgctttttttcaatttttcaaaaggtcacaaggaatttctacccatgcatg

SEQ ID NO: 60532 - DNA, 2162 bp, Homo Sapiens
atttgagtctaggaaacctggctcagggacccacactcttaaaaatcatgccgtaatgtcattatgctgtattgcctaagacaaatgcatatatacactggtacaaataccttgtccgaaaaatgcccatagccttactgaagagactatttacaaatacggtatagatgaacaatgatgtgtgacagtagttgtcactggctcttccctaggtagccagggaaaggctcatttatttgagaaaagcaaaggcatagaagggatatttttgtgtaggaatgggaggttggggatgtgtaagagatgagattgggaaaaacctcattgtgtgtatatctatttatttataaaaatattcatgtactaccacagtatattatgtgctttataaaaaacattcaaaaaagacaaaaatgaaaaattatacataaacaggatttctaattatctttccccacccctattgtattttcttgaacacctaggaatatccttactctgggctatagaaataatggaaggttgttacataaatatatttaatataggtaaatattacattctgctttatttataggtatgttcacagattaattatagggccatctatgtgctttttttttttttttaagacaattttattcttcattcatgtctcacatggcgtatctgacctggtgctccatacataatgggcatgcattagggtgactggcttgctccttttactttgtgcccaactgtctcaggtacatgttagtgtttaacaaacaaccccaaaacttggatggaggctaaataacaatggctcagaattctgtgggttactccacagcttcagctttcttacagctattctgggcctggatggtctaagacgggctctcacgtatttggctgttggttagttggactaggagagcctcagccgggtcatctcatctcagctgtatgtgactctcaacttacaagaagctagaccaggcttccccacatggtggtctcaggataacattccaagaacgtgagagttgaagctcccaacatctcatttgtgaaagaatgtcacaatgtcagcccagattcaagattgaggaaatagattacacctctacatggaagaagatacaaggccacattgcaaaggaatggaaggaattaactgcagccatctttgaaaaagttcaccacacccacagattcagatttctgtgaaaatctaataaaagtctagtttaaaagaggagcgaaatatatttggttctttacttcttttcatttcctggaagtacatagggtttggtttttgttttttttttttacatgatgaattcctatgttttcctcttgcccacatagtcctgtgtggaacaatagtctactgataagaatcaacttgtatcctgctgctaatcaatgagaatttctctgccctcatcaacttaatctaggatatcccttccagaataccaagataatgtaagcttttatttagcagggtaatttgctaaacattgttcataagtagtgcccttttagcttaaggcagccctgagctgcaacagaagactgaatggagctctgtatacattctagcttcctcacctcactcttaaagtgggttagatgaaatctggtaggagaacatagatcatttgccagtgatgatattcataagtggtaaaaaaaggaatgacctgaaacatttttatactgtgtttgttattcttctaaagagattagagttttactgagaccaccaattctctttggaggctggggatagtagcatcaacattctcactgattaatgaagtggtgttcacattggatttgtgaacagacccatcatatgcagacttctggtctactgaggagcatgtgtctctacatgtttacagtggtggagtttccttgcccctctgccaataaccacaaaatgatcagtaatgagaaataattaagtatctagaggaagaaaacaaagacatgaatttcatgatactctcatgctttgtattatcagtgacttcattgtttctcttggcaaatttttaatgcatctgtgcttggcccaggggtgcatactagggtaaagaaaaattttgtaatagcaacagtggtttgggattttcagggtaccaaaaaaaaaaaaaaaaaaa

SEQ ID NO: 60533 - DNA, 533 bp, Homo Sapiens
atgagcactttcccctctgtcaaaataatcagttttcataggaattaggtttttagccaaatggctgtgaggcaagttgaagttagacaagaaaattgcaaatatttttagatgaaaatatttactttcagcagattttgagacagtcttgctccgttgcccagcctgcattgcagtggagcgatctcagctcattgcaaccacctcctcctggattcaagcgattcttgtgcctcggcctcccaagtggctgggatttacaggcatgtgccaccatgctctactaaaagtaaaaagattagctgggcgtggtggtgtgtgcttgtaatcctagcttgttgggaggctgagacaggagaatcgcttgaatccaggaggcgaaggttgtagtgagcccatattgagccactgcactccagcttgggcaatagagcaagactctgaaaaaaaaaaaaaaaaaacacttgcggccgcaagcttattccctttattgagggttaattttagcttggcactggccgtcgttttacaaa

SEQ ID NO: 60534 - DNA, 325 bp, Homo Sapiens
tttttttttttttttttttttttttggtagagatggggttttgccaagttgcttgagctggtcttgaactcctgggctcaagcggtccctgaccttggccacccaaagtgctgggaatacagacatgaaccaccgcacctggcctcaaaaactttttttaaagccatttttatataaaggctacagtatattttcccccaaagttaaaaagcacttttctcatggctaggaatgaatatttaaatgcattgtttttccagactgatgatttttaggacaaacctgaagctagaaatagtactaatactcaacaccaagtatatgt

SEQ ID NO: 60535 - DNA, 482 bp, Homo Sapiens
tttttttttttttttttcagaagcatgcatgatattttattttaaaaagataaaataaggaaaattgaagtccagcatctctaagatactggataaatatcttaataatcgaacagtaaagctctaatacagtacaaacattttaccattatgtttgccaataattaagcaaactgagcatcataagaatgaggtgagatgtaaaattactggaaagtttaattcactagaaatgagaaattttacatttgttatattatcctgtatttgtgtactacatttttctggcagaatgactccttgctgaaaaaaaatggcttaaagtaggtgcttttttaatggttttgcaaattctggagaacagggactgcttcttcctaaacaagatccccggtcttgctattagtctagaatagtgaatatatatttaataaatgcttgttgagtgaaccaatatgtgaatgattttcttagtggatttc

SEQ ID NO: 60536 - DNA, 542 bp, Homo Sapiens
tttttttccccttggccacggtacattttaggaagggtgaagataaagtgaaggttgtgaaatcaagcaggcgataacatgttaagggtcaaatgtctcagttcctgaattttgatggtgcaatacaaagcagaccgcttggtttgaaggcagctttgatcctgttataagatgatcaaaggctcaaaagatttttctggtcaccaccactaagtcaagggcacttttccttgtcactaggaaaggccctaagtatttacaaatttaaaataaaatagtttgtgagcttgaacaacagttaggaagcaaatagcacttcaatggccataataacctggatcctgggtagcctaaacaactcagttctacaacctaaattcacaggcagttcaggtgaacgttgggcaccattttctttccttcttggccactctgggccatcttttcacttctttttttccctcaatatcttctcttttctaaatgctcttattataaatgtgaaatatattttattttaaatgttttatttattaagattg

SEQ ID NO: 60537 - DNA, 502 bp, Homo Sapiens
ttttttgtagagacaggtttcaccaagttgctcaggctggcctcaaactcctaggctcaggtaatcacccaccttggcctctcaaaagtgctgggattacaggcatgagccaccatcctgtttttgtttcactggtatgagtaacggttgtagtgccgaagttcattattaggagatggtggcaatatcagcacactagtgtagaggctaacagcatggacttgggagccagaccatggaccacctctaccgcttactagcaggttccacttggacaaattatctaatctgttttaatttctgtatctcaaaaaagaaaacaatgaagaggtaatacattcaaggaccttagaaaagtatctaaactaagaagtcctcaaaaaagagcacttttcctcttttatttttactggtgtgagagatggttgcagagccagaatttcattattttttaaaaatcatgaaaatagcacaataatctctttctcatataacctctctg

SEQ ID NO: 60538 - DNA, 455 bp, Homo Sapiens
gagatggagtcttgctctgttggccaggctggagtgcaatggtgcaatctcagctcaccgcaacctccacatcccgggtccaagcgattctcccgcctcagcctcctgagtagctgggactacaggcgcacgcaccacggccagctaatthhvtgtgtgtgaatttchagtagagccggagtttcaccatgttggccaggcgggtctcaaactcctggcatccggccctctgggcttctgagaaagttcttccaaacattccctgctgtggacagtgaacagcccaccataatgcagagccagaattaggataatgctaacaatatggatggcagagcccagaaacagagagaaacagtccctaaccgtcttgagaagcggaacccaaccctcactgaggcaacamagacgttattcttttccattttttcmattatgaaamaagccgacttgag

SEQ ID NO: 60539 - DNA, 399 bp, Homo Sapiens
ttttctgtcatctgtcacccagactggactgcagtggtgccatcatgtcttactgcagcctcaaactcctgggctcaagtggtcctcctgcttcagcttcccaagtagctgggactacaggcatgtgcaccacccccagccaaaacatccatattttctcttagaatggtttacattatgatgggggatggggagctgggggagggctgtacattcccaaaagaaagtagtgttataggaaatccaaatgcacttcagtgattcactcctgaaaagcagcctgggtatgttggcagattttgtttgcatttgtcttgcgtatttaaagtctcaggaaatctagtcttggtccaaaacactggagaaaaaaataacaccagacaaaacacatttgagtaa

SEQ ID NO: 60540 - DNA, 482 bp, Homo Sapiens
  misc_feature (254)..(254): n is a, c, g, or t
gagatggagtcttgctctgtcacctgggctggagtgcagtggtgtgatctcggctcactgcagtctctgcctcccgcgttcaagcaattctctgcctcagcctcccgagtacctgggattacaggtgcccaccaccacgcctggctaatttttgtatttttagtggagacggggtttcaccatcttggccaggctggtcttggtgatccacccgcctcggcctcccaaaatgctggcattacaggcgtgacacncggtgcccggcctctgttaagatttttaagagcagaatcaagaaattgaaggatttgctgttattcctacctgcattggacttgacctgggtgttgggtgagtagcaatctgttactgtttctctatgtggacgatgaggaaagggttgagaaatccagcgaaaggacacttctgttaatagctcaatctgctgcccatggttgggaaaaggggagtatgcggtggtg

SEQ ID NO: 60541 - DNA, 500 bp, Homo Sapiens
  misc_feature (320)..(320): n is a, c, g, or t
  misc_feature (395)..(395): n is a, c, g, or t
  misc_feature (409)..(409): n is a, c, g, or t
ggttgggggtaagaaggagaaaaggaagggtataagttatttttaagacaagcaatacaacagaaagaaaaatgtatttatagtcctgtcagtctattttaaaaacagatggctataatctatagttttaaatgtacacaggttgaaaaaaaaaatcacagggcactctaagtcagggttcccttttccaaagagaaggcttgaaactcagaaaaaatacaaatacttgtacaggttatggccagaaaatatatggaaatatgtacaatttcaaatactaagcaaaacgaacaaaaccctcatagtactcttataatttngaagtttaaaataattggcttatgggataacgattattccttcattcttaaatttcctgcactttgaataacccntgaaattaactccnttttaagaggtgctgaggctgagcaaggcagctcacgcctgtaatcccagcactttggggaggtcgaggggaggaggaccggcttgagccc

SEQ ID NO: 60542 - DNA, 431 bp, Homo Sapiens
tcaatttttatttgctttttatttttagaggcagggtcttgttatattgccccgtctggagagcagtgggtattcacaggtacaatgacacaccacagcctggaactcctgaccttaagcagatcctcacatcccagcctcccaagtaggtgggactacaggcgggcaccaccacacctagcttaaacaatcaatttttaaataacatattcatttaatgtaataattttgttgcacttatggatttcactcaaactgtttttaacaagtttaaatcctagaaattctttttctgctataattgtctcacttaagacgtagtgaaaggaaatgacacccttttccataactctaccacagaaatcttgctaaaaagaaccttttcagtacagcttagtctactgttgtcagtgggcttctcttactttggc

SEQ ID NO: 60543 - DNA, 3711 bp, Homo Sapiens; identical to SEQ ID NO: 22851
  misc_feature (3592)..(3592): n is a, c, g, or t
  misc_feature (3662)..(3662): n is a, c, g, or t
  misc_feature (3675)..(3675): n is a, c, g, or t
  misc_feature (3686)..(3686): n is a, c, g, or t

SEQ ID NO: 60544 - DNA, 475 bp, Homo Sapiens
aaatgcagaagatgttaaacaaagtgaatttgggacatgctgctcgtactgtgtgttacagccctgaaggggacatggtggctattggaatgaaaaatggagaatttatcattttactagtgagttctctaaaaatatggggaaagaatagagacaggagatgtgcaatccatgatatcaggttagtgaacaaatggaatagagtttctagtatatacttgatttaacttccatttgtaaaattttccatagccttgccttcaaaaagaggtccccagggcctgtagcatttcccgtattataaattgtatgctaaaatatggctgtttgtatactacttaattcttcttgctaaattataaacccactgggcaccaactataatagcaagtactagtaggtaatgtttgatgaattcatgttaacacttagccatgtccattaagttcatcccaccaagaggtatctaccactg

SEQ ID NO: 60545 - DNA, 340 bp, Homo Sapiens
  misc_feature (22)..(22): n is a, c, g, or t
  misc_feature (50)..(50): n is a, c, g, or t
  misc_feature (238)..(238): n is a, c, g, or t
  misc_feature (285)..(285): n is a, c, g, or t
  misc_feature (288)..(288): n is a, c, g, or t
gtctgctagaaatctacaaggntgatcccactatctttagtatgtaaggnttacacctgagatatagaatagaatttgagactgccacacatttattcaggccttgttactttaagaaatatcttattttttccaccccaaaggagcaagtgaaccaattattgctgacataataggttcccttcctccataaaaggattatcagccatgatcattaacattaaaccaaatagatggngccaaaaagagataaaagtagcttcttaggccctattaaatcagggnagnctagaagaaaatttacattgcttctcctttttttaatggcccagcggggtat

SEQ ID NO: 60546 - DNA, 558 bp, Homo Sapiens
cccgctccactccccccaagcgggggggggggaggatgacgtcgtggatccgcggggaaccctcctaaaggaatagctgcggccgcagaattttttttttttttttctttttggagatgggtctcactctgttgcccaggatggagtgcagtggctcaatcttgggtcaccgcaacctctgcctcttgggttcaggcaattctcctgcctcagcctcccaggtagttggaactacaggctgtatcaatttaaatgaacattattcaaagtgtgcaaggtacgctgtcaaaaactgttacctctttttaggtacttggctttttgaatcaaaaacgttttcacactgtgacagctaaacaatgacacagaattcattcagatgttgaaacactgaacgactacaatggcaatctagaatattctgattacgattttctggttaaaacacctcattgtacccttgactaactttacattaggaaaagctttacattataacttacaattataaaaatgtccctttcatatacattggagtttaatgcagcttacaataaa

SEQ ID NO: 60547 - DNA, 508 bp, Homo Sapiens
tttttttttttttttacttttttttgcagggatagggccttgctacgttgcctagtctgaacccccggcctcaggggatcgcctgccttgacctcccaagtagctgggactacaggcgtgcaccaccgcacccggtcctgtgttgtgatgttttactattggataaacttataagcattccctctcatgtaattttaggataacaattctatttttcatgagaatctcctgtctgaacactgcatgcatggccctagtgaactgactgagactaggggaacagtcccagcaacgatcacattgctctgctgacgcgggtgcggcagggacctgccctgagtctggcacccaggggtgctcatcacacacctgagcaaactcacactctgagccggatcctggcgacccgggctctggaaactgacgtgtggacactgttgctcccgagcagaacagccttctgcccagcccacctagggcaaatgtaacacctctaacaggctggaca

SEQ ID NO: 60548 - DNA, 731 bp, Homo Sapiens
  misc_feature (548)..(548): n is a, c, g, or t
  misc_feature (559)..(559): n is a, c, g, or t
ttttttttttttttttttttaaaaaagagatggggtttcatatgttgcccaggctaaacgcatactcctgggctcaagtgatcctcccacctcagcctcccaagtagctgggactataagtgcacccccccactttttctctctctttttttgcatcaaataaccagtggattcctccccccatcccctatcctggtcgggtttatacttgccaaatgcaaatatcaaaaggatacagagagtggaccagtaactggtgactctcaaaggactctatcggttcaatctgtctttcatgacttcaatttcaaaatcagcagtttatagggagattttgtacaaagcatgtatattacttacatgtcactatagctctagacagttacacctcatgcaaactcagtctagagcagcactggctaaaagaagtaaaatgtgagccatgtgtcattttaaattttctagtagccacatcggaaaagaaaaaaaaaatacagctgaaattttaacattttacttaacccaacatatccaaaatatcatttcancatggtatcanctaacaaatgattaatgggatattttacgtcctttttttaatataggggatatttacattctttttgtacaaagtcatgaaatgtagtctgatatgccatagccacttaggttggctgacacatcaatgccaaaggcaaggggtagtggcctctcggacagttaggttaggt

SEQ ID NO: 60549 - DNA, 464 bp, Homo Sapiens
agactgagcctcactcttgttgcccaggctgcagtgcaatggcacaatctcggctcactgcaacctctgcctcctgggttcaagcgattctcctgcctcagcctcctgagcagctaagaccacaggcacacaccaccatgcccagctaatcttttgtatttttagtagagacgaggcttcaccatgccggccaggtgtgtctcaaactcccgacctcaggtgaaccccctcctcggcctcccaaagtgctgggattaaaggcatgagcactgcacccagcccattgagatacttttttactcagtttttttctaagaatggattttcctctttatgaaaacaaaatattccttttctttataaaactttataggcaaatttatcaagctggtaaattccataacaggctgaaccaaatgaaatacctaagtaaagcaaattacatgattagaaggctaattatg

SEQ ID NO: 60550 - DNA, 481 bp, Homo Sapiens
tttggctgccagattttatttccacaccagttatcttcttcttaacaagttacacctataatcttaaaatcgcccagttattttacaaacatctgtcctcaatcttaatctttatttgccactatcctaatgtacttgctaagttttacagcaaagcagaagtgatgcagagatgaagtgttagtcataaagaccaataaagacaaaaaatgatgtgctgtctgcggtcttccccacacggtctgtttacaagtaacattacaaatctctcaagctcctcccagacactatgtttatagaagtgctagactatacacttttggtccacccatatttaatgtctttggtaaaaattacttcattaattaatagaaaggtttgtaccttgctatctctagcatgacacaaaacaatttgctgattagtcccaataatgacaagtttatacaatattgatatttacagtgtgaaaataaagctg

SEQ ID NO: 60551 - DNA, 2273 bp, Homo Sapiens
aagacagtctcgatctctgtcctgtggtatacagcatccagggaagtgcccagggaccagggcaggcagaggtcttcctgcctttaccccacctgggcccagttcctgcgcaggggcttggccagtcctggtcagctttccctctgatgactgcaggaagagagtcagacgcggaactcccagggtgcagaggcctgcggggtctgaagggcctcctccctctccagtgtggtgactgggctgaggagatgctgggactgagagtgtcatggtggagcctccgtccctgctcatcctctccgcatgttgcttctgctcccgatggctctctctgaaatgcagcacaacctcctaggccaatggaagaaggcccagagctggctccctgcctggaagcacgaggagacccgcacaggcatcctgagaaggcgtggagagcaggctgccttcatggggggagtgccagggcctgggcacccacacccgctgacccaagagggcccgggcacctgcgtgctggcctcttcactgaccttcgctctgtctgctctctttgtgtctctctctgacctccagaggcctcctttctctctgccaggaacagtagcccccctgcaaggccctccttttcctccagcccgcagcctgcggcctctccggttctgctccacagcccggctgccacacactcgcctctctctccaggccccccgggttccctccgcctctcttgctgcctgttctctccttttgcaggttgcgtttattggcttatctctgggggttggtgctctcccttgtttccatggaaactgcctggccccaggaggcccaagcagctttgagctccaagggcaggaccatgcaggccatcgctgccctgccgcttagccacagggcacgatttctgactcggtttattagagacatagtgtggcagtctctagaccccacagtcgggctggcatctggggacaggaccaacacccccacaccccagaggcgaactgtggtgagtgtaaagagcccctctccaggggaagacagccggccagagtgcggtgtgctgtgctggagagcacagccccaggcgtgacaaacacctcggcctcttagaagttgtcccttatctggacaggaagtctggaggctgaaacagagactcccaccttcccagagtctcctgggcagtgccacacagatgccatatgctggccccgtggccacactccagcactcagcccccttgcccacctcactcctgagttagcacactttccaggtgtcagcaggtgtgatcaggggctcagagccagggtcctgtgagagcccaggggtctttggttgcacctcctgcgtgcacttcctgacagcgcccacctcactgccacccagagctcagacccaagggagggtggagaggggctgagggacaggcctggagtaggggtgtatgcactgcaggctgagatgagcaattgaggggcaagtgtccagcaggagggagaaactgggaacagagtccttgtcactccaggggatgttgctgctcactcagcactcactcagggctctgggagccaggcctagctctcagggcagagggtgtggcagggaagtgagatgatcacactcagagcccagtgagaggcagtgaggaaaaccaccagcgagaccagtgtggtggctcacacctgtaatcccagcactttgggaagtcaaggcaggtggatcccttgagctcaggagttcaagaccagcctgggcaacatagcaagaccccatctctacaaaaaatacaaaaactagccaggcagggctgggcgcggtggctcacgcctgtaatcccagcactttgggaggccgaggcgggcggatctcgaggtcaggagattgagaccatcccggctaacacggtgaaaccccgtctctactaaaaatacaaaaaaaattagctgggcatggtggcaggtgcctgtagtcccagctactcgggaggctgaggcagaagaatggcgtgaacttgggaggtggagcttacagtgagccgagatcacaccactgcactccagcctgggggacagagcgagactccgtctcaaaaaaaaaaaaaaaaaaactagccaggcgggcatggtggtggcacccatctgtagtcccagctacttgggaggctgaggtgggaggatcgcctgagcctgagggggatgttgccgtgagccaagagcttgtgactggactccagcctgggcaacagagcaagaccctgtctc

SEQ ID NO: 60552 - DNA, 2365 bp, Homo Sapiens
aaaaagacctactttgtgagagagtatagtgtcctccatgatgtcaacctcaatgaatcagataggtcccaagccatatctgtgggttaataatccatcatgaatcaattgccattaacttgccaagaactttttttcaatttcagtttgaagtttcactcttctgtgtgcttatttgtttgttggtttgttatgttttagccactgtaggcttctagagagaataaccattcctttcctggcccacgccctttccagtttgctttccagggtagagttactaattaaattccagacacttattaacaaacttttattactagacaggatcatgcacatggatgtaactccttttagctccatcttttcctcactccctctgattggttggtatgaccaaagggccattgtccagttccatatagggaagggatctgtggggtcttgctggctagctccctcacccttccaccttctcactctctccatgcattatgtatgcttcacatgggccttgctcatgtgaaacgaatgcccaggagttcaaggttgcagtgcaaggaggcccaagcattcttctctttgcaatctggtacttacagggttctaagtactccattaaaactgggtgtgtgggaggagaagaaacactgggcagctctcctacaaccagtatccctaggaaggaaatggaagaaaagaccctgtaatttggatgactatgtatggggacagctgaaatacataccacttaagttctccttcactgctgctgctgctgatcggcaatgtgtgaaagcagctgagccaggagagcccagcatgcacgcggctgccactgcaatggcaggtaccagggccggtactacatttgatgaattacaatgccaagaagacatggtttgtaccaggtttgaaaacaaggcctatgtgaataccaatgactttacgagacaataaggaaaaacaacgtagactgagttccccatctagtgacacccacagccctagcttcctccttaagcccctcagactgttttatctctgaactggttagtgaagacttaaaaacatagtcctgcaggttgactaagaaaaatctttaagaatggcaactggtgggtgttaccttcactcactgcaagatctgccgtatatatggtttaaaaagaattttaaaagttagttaaggtcaatcatggtggctcacacctataattttagagctttgggaggtcgagaagcacgaggattgcttgaggccaggagttcaatatcagtttgggcaatatggcgagacctcatctctacaaaattaaattagctggggtggtggcacacgtctgtagtcctagctactcaggaggctgaggcaggaggatcgcttgagcccagaagttcaagggtgcagtgagctatgattgcaccattgcacctccagcctgggcaacagagtgagactctgtcaaaaaaaaaaaaaaaaaaagttggtagggaaaagctaacaagagacttttgaaaatagaaaatagagtaaatagcattattcaagacacagaaagaaagcaggaaagcatatttgtgagaaataattattaaaggggctaggcacagtggctcacacctgtaatcccagcactttggtaggccaagatggctggatcacctgaggtcaggcgttcaataccagcctggccaacatggtgaaaccccgtctctactaaaaatacaaaaaattagccgagatggctggatcatctgaggtcaggagttcaataccagcctggccaacgtggtgaaaccccgtgtactaaaatataaaatacaaaaaattagctgggattacaggcacacaccacaatgccaggctatttttttgtattttcagtagagacagggcttttgccatgtcgcccaggctggtctcgaactcctgagctcaggcaatccactccccctttggcctcccaaagtgctgggattacaggcgccaccgcgcctggccaaaaggcatttcattctttttattttattttattattatactttaagttttagggtacatgtgcacaacgtgcaggtttgttacatacgtatacatgtgccatgttggtgtgctgcacccattaactcatcatttacattaggtgtatctcctaatgctatccttcccccccccaccctccccaccccacgacaggcccaggtgtgtgatgttccctttcctgtgtccaagtgttctcattgttcaattccgacctatgagtgagaacgaaggcatttcattcttgatgatggtggtggtgatgatgttgatgacaattatattaataaagccattgctgtgaaaaaaaaaaaaaaaaaa

SEQ ID NO: 60553 - DNA, 541 bp, Homo Sapiens
ctcttgtttgagggcggggtatgtttgagccctgtacattgcaggatgtttatcagcatctctcgcctctacacactagatgccagtagcatgttccccacaaatagtgacaatcacaaaatctttcttggttgagcaccactgtcttagatccaaatcggtattaatttttctccatcttcatccttctttttgttctcttatatactgttctcaatgtaactgtattcatatatatgcttgaattcccaactttccgagatgttgtttaatgagactcacccttatttttcaattcttccttcattctctccctcttaactggtttcctcttacccaagaaaagcctttctcttaactgcaagcttatttgaattttaccttattgaatatctttcaactatttggcagacctttaactttccctaccatgccaatggtcactaaacaccttaaatgccactcttaacaccttaaatgccacccttaacagtattctttcagtcctcattccataaaaatttcttaacatgttacttta

SEQ ID NO: 60554 - DNA, 441 bp, Homo Sapiens
  misc_feature (4)..(4): n is a, c, g, or t
  misc_feature (15)..(15): n is a, c, g, or t
  misc_feature (242)..(242): n is a, c, g, or t
  misc_feature (341)..(341): n is a, c, g, or t
  misc_feature (371)..(371): n is a, c, g, or t
  misc_feature (413)..(413): n is a, c, g, or t
  misc_feature (420)..(420): n is a, c, g, or t
  misc_feature (430)..(430): n is a, c, g, or t
ttangaaataaagangtcttgctatgttgccaggtggaactcaaacttctgggctcacgcggtcttgctgccttggcctcctaactcctgcgctcaggtgatcttcctgcttgggccccctaagtaagctgggattctaggtgtgagccactgtgcccagctctgactgtaacttttgccctagataataacctgtatactgcagtgctgtcataaggatgcatggtactaagaggaaggtntcgaatggcaggcacttagtcaggccatataattaggcaccattattactgctttgggaaggagtaggtataaggcaggccgattccagttaggtaccngagaaagggtgggtgaacgttgctactttnaggcgaactggggagtatcccgggggggaacatggggccctntgggggncttgaagctnggggaaaggcc

SEQ ID NO: 60555 - DNA, 463 bp, Homo Sapiens
ttaagagacatggtcttgctctgttgctcaggctggagtgcagtggtacaatcacagctcactgcagccctgcactcctgggccccagttatcctcctgcctcagccttctgagtagctgggactacaggcacatggctctgtgcccagatcttactttccagacctctgtgcaaataaattgaaaagttagatgaaattgataattttataagaaaaaagggtttaccaaaattgaccctgttagataaaaggtttaaaaaagactgatttccctagaagaaaaaaagaaaaacttatccaggaactacaccacaaaaaagtaccaatcccaggtggtttcatagaaaaattctgccaaatcttcaaagaacagatagctgcaatgctataaactggtcctgactttttttagagaaataaaatacacatataaatactaagtgtatagtcaacagtgtggc

SEQ ID NO: 60556 - DNA, 474 bp, Homo Sapiens
  misc_feature (365)..(365): n is a, c, g, or t
  misc_feature (401)..(401): n is a, c, g, or t
  misc_feature (428)..(428): n is a, c, g, or t
  misc_feature (466)..(466): n is a, c, g, or t
taataaagatgggatctcactatgttgcccaggcaggtctcaaactcctaggctggagtgatcctcccatctcagcctcccaaagtgccaggattccaggcgtgtgctcccgcatccaggcagtctggtttattattcacacagaagtacatctgatattgctgaccagaggagagttgagattccgtatgaagtctatttgttcaattacctgaatcctctgagacgccccagttgcccagtattcacagtggttgtgggtcgggctcagcgtttactttcacaatccagactcctgggggctttgtctctgacatgtggaatgaatgatctcctctgccatgggcttagggggagccaggggncttgtcagctgggtcttcatcagagcttgaggcttnccctcgagggtgggggttcttgtcttnaatgcatcttgagtttttgctttatttctctgtaactntaggggga

SEQ ID NO: 60557 - DNA, 385 bp, Homo Sapiens
tttttttttttttttaaggaaactatatatactttaatgaaacctaattattacacaattttacatttcagcttaattcctattttattgttttgccaacaagactgccaactccttaagcattacagctagtcaagaattaaatctgcattaaatacagaattaatttgtctttggggtttaattttttttaattaatagcaaagtgccatgtcaagaagagtcaatgtaccaaaaaattaaaacagaaaatcaaaattcattaaaacaatttgtttgctcagtagtatattttttttacattcactgaacattcccttgcctttcccataattaaaaagttaattattggaatcatattttttggagatccccagttttcaaa

SEQ ID NO: 60558 - DNA, 441 bp, Homo Sapiens
ctattttacatatcaggctgtgacactcaaacaagtaggtaggctgtcctaatatcaagtgtgatgtaaaaagtctgcaaccggaattttcctagtgaccattaagactctcattttcagtgggctccacaacatcctcctcatccgcctgtgtccccgagcgcaggccaccccagatgggccaggcagcagtgaagagccctctctacagctccaccgcctaggaaggctgggacctcaggaggtcgcgtgacctctcacatctacttcctcacttgtcattgaggggttttagttctatgagatagctttggtctctttctgttctaaagaaaagacgtaactcactcttctataataacagctacattttaagccaccacagacctcatccttttgatgacaaaaatgccttgccatgcattcaggtcgagtgattaa

SEQ ID NO: 60559 - DNA, 448 bp, Homo Sapiens
tcgagggatactctagagcggccgccctttttttttttttttttttttgagacagggtctctctctgtcacctagactggagtgcggtggtgccatcacagctcacggcagcctcaacctctcaggctcaggcagtcttcccacctcagcctcttgagtagctaggactctaggcgtatgccaccaggcctggctaatatcttaacttttttgtagagacagggtcttgctatgttgctcaggctggtctcaaactcttgggctcgagagtttgacttccagctagctgggaatctccccttggaggacccaccagcaccactggccccacatgaccagactccatccaccaccttgccccccacccagcctcctcctcccaccgagcccatcagctcagcaaaagatccatcgtcctccagttacccaggccagcacccaggttgcc

SEQ ID NO: 60560 - DNA, 1908 bp, Homo Sapiens
gagcgccttcccgttcccggtgaccgtgtcgctgtgccacatcctggctctgtgcgctgggctcccgccgctgctgcgcgcctggcgcgtgccccccgcgccgcccgtctcgggccccggacccagtccgcatccgtcgtccggcccgctgctgccgccgcgcttctacccgcgctacgtgctaccgctcgccttcggcaagtacttcgcgtccgtgtcagcgcacgtcagcatctggaaggtgcccgtgtcctatgcacacaccgtcaaggccaccatgcccatctgggtggtcctcctgtcccggatcattatgaaggagaagcagagcaccaaggtatacttgtcactcatccccatcatcagcggtgtcctgctggccaccgtcaccgagttgtcttttgacatgtggggactcgtcagcgccctcgccgccacgctgtgcttctcgcttcagaacattttctccaaaaaggtcttgcgagattcacggatccaccatctccggctgctcaacatcctgggctgccacgccgtcttctttatgatccccacctgggttctggtggacctctcggctttcctggtcagcagcgacttggtgagttgtacagcaccaagaacacgccattttcttggctagttccagaataggtgctttgttgaggagctgtagctgcatgttaacattgtggtatcttttgggcacctgacagccagcgctttcagcagtcagtcctctgtaatgcctcacggtgacgatgcacgccatcgaggaagtgggtttcctgtgtatttccttctctggtgtgcttgatcccaggtgctgatagctgctgtgtgtgcgccagtagcgtcaaggaagagaaggtgactctttcacctcctgacagtatagtccagatagcacattgactttttatttttactcattttttattttaaatgtttattttttagagacagaacctcgctctgttgccagggctggagtgcagtggcacaatcatggctcactgcggccttgacctcaatccggggctcaagcgatcctcccacagcctcccgagtaactgggactgcaggcgaataccaccatgcctggctaatttttttttgtttgatttttgtttttttactgtttttggagagacagggtctcgctatgttgcccaggctggtcctgaactcctggcgttaagagatctgccttggcctcccaaagtgctgggattacagatgtgagccactgtgccttgccagccctggaactttgaaaactatgcactggccaaaaaaaaaaaaaaaaaaaaaaaaaaagccgggcgcagtggctcacgcctgtaatcccagcactctgggaggccaaggcgggcggatcacgaggtcaggagtttgagaccagcctggccaatatggtgacaccctgtttctcccaaaaatacaaaaattagccaggcatggtggctcgcgcctgtagtcccagctacttgggaggctgaggcagaagaattgcttgaacccaggatgtggcggttgcagtgagccgagatggtgccactgcactccagcctgggtgacagagggagactccgtgtcaaaaaaaaaaagaaaaaaacgtgcgctgcctgggtgtggtggcttacgcctataatcccagcactttgggaggccaaggtgtgtgaatcattcgaggtcaggagttcgagaccagcctgaccaatatggtgaaatcctgtctctactaaaaatacaaaattagccaggcgtggtggtgcacgcctgtaatcccagccacttgggaggctgaggtgggagaatcgcttgaacccagaaggcagagtttgcagtgagccgagatcgcaccactgcactccagcctgggcaacaagtgtgaagctccgtctc

SEQ ID NO: 60561 - DNA, 462 bp, Homo Sapiens
tggcatcaagctgctgaaaccacctgtgcaaaaatgataacagtgagagaggtctggggtggctgattccaccgagtcccgggcatgggtcaggctaaccgcgggaggaatttaatctagagtttaacttgtgtggctgactccactgagtcccgggcacgggtcaggctaaccgcgggaggaatttaatctagagtttaacttgcgtggctgactccactgagtcccgggcacgggtcaggctaaccgcgggaggaatttaatctagagtctaacttgcgtggctgactccactgagtcccgggcacgggtcaggctaaccgcgggaggaatttaatctagagtctaacttgcgtggctgactccactgagtcccgggcacgggtcaggctaaccgcgggaggaatttaatctagagtttaacttgtgtggctgtccccactgagttcccggcacgggtca

SEQ ID NO: 60562 - DNA, 315 bp, Homo Sapiens
tttttttttttttttgtatttttttaatagttgttttatttctgttaacacccttcacaatccatctgtttcacaaaataattttagcagaattaaaacttgaatgaaccaaacattgtcagcaattgcaacaacacctacttaatccaaaccccctagtgtgacacttggtggatccaggtgtacagtggaggccgatggtcaggcataaaagacctaaagttcacaggtgatacccaagtagacagcaaaaactaacactgcctttatgggcaaagcactgttctgagtgttttggaacaacccctcgtgccg

SEQ ID NO: 60563 - DNA, 1562 bp, Homo Sapiens
attatgacacccgtctgtgtcactgctcttgacaatgacagaacctacaaaaggatccagggtcctcagcccccatctgcctcccagcctcacttcctgcacttccatgaaaataacctttgttccccctacaaggaacttcttgcagttatccaaatgttccctgtcctggtgcacactgaggcccctgcatggagccaatccttcacttaaatcactatgcccccatgccttcatctggagaactcacacttctgttcagaccctcagatgtgactgcttccgtgttactgctttctctgccatttcactgggcctggaaaataccttctgcaaactccagggagagttactcagctcccccttccctggtgctttgctgatgcctctgtcacagcactcagcacatgacactcggattactggctcacagtcccctgcttccaaaggctctgcctgcatgcctccaggggttatttccagagcacccagctcagtgcctgtccagtggtgaacgtccatacatgtgtgttgaatgaatgagtggacagatgtgtgcagggagaatgtgaattcactcccacaaagcttgtatgtgccaaaaaatattggttatttttcataattgagctaatcttgtttccctagccctatctcctacatggcaggagcatagagaaatttttatccagctgagtaaatgtagcccagtgctgtattttaaacagtcccttaaggtaaagtgatttgtctctcagattgcctctctcccagctcctctcttggacggagctggacacatggcggagagggactttgagatcccaggaagcagggaatgatgagggctggtcctaggagccacgcgagccctctggatgcttgctcatctctgctgcatggggctaggctgaactgctgtctgaactggtacctgctgaggtccatctggttagggcatccactgctggagtccatgcccttagggcatccactgctggagtccatgtcctctacttgcctccggccttgaaatctccacctctgctctctgacccttgagttctgttggcccactgactttagcacctctatacctcagctgaggacatggacacttccaggtccctcacactccgtggaggagctagaggagacagcagccctatgacaggctcattggcctatcggtgtcccatcacagcctctgtaacagccaggataagcttcaagccaagggctgaccttctcccagggtctgccgaggcactccaccagccccagtgttgctgggcttccccgtggccatctgggtgtttctaaagcaactccccaccaacctcttgggctgtggtgaccaagggctaaaaattaagtggggaccctggtatctgacttttgctccacttctgacaccttctttctctcccgtttcactaggactggaaaatacaggctttttttcccaatccttgtttctctcaaaccaagacctcatctacataaaacatctagggtcaggcccatccactctagctcttattacagagaaagagctccag

SEQ ID NO: 60564 - DNA, 456 bp, Homo Sapiens
tttttttttaggttaatttaattgaatttatttaaaaaatattagtgttccatgactccatagtgatcatctaaaatacgagcaggggctacttacagaagaatgcagctaataaggaatgcataatagaattagaaaatcatcattttgtcactcctaatacaattgttgactcagttgaaagaaaggttgtggaggaaccggctatttacatggtctcaaagtatcaccctacagataacaaaggcaaagatttaacattacagtaaagcattctggtggtcaccatcttatccaaacttgatcaaacttagtatcacccatacaggtacaatctctgcctcctgaggtgtagtattcttgacagaaaatgttttttttttttcttttgaagcagggccttgctctgttgctgcaacctcgatctcctgggctcaagcaatcctcccaccacct

SEQ ID NO: 60565 - DNA, 267 bp, Homo Sapiens
tttttttttgaggggtaaaagcagctttattaatggattggagagcacagctgggatctgaggcctaagcaaggttcctttcttcttctgtgaagtgacggctgccgagcccactgggtggggcccaccgaacttacccacccagtcacagacggaggctggaacatggagagccaagtcttggctgagctcaccacgggcaggttctgctgggtctgtttactgcatggagactgactccaaaaggaggaggagcaggggaaatac

SEQ ID NO: 60566 - DNA, 441 bp, Homo Sapiens
ttttttttaaattttaaaatgttttatttctattgaaagaataagtattatgaaactgccatattatccaaagtgacctgtagatttaaagaactccttatcaaaattccagtgtttttcttcacagtaatgaaaaatccaatcctgggggttcatccaccatctcatgtcgcttcatattccagggctctttcccttgttccagacaggtgatcaggtctggcttagagacagcaatacccaggaaggccaggtttctgtagttctctaacatcacatttctatataaattctgctgtgcaatgtccaggtgttgccactcctccagagagaattctatggccacatccctaaatgtcaacagtccctcagctttgcccgtagaagagattgtaatgggtcaagaaatgtgtcacaatgctccctgtggtcaggcttcag

SEQ ID NO: 60567 - DNA, 2075 bp, Homo Sapiens
ttcgaggctctgatgagagtcctaaagtcatcctgttctttgagattcttgatttcttaagcgtggatgaaattaagaataattctgaggttcaaaaccaagaatgtggctttcggaaaattgcctgggcatttcttaagcttctgggagccaatggaaatgcaaacatcaactcaaaacttcgcttgcagctatattacccacctactaagcctcgatccccattaagtgttgttgaggcatttgaatggtggtcaaaatgtccaagaaatcattacccatcaacactgtacgtaactgtaagaggactgaaagttccagactgtataaagccatcttaccgctctatgatggctcttcaggaggaaaaaggtaaaccagtgcattgtgaacgtcaccatgagtcaagctcagtagacacagaacctggattagaagagtcaaaggaagtaataaagtggaaacgactccctgggcaggcttgccgtatcccaaacaaacacctcttctcactaaatgcaggagaacgaggatgtttttgtcttgatttctcccacaatggaagaatattagcagcagcttgtgccagccgggatggatatccaattattttatatgaaattccttctggacgtttcatgagagaattgtgtggccacctcaatatcatttatgatctttcctggtcaaaagatgatcactacatccttacttcatcatctgatggcactgccaggatatggaaaaatgaaataaacaatacaaatactttcagagttttatctcatccttcttttgtttacacggctaaattccatccagctgtaagagagctagtagttacaggatgctatgattccatgatacggatatggaaagttgagatgagagaagattctgccatattggtccgacagtttgatgttcacaaaagttttatcaactcactttgttttgatactgaaggtcatcatatgtattcaggagattgtacaggggtgattgttgtttggaatacctatgtcaagattaatgatttggaacattcagtgcaccactggactataaataaggaaattaaagaaactgagtttaagggaattccaataagttatttggagattcatcccaatggaaaacgtttgttaatccataccaaagacagtactttgagaattatggatctccggatattagtagcaaggaagtttgtaggagcagcaaattatcgggagaagattcatagtactttgactccatgtgggacttttctgtttgctggaagtgaggatggtatagtgtatgtttggaacccagaaacaggagaacaagtagccatgtattctgacttgccattcaagtcacccattcgagacatttcttatcatccatttgaaaatatggttgcattctgtgcatttgggcaaaatgagccaattcttctgtatatttacgatttccatgttgcccagcaggaggctgaaatgttcaaacgctacaatggaacatttccattacctggaatacaccaaagtcaagatgccctatgtacctgtccaaaactaccccatcaaggctcttttcagattgatgaatttgtccacactgaaagttcttcaacgaagatgcagctagtaaaacagaggcttgaaactgtcacagaggtgatacgttcctgtgctgcaaaagtcaacaaaaatctctcatttacttcaccaccagcagtttcctcacaacagtctaagttaaagcagtcaaacatgctgaccgctcaagagattctacatcagtttggtttcactcagaccgacagtcactttgctgaattcaacacatgtatattatggtggaaaaagcactagactcagggtcagccagccagaagaactgagccgacctgggatcccaccacttcctaactgttttgttaggtagttcactttctctcttcggataaatgtctccacatttcctacttcatagaattgtcagaatcaacacaatacatttaatactttgaaactcataaaatattgggagaataaacagtatgaggttaaaaaaaaaaaaaaaaa

SEQ ID NO: 60568 - DNA, 563 bp, Homo Sapiens
ttttttttttgttgggtagagatgagatctcagtgttgcccaaactggtttcaaacttcaggcctcaagcgaggatcgcgccttggcctcccataatgttgggattacaggtgtcagccaccatgctgggctttcatatctttctttttcttctcaaaagtagcgtaaggggcagaaaaaaaatcagtggtatgggatatattatcgggtgctcagttatgggtctataccagtcatcagggagtcactaactaccagaaagtatctcctcttagagatactaagattcttcccatttactatgttttccttaactttcttcatatctaactttacctttctgaggtaaaggctcatggatgttttatacctacaatgttctgatttcttttttttttttttttgagacagggtcttactatgtcacccaggctagagtgcagtggtgttctttaaagaaatatgttgtgatctttgaatggaaaaaaaagtatcacatgactatgttatcactggggattgatttttctgaaaaatttaaacttgtattagtgtacttctga

SEQ ID NO: 60569 - DNA, 1784 bp, Homo Sapiens
ggcttaccacagcctcaacttctcaggctccagccatcctctcacctcagcctcccaagtagctaggactacaggcgtgtgccactgtgcctggcctaattttataattttaaatgtctgtaaagtaagcaaaatgactagttgaattgtacattaaatatatctaatccctaagagtttataatggaaagggatcaaaactttttcaattgcgataaaactcacataacaaaattaaccattttaaagtgaacaatttagtggtatttagtgcattcacagtgtcgtgcagccaacacctgtatctagttccaagacattttcatctccccaaaaggagaccccatacacgtgaagcagtccctctcccatccccctcctcccatccgctagcaactgctaatttgctttttgtctctatggatttacctgttctggatatttcacataaatggaattatacaataaaggaccgtttgtttctaacttctttcactaagcatccatgttatagcatatatcagacttcattcctttatgactgaataatactttgctgaatggatatatcagtgttttatttgtcctttcatcagttggtggacatttgggttctttctaccttttggctattgtgactagtggtgttgcaaacattcatgtacaagtttttgtttgaatgcctgttgtcagttcttctagatttatacttagaagtggaattgctgggtcatatggtaatttctctgtttcaactttttgagagaccacgaaaccgttttccacagtggtggcaccatttgacatgcccactagaaatatatgagagttccattttcttcacatcttctgacagctttttggggtgttgggatgattcgtctaattgggaaaataagtaccttatttgggcctatatggtatttttaattctgtgtgtctgctcccaaactctgtagccctgccctcccttatattgtgtatcctgtttcagattgtttccgtttcttctgagacactgcatatacccctacatgtatctgtgctaggcatacatccctgtaacttcatggcatttttgtaattgctgtgtacctgttacgtatactgagtgggagtgtctcatttgctgtagaactctctgcattagtgtagtgtctggcacacagtagctgctcaggcattttttaagtatatgattattgggaaaactacagagctagggagagatctgaagaaatactagaaatttttttctgcaaagaaaactttagaaaattgttgacatcatctgtggcatgcagcaaaagttgatgtaaaaggaacagaaagacctatggagataatgggatgtaataacagaaaacatacagaaacaattggttctgaaatcagttaagagcagaactggaattcatactctgtggaatgaatcagcaatgtggaaggagtaacaagattttttaaaaagattttgaatttaggctgggtgcagtggctcacgcctgtaaccccatcactttgggaggccagagtaggtggattgcttcaacccaggcattcgagactagcctggacagcatggcaaaaccctatctctacaaaaaataaaaaattagccaggtgtggtggcatgcgcctgtagtcccatctacttgggaggctgaggtggatggatcacctgagcctgggaagtggaggttgcagtaggctgaagtcatgccactgcactcaaacctggcggacagagtgagaccctatctcaaaaaaaaaaaaaaaaaaaa

SEQ ID NO: 60570 - DNA, 230 bp, Homo Sapiens
ttttacctttttaacattgtttctaaatattgtaaacatgaatcttctggacctcagagggaacaaggaagcaatgatattaataatgaatcataatctggaacacctgatattgtacacaaactataacaactggaaatgcctttgcaactgcataagagttagttcaaagaaacaataatttgcatttctaaaatttaaaaaatccccaataaccttttgacaaaact

SEQ ID NO: 60571 - DNA, 1620 bp, Homo Sapiens
gtaatgtgtcagttgaaagccatctttctaggttcagctcatgtaagcctctctgaatgtcacaagtgtatattgttctatatttatcttaaaactgctaagaagttaggggaaatggaaatgcctgcacagatagtcaaaatagaaatggacacggaccaaaaatgctggtggctttacaagggatgctttctcaaaaatttaaaacgtggggagggaagaacatggttaggaaaacagatgactgtctattccacatcactctgcggcctttaaaataggcttttaaaatttttccagccttgggaacttggataaaaaggggcagataaagcagaaacaactctcagcttgttgctgccattgctcaccactaggtggcgacagagtgcagctgcattacaaatctctgcttaagcgacttgccatttgagttacatcaccaaggggaaagggcgaaagacagtctccccagataatctatttacatcaccttataggacatttgcacctacctcagcgtcaaaattaagatgctgattttagccaaggtaggccaagtagtccatcatagtaatctttcatgcaatagcgtgcacatcgaaattaccattttgtttctttttctgtttgttttttacctatttgtcgtattaagaaattatccagtatctttgggttttggtttaccattctgcaaaatggagttgaattgtaaccattatttttttttacgtgaccgagacacatgagaattaaccaatcaatgtcagtgtcccagctctctgtgtaaaactgatgacggacacctttacacagcagaggaaatacatctgtggaaatgtgtatccttcatggaatccctgaggggacccgattaaccctcatcttgtccaactcattgatttcagagatagggaagctgaggcatccccaaggttatatggtgcttaacgcccaaaacagaaagacgcagatgagccgtcttagataactgttcttgctactcattccctactagtcaaatgcctttaaaataaactatttcaactactgtaattagtcagctttcctcaaaactgtctcctagttatccacattaacatggaggtgattcttgttaaaggtaagctttgaaaagttctaaaactcgccattataagacacacacaacttctctgctacgaaaagtcttgattgattctggcctcaggatgtgaacagtatagaaaactgatgatttgtgtgtaaaaagaggggcagggtttgaaagatatgaaggaagggaaaagagaaattgggaaacaggtaaaagcaaggacgggggccgggcgcagtgactcacgcctgtaatcccagcactttaggaggccaaggcgggaagatcacaaggtcaggagatcgagaccatcctggctaacatggtgaaaccctgtctctactaaaaatacaaaaattagctgggcacggtggtgcgtgcctgtagtcccagctactcgggaggctgaggcaggagaatcgcttgaacccgggaggcagaggttgcagtgagccaagatcacaccactgacctctagcctggtggcagagtgagactccatctcaaaaaaaaaaaaaaaa

SEQ ID NO: 60572 - DNA, 486 bp, Homo Sapiens
  misc_feature (310)..(310): n is a, c, g, or t
tttttgagacggagtcttgctctgtcatccaggctggagtgcagtggcgctatcttggctctgtaacctctgccttcagggttcaagcaatcctcctgcctcagcctcttgagtagctggaattacaagtgtacgccaccatgcctggctaatttttgtatttttagtggagacggggtttcaccatgttggccaggctgttctcgaactcctgacctcgtgatccacccacattgtcctcccaagtgctgggattacaggcgtgagccactgtgccatgaggattagtaaagtgcactcatgttaagtnaaaaatttgttttatgtttatgccgattatttgaagggtataataccttagacacaatcaaaacccatggggaacatctttagaattcatttttctcttttcttacaaaaaaagtaaataggtaaaatggaaaatagaagacaacctatcctatcctggatgagacacacacatat

SEQ ID NO: 60573 - DNA, 611 bp, Homo Sapiens
tttttttttgttttttttttttttgtgagatggagtcttgctgtgttgcccaggctggagtgcaatggtgcgatctcggctcactgcaacctcccaggttcaaatgattctccctcctcagcctcgaggatagccgggattacaggcaccggtcatcatgcccagctaatttgtttatttttgtagagagagggttccaccatgctgtccaggctggtcttgaactcctgacctcaggtgatctacccgcctcagcctcctaaagtgctgagattacaggtgtgagccactgcatccagcctccctgactctttattaccttttattctgtttctaagtacttaagtcctgtctccttggccaagccagactaggcccaacaccctcaattcaccctggctccaaagagggcaaaagcaactctctttctctaaggccagggaagtatctaccacaatctctgaaacctgtgaacttttctgtgggcctgtagtttcaagtcccaccttaactgtccttaaaaaaaaaaccaaacaatgacctacctaatccatctaatttctcaactaactgccaccatctctactatatccacctgcatcctatttcac

SEQ ID NO: 60574 - DNA, 439 bp, Homo Sapiens
  misc_feature (379)..(379): n is a, c, g, or t
  misc_feature (401)..(401): n is a, c, g, or t
  misc_feature (414)..(414): n is a, c, g, or t
  misc_feature (435)..(435): n is a, c, g, or t
ttaagctgcaaatcttcagttaacttctactcattaatcaactggaaatatggatctccaagataaacttgttgctaagtttaacatattggtcagttggaagaaaagcaaatggtcatgaaaactcttctttgaaaaaagaaaaggggacaggtgtggttgctcatgcctgtaatcccagcactttaggaggccgaggtgggcagatcacctgaggtcaggagttcaagtctaagcctggccaacatggtgaaaccccatctccaccaaaaatacaaaaattagccggcatttggggcgcacgcttttaatcccagctcttaagggaggctggggcaaggagaatcacttggaacccaggaggcagaaggtttgcagntgaggccaagattcacggccanttgaactggaagncccaggtttacccgaggccanagtt

SEQ ID NO: 60575 - DNA, 527 bp, Homo Sapiens
ttaaacaagagtctcatttttttttgcccatgctggagtgcagtggtgtgatctcggctcactgcaacctctaactcctgggctcaagtgatctttccaaccacagcctctcaaagtagttggaaccatagacatgcaacaccatgattggctaatttttttgtagacacggtagtttttgtagacacagggtttcaccatgttgcccaggctggtctcaaactcctggacttaagcagatccattcgccttggactcccaaagtgccgggactacaggtgtgagctaccacgcccagacgcattttctaaattcttgtgtatctataataattcaactaattaaaactgttttgcactatgatacacaaaaggaggccaacagtgatttcctaaaaaacttaagatatgcctagtttgctgaccagaatgaatacacactgatgtgatcactatatttctcaattcttcacgttcacactagctgctaaggagtgaggcaggatgagggtacatgctgccagcagc

SEQ ID NO: 60576 - DNA, 492 bp, Homo Sapiens
tttttttttttttttttaatgattttaccactacctttttattttgcaggatgtgtaacaccttcccttgctttgtctgcttggcaaactccactccccttttagggtcacttcttctcagaggatgtgtctaactctctgcctttcatgcataataaaggccctgtcatctattctcccagagatcttgatatctttttataacatcaccaacattatatcactgatactcttcatagcagactgcatgctccatgaaggtaggaataatcatctttacaacatcagtgccttgctcagtgaatggccataaaagttcagtgagtgaatgcttaataacttgaagtgaaaggagataaaaaaatcatagtaactcagaatgcacagcaactaactgagaggttgccttgtccaattctctaattcttctattgcttagctaaatatatgtagggtttttcctcctgattttagaatattacaatttatctc

SEQ ID NO: 60577 - DNA, 475 bp, Homo Sapiens
tttgattaaatagaaattttattaaaatattcagatgttcagtgaagataaggtactgattctgattccatataaacattctctatattctgcaagaaaattcattcataaatgttataattacactggcatttacaatcctttctctttttaccattgtagaagatgagtttctatcagattgtggagacttcaattttctagaaactacacatgttggatcagacttggtctcgatgctgctatttgagatgatgtgacagggtctccaggcttcctgatgttgtgccatataatgggtttgagaaggaatagacagaactctctgttttctctgggttgctccagttcccgtaaactggattgacaaaggcacagttaccacttccctcggttttccttattggtacctttctgtttgcaagaaaacacaagactgcaactgtgatgtgagtcatcaggaatgctaatccaa

SEQ ID NO: 60578 - DNA, 451 bp, Homo Sapiens
aagtaggaaagtatgtagggaaggaaaaagcacaaattctacctgagtactaaaacagttaccttttaaaagacaaatcatgcttatgttcacttaagtaagcggaacagacagaaaccactgctcgacttaaagtgtccagaaaaagtgcttctgtagcaacagaatgcctagaagaactcctggatttctagaatgtctcagtataaaaccaagtctttctcttactctgttgtacacgctggaactggatgggttcattcgattccaagacatgtgaccacagaatttcagagttaaaacaagacatcatgagaaggaacctcgttcttaaataatatttttagatctctaaagccagagaggggtttaactgctatttctgtgcaaagattagaaagccagtgtccaaggaaggctgccaagggactggggtttaccttcaggctca

SEQ ID NO: 60579 - DNA, 459 bp, Homo Sapiens
gcaggggatggtgaggcactaacatcacagggataatttatacaagatggatgatattgtagattcatttgcattgaagccaaatcctcaatctcttcttcatacatattgctgctaaattgtattactctaattccaagccagtactcttggcttttttgaaccatacaggaaggatttagatttattcctattacttatcaccctgttagattcatcaaccatttgcccctggccaaggatgttttccacttattgctgcagaatgcttctagtctctcccatgtttatgaaatccatgatttgctctttaggtactctaaatgctcacaaaccatctgaataatactttgggactgataccaaactttcagtctataatttacagcacacgtttccctttaacttgctcctgcttcccagaattccacactgatcataatcagtgattactgatat

SEQ ID NO: 60580 - DNA, 544 bp, Homo Sapiens
tttttttttttttttttggtggtactaatttgtgtgtggttctagttgtctgggaaacactactctaggcatttataatcattacatatacatagttgagaaaaactaaaagcttattttaaattagaaattgaagaatcaacttttaaaataaggccttaaacatacctgagaacaattatttgttatagtattatgtacaaattaataataaacacattttaatctcaatgtggtacactcttgtgtccttttaaagattttaaaatttttaaagaatttcaaagtgtacttaagtaaacttaaaaatgcatcacaaatattttgcacaggctgtaatctcaataagaatttgatcaaacactcaaatgaactatataggcctctcagatttccaaagctagagtactacaaagtttttagttaccctactgattgagtcttttacatcatgcccattttaagataatctatgtattttcttagtcacatccatgtagtagcaacctataactttaaaaaccaaaagcaattgctgacacag

SEQ ID NO: 60581 - DNA, 530 bp, Homo Sapiens
ttttctctaacctgcaaacattttcgccagtggactgccagatttgaaaaagccagcttgaagcaagaatgtaatttaggactcatagaagggtttgagtgtgtgtgtgtttatatttggagattcagcagagcaataagaggcacaatccatccctcctccccaaatttattttctctaattcttagccctctgttttcctaccaattctcatttgcatatgatgcaggaaaacatccacaaatagtttagtaacatgggaatctccttactatatatcccttctgatcttccttcaccttaccttttccttgaacatagctataataaactccatacttctggataatgccacagccaaatattagattttgatccaatcaaagaagggtcattttgaactctgagttctgggccccaagaggcctataactctctttaggtacttaatattattacagtagtaataaaacaaaaaattagcttttctattatgtaggatagtgtactcatattcctagatctttgtc

SEQ ID NO: 60582 - DNA, 447 bp, Homo Sapiens
tttttgaaacaaagtttccctcttgttacccaggctggagtgcaatggcgcaatctcgtctcaggagaatatgcattttaacacgctcccctgatgatacttctgcccactaaagctgtaagtcctagcaatgcaagccttactgttaaactatttttgacttaaattgagtgccagtttcagaaaatcagttatttcattttaaactttattcccagtaggaaatatgagacatttacagatggtgcctgacttacaatggttcagtttaggattttgcaacttcaagatggtcaaaggtgattcccattcagtagaaaccgtacttcgagtatccataaaccattctgtttttacgctttcagtacaatattcaataaattacatggacattcaacactttattataaaattggcctagtgtttgatgattttgcctagctgtag

SEQ ID NO: 60583 - DNA, 471 bp, Homo Sapiens
tggttattggctttctctatgttgcccaggctggtctccaactcttggactcaagcgatcatcctgtctcagcctcccaaaatgtgtcatacctttttaattgtgcaatagacaagtaaaaagggttaagaagaactgatactcttggaaaaaagaaatatacctttcagtgctaattgggcatttacaaaagttagttatatattaatagaggaaggaactccaaaacgttgaaatactatagggtaaattctctaaaatagaataaaactagaaattaatataaacatggaaacaacaaagtctcttaactatctaaaaatttacatatgctaaaaaatcctggattaaagagaaatcaaactttaagacagggttgtccagtcttttggtttccctggaccacactggaagaagaatagttgtcttagaccacacataaaatacagtaacactaatgatagctgattg

SEQ ID NO: 60584 - DNA, 422 bp, Homo Sapiens
ttgataggattatgaatgatttttatttttttctttatactttgtttaaaattttctacaaaattgtatattttttaataattaaggaaagagaaatctttttttaaaaaaatacatttatttcaaccatattgtaacttctgtttaactccattgcctaattccaatggaaaaaatgtatctatctgtagccttctttggaatattttccagatcttctccccgtcatcatttctatagccactactgcaggaaggttttatcatcgtgtatcccctcttcggtgtgattatgtcaggagcagtcaatgctagagaaatttttgctcctctaatttaataataataactaacatacattaggtacaccaagtaccaggctccttgtaaataccctgcatacaatatctcatatgattatct

SEQ ID NO: 60585 - DNA, 557 bp, Homo Sapiens
  misc_feature (554)..(554): n is a, c, g, or t
tttttttttttttttgaataatgtcccttagcttcatacagtaactaatatatgttggcaggcaaaaaatgtttactgaataaaataatctaacaggcatgatgccgcttaaatttttttaacattaaacttctatggaatgcttttacgaatcttttaaaagtaatcatttaaaaatattacaacagacatacctgttagccatccttttcacagatgaaaactggtgacacatatttaatgcagttatataacttatattgggaatacttaaataaaactggagtgcctcacttttattactattcaccactgttggaacatgaataccaacattctttctttgttccactaaagacagttcctttagcaaatctgcggtttcttcttggcaggaactgaaaagaattcggattccagcgccaattaaggtagtcagcaggctgtcatagctctttgttctcctaaacatccttgatgtgtctcctaaatattcatatttagggaaaggcaaacttcagtaactaatattaagtagaattattaatatactntat

SEQ ID NO: 60586 - DNA, 679 bp, Homo Sapiens
atttttaggctgaataattatcagaacttaattattaaggaataacagtaacagctcagctaatatgtaacattcactgtgtgccaggcattgctcctctaagtgcttatatttaactacattaactattttgcagcaataaaaaacacatctgtcataatatgaccaagctgctgttttctgaacaaaaaaactttcaataaaaagtgcatgattttaaaaaattaaggtaatgttctttaaaaatgcttatactttaaaactcaccattttctgaaggcattttgcccaatgtacaagcagagcaggttgaaggccatgtttttcctgggctcttacagtgtttatttcatgctgaactacaagtctcaattctgctgagtttccaggtctaaaaaatacttcaatttactaaaattgttttctaaatacacagttcaccgcttacatacatatatgttaatgggtcacatgacaaattaaatcttcacatgatgattaaatcccctgtaaaacctacgcactaagtgaaatcaatatttttgttttactacttacactgctttgctatgaatcagattacaaaccgcatcccaccaaaattttagtctctttatacatatcctttacacacataaatgtgcaagcataacagctaataagaactgtggtgagaatc

SEQ ID NO: 60587 - DNA, 467 bp, Homo Sapiens
tttaacctaattaggaattttattttaaaatgttaataacatttaaaatacataatatatatgttacaggggaaaacaaacttataaaattatatcacgtgattctaatttttttatatgcaaaacaaaactaaggaataaatatgcctacttcaaaaatagttatctcacagactacgttaaggaccctttatcatatgctatcaaggtaatataacctgagatcagagaaaacctcactagaagtggctttgaatggagaaagagaataaaagaagattcctaccagagaacttgtctacctcagtatcattttattcaaattaaaacagttttacaatcaaacttcaattcttaaaagcagaggaaaaatagtatgtgtgaattctggtatccaaggggatactagaaccaatctccgggctgatacagagggatgactgtacttggaaatgatttggaatgtc

SEQ ID NO: 60588 - DNA, 494 bp, Homo Sapiens
ctgctgctccctcttcaggctgtttgactcttgatctcgcctagtactttttctcaatatctaattcctgagcctgcgattgagttgtcctgcttggacacagcccttggtgttccacatgtgtggtctgatccagtgacaaagaagttgccatttaaacattctcatcttgaagaaccattctgcctttcatgcttcatgtattgaacactgaaactgataggagtcttagctttccctgtgtgtttccaagggtttaatacatacataatgatcaagagaacctgatttaacattttgctcaccctagtattaaaaaaaaaaattctggagaaggtaataaagactaagtttaaagaatgtcttggcagttgttaaaggaaattttaattaaatcccaaaatagtgggtacatgagaataattccatttgagggtaactgttgggtgtcctcattaaagcctatacaatgcatcgtatgaattttctcctgt

SEQ ID NO: 60589 - DNA, 548 bp, Homo Sapiens
cctaatataggtagattttaactggtgcttcttatgttttgaacaggcagggtggatttgcagtgctttctctccaacttgcaaactgactctcaatgtagaaatttactacctatacttcagtttgttgctttgaaaatgaagcctaaatggagggagaaaagctcttgttgttttattatttttgacaatgattttagttgggggtggacattttttaggaatccaacattttctactgcatctgattcatttttcttctgtaggtatagtattattgctactgtggtgtagcttcaggattggttaaccacgcttccactacttactgtaggcccacaacaccaacatagaatttgtttccatgtgcttcaaataaaaattgtgttctggggctggtaataagggtcagctcatagagttagactaagtgtgcacggtatgactctggagacacaatttacaaggtagttggtgtaaactgtgccgcttatgttcctaccatttacaacctgcacaactatacatggtagtcatctcttggagag

SEQ ID NO: 60590 - DNA, 454 bp, Homo Sapiens
  misc_feature (34)..(34): n is a, c, g, or t
  misc_feature (126)..(126): n is a, c, g, or t
  misc_feature (151)..(151): n is a, c, g, or t
  misc_feature (168)..(168): n is a, c, g, or t
  misc_feature (175)..(175): n is a, c, g, or t
  misc_feature (199)..(199): n is a, c, g, or t
  misc_feature (267)..(267): n is a, c, g, or t
  misc_feature (277)..(277): n is a, c, g, or t
  misc_feature (290)..(290): n is a, c, g, or t
  misc_feature (296)..(296): n is a, c, g, or t
  misc_feature (329)..(329): n is a, c, g, or t
  misc_feature (334)..(334): n is a, c, g, or t
  misc_feature (407)..(407): n is a, c, g, or t
ttttttgacctaatgaaataccaaatttcttggnaggcttactggagacaattttttttaaactagacttaattcctgttttaattatttaaaattattaaatcaaaccacctgataaggacagantaaatttaaatatattaatgtaaantttatccaactattgantattggnctgcaaacacttattcatgaaagngataaattttcggttatcagatgggcagacagaccacatctaaaaccactactgaaatgatactttanctgtcaggantctgaggtgacanggaaanttaaaggccggggtcgggtgggctcatggtctntaaancccaacactttgggggagggccaaggagggggagggctcgcttgaggggcaggggggttttgggggacaagcnggggggccaaaacagggggggcacttctggtttttcttacaaaagga

SEQ ID NO: 60591 - DNA, 493 bp, Homo Sapiens
tttggaaagaaagggagagttgggatgggagaaagttatggagaaagtaaatagaaatttaactcttaaactttttaaaataaatgaggatacaactttattcgttaaaaattttaaatcaccttattatagctaaatgagagaaagaaacaaagttggtttgtgaaaaggaaatagaaaaggaaaacaaaaaggtgggttaggagtgagagttacgggaatgagaatgacacaggaactagcagagattccaaggtaaaagctgggctgtggtcattttgacattaattctccccactaaccactctttaaagttcttcaactgctcttgacaggcctttagtctgatctaaagggggaaagagaacagagatgactgttcataggtttaagtgtcatcctgaatacatgtaaagaaaagagctagatatattttaaagatcagagtcttcttagatctatgctaatgtttacatgttttcattcaattagt

SEQ ID NO: 60592 - DNA, 494 bp, Homo Sapiens
  misc_feature (132)..(132): n is a, c, g, or t
  misc_feature (316)..(316): n is a, c, g, or t
  misc_feature (354)..(354): n is a, c, g, or t
  misc_feature (363)..(363): n is a, c, g, or t
  misc_feature (390)..(390): n is a, c, g, or t
  misc_feature (406)..(406): n is a, c, g, or t
  misc_feature (446)..(446): n is a, c, g, or t
  misc_feature (454)..(454): n is a, c, g, or t
  misc_feature (472)..(472): n is a, c, g, or t
  misc_feature (488)..(488): n is a, c, g, or t
atggagtctcactctgttgcctgggctggagtgcagaggtgcgatctcagctcactgcgacctccgcctcccaggttcaagtgattctcctgcctcagcctccctagtagctggaattacaggcgtgacacncacacccggcctgggatttccagttttctgatacagtaaagtctagttttgcccaaagtagaacatttgatactgtttgtgtacttcaatcgtagtttttaaaggaaggcaataaggaacagctactctaggtatttcaaattaaagggaaaaaactgatggcaaatattctgtattcaaaccnttttttaaaacagtcagggtttataatgaggggggatnttgcctatnggtacctatatatggcttatttatccngtgtgttagggcttgnaagggttccccagggttttaatttcttaaaaggggggggnaccttaancctggttttccggttttnaaaagggggagggctncccggg

SEQ ID NO: 60593 - DNA, 381 bp, Homo Sapiens
gtggagatgaggtttcgccatgttgtccaggctggttttgaactcccgacctcaggtgatccgcccaccttggcctcccaaagtgctgggattgcaagcgtgagccactgcccccggcatgaataaatattttagtaattatggagtggggaacccctttctaagcatgagatgaaaccaaaggaccataattataaatacttacaattttatcacataaaattttaaactgtaattggacacagaagaaatatcaacaaaggcccaaacatttgcaacactaatatcctgaacatacgagaagcttttacaaatcaatataacgaatgataagacctaaaggaaaagggcaaaggatataaacagataatccacagaaga

SEQ ID NO: 60594 - DNA, 416 bp, Homo Sapiens
tgctgacatccaatggatgctcaaagtaatacagaggaggaatctcctttcaaaaaaaaatgtacagacagtggaatggagaatgaattattccctaaaaaaaaaaaagccactgtgggctggatgtggtagctcacccccggaatcccagcgcttttggatgccaaagtgggaggatcccttgagcccagaacttccagaccagcctgggcaacatagggagaccaccctctacataaaaaataaaaataaagcttttaagctaacctggtggcgtgatgggatgcacctctggtcccagctactccagaagctgagaagggcaaatcgcttgagttcaaggagttcgaggttggaggttacacttgaacttatgatagtaccttttgcacgccagcctggggtgacagagagct

SEQ ID NO: 60595 - DNA, 396 bp, Homo Sapiens
ctaccttcaaatgtgtgttacaaggttgtgttgtttcttttttttgtttgttttcaaatttatctaaataatcttacataagtgattacttgttccaataagggtactgttgtcaggcaaattctccttgtttttaaatgtaaccattctcagctgttacatttctgctctttatcctttttttttttttttttggtttaaaagcagcgatccatcagcaacaccaaacttgaaattgatttatgtggaaaaacttggcttgtctgccatctaacaagccctgttgagtaaaataagcaagcttaaatttgattagttgtgtgtctgcctgaaaccatttagtagagcactttaattctgcatggtttttacaaaactcattaaaagctggacaac

SEQ ID NO: 60596 - DNA, 521 bp, Homo Sapiens
aagacaagctacagactgggagaaaatgctgcaaaacacatatctgacaacatatttgtatccataatatgtagattcttaaacccaatggtaatataacaatccaattttaagatgaacaaaagatttgaagactcttcaccaaagacatacagatgacagaaatgcacatgaaaagatgttcaccatcagccattagggaaattcaaattaaagccatgattagatatcagtacacacctatcagaatggctaaaataagaaacagacaataccaagtgctgataaatatgcagaccaattggaattacctttctgctgaataacaactttttcttaaacacactatgtaaagatgctttaagtgatattttgatattgtgcttttagacagacacactcgccaattgactcagtacaagtgtctagtcagagaatatagggaaaaaaatttgaattgcacaacatatgtgaacaaaacataaaatgcttttcttggcatgggtagaaacttccagact

SEQ ID NO: 60597 - DNA, 455 bp, Homo Sapiens
ttttttgagacggagtttcactcttgtcgcccaggctggagtgcaatggcgcgatcttggctcaccgcaacctccacctcctggattcaagctattctcctgcctcagcctcccgagtagctgggattacaggcatgcaccaccacgcctggctaattttgtagttttagtagagacggggtttctccatgttggtcaggctggtctcgaattcccaacctcaagtgatctgcccacctcggcctcccaaagtgcagggattacaggcatgagcaccgctcccggcctttgcctgatcatagatccagaaaacttgctgtactcttattacttctcatattcttgcctgacaagcataacaatcatgttacctgtaaatagaaactttccttctttctctattagtaatgaggactccaaatgttttaaaacattttactgtgagattatgaaac

SEQ ID NO: 60598 - DNA, 1645 bp, Homo Sapiens
acagaggagacatagacttctgggaaaagcaggctgaagatggaaacattgaatataaattgaagctggtgaatccatcccagtaccgctttgagcacctggtgacacaaatgaagtggcggctccaggagggacgtggtgaggccatcttcacattgtccagtgtgtctggagagagtctggacctcctcaaagtctttctgaatattctgccgccactcaccaacagcaaagagcaggaggaactcatgcagcagctgacggagttccaggtggatgaaatctacacagtaccagaggtggggactgttgttggaggaacactttccagtgggatttgccgtgagggggaccagctggtggtgggccccacggatgatggctgcttcctggagctgagagtatgcagcatccagcgcaaccgctctgcctgtcgtgtgctgcgagctggtcaggctgctacactggcgcttggggactttgaccgtgcactgcttcgcaagggcatggtgatggtgagcccggagatgaatcctaccatctgctcggtgtttgaggcagagatagtcttactgttccatgccaccaccttccgacgaggattccaggtgacagtacacgtgggcaacgtacgtcagacggcagtggtggaaaagatccatgccaaggacaaactgcggacaggcgagaaggcagtggtacgtttccgcttcctgaaacacccagagtacctgaaggtgggcgccaaactgctgttccgggagggtgtcaccaagggcatcggccatgtcactgatgtacaagccattacagcaggagaagcccaggccaacatgggcttctgaacccttcaggcagggacagttctattgctgtccctacaatatataaggtgacttctggccatgctgccctgccattggcggctctgtgtgttaataggctagggagagaggggtgctgtctgccacttgctccctgccaactttctggagaggtgccaaacttggtgtggccaggaaagggcagtcctgagggagaagacaggattcagggcagtgctccgaagctgtgtgctcacctggttggctcatcaaacctggcaaccctgtggcctgtctgccggagctgactggatccactcatcaattcttcgtccccactactaagactgggcatgttgtgctggcccaggcgtggggctaccaagcaaaggcttggcatataccaaaggccagctgcatgcccatcagtctggtctttttcctctgcggtcatgttggctttcatgctggatcaaatgttttactttcccagactggtggcatctgagttccccatcctaccactctcaccccactttcctgccccacctaaaccctcgttttagtaatttgtagtgactgttcccttccttctgttgcagggaaccaggaggaaagggaaagatgttgccatatttcctactctttaggcatggactctcctttccctttgttagtgtcctgggttcccatggactcagggatttgttggctaaggtttctctgtgcatatatatatatatacatatgtatatatatttaaatacacatatatattgtacagaataaaaatgttttattgaaaaaaaaaaaaaaaaaaa

SEQ ID NO: 60599 - DNA, 574 bp, Homo Sapiens
  misc_feature (427)..(427): n is a, c, g, or t
  misc_feature (443)..(443): n is a, c, g, or t
  misc_feature (468)..(468): n is a, c, g, or t
  misc_feature (473)..(473): n is a, c, g, or t
  misc_feature (483)..(483): n is a, c, g, or t
  misc_feature (493)..(493): n is a, c, g, or t
  misc_feature (518)..(518): n is a, c, g, or t
  misc_feature (561)..(561): n is a, c, g, or t
  misc_feature (567)..(567): n is a, c, g, or t
gtgggagataggggaatatactatcttctagtcctttagttccttttgggaatgtcataattagtttgtgcagacttcttgagggtatggtatattagtatgatagagctatttggatatcagcccaaaggattggtagtttagcaatacagggggaagaaaaaagaatctttggtagcatccttcggaccactgaatcaaccttccctgggacttctctacctctgggctttgggttatatttggaccatctggagttagttcttctgttttaagtctaaagcatcctaaatgagatgtttcttatgcttctaaatatactctttttaaccatgttccattttgtgtggacattgtaagggtaatatatacagacttaaaaagaatatgcctatgaattaggaagctttaagcaatggaaaccatntttcattcactgccantccactatgggtagcaattcttccnatggnaattctgttngttacttccncagtaataaggaagaatcatcagtncaattggtgtaaggtacttttaatggaaacatatctatattcnccaacngtagggg

SEQ ID NO: 60600 - DNA, 501 bp, Homo Sapiens
  misc_feature (308)..(308): n is a, c, g, or t
  misc_feature (388)..(388): n is a, c, g, or t
  misc_feature (482)..(482): n is a, c, g, or t
gatttttttttttttttggtaaattccctaagtatagaaaacaatgttatacctccgtgggagatggcaggaaaaatatgcttagcctgatgcttatcaactttaaaacttaatagttcagctcatgacatagtcttttaaagaagaatgggaatacatctgtcggggtgtaatttaggtagcagtgcctgaaggcaggaggaaagacaagatcacttcccaataactgtacatgttcatgaacaatgccaccacagcaggcaccagtgactcagaatcgagacaagagagaatattatgaaatctcntagttaggaaatgctgatctgtatcagctactaactccccagactaccttcacaaagttacttcttctctacttctgatncgtcatccaatccccggccgccatgcggccggaacatcaattccggcccatcccctatatgattcttttacatcccgccgtcttttaactcctnactggaaacccgctttccc

SEQ ID NO: 60601 - DNA, 2414 bp, Homo Sapiens
ctgcaggagaacgccagtggccgggggaacatgcccatgctctgcccccctgagtacatggtctgcttcttacaccggctgatctctgccctgcgctactattgggatgaatacaaggcttccaatcctcatgcttccttcagtgaggaggcctacatcccgccccaggtcttctataatggcaaggtggactactttgacctgcagcgcctggggggcctcctctcgcacctgcggaagaccctcaaagatgaccttgcttccaaagccaacattgtgatcgacccactggagctccagtcaaccgccatggatgacctagatgaggatgaggagccagccccagctatggcccagcgccccatgcaggccctggctgttggggggccactgcccctgccccggcccggctggctcagttctccaactttgggccgagccaaccgcttcctcagcacagcggctgtgagcctcatgaccccacggcggcctctgagcacctcggagaaagtgaaggtccgcacgctgagcgtggagcagaggacccgtgaggacattgaaggcagccactggaatgagggcttgctgctggggcggccccccgaggagcctgagcagcccctcaccgagaactcgctgctggaagtcctggatggggcggtcatgatgtacaacctcagcgtacaccagcagctgggcaagatggtgggtgtctccgatgatgtcaatgaatacgctatggctctgagggacacagaggacaagctccgccggtgccccaagaggaggaaggacatccttgcagagttgaccaagagccagaaggttttctcagaaaagctggaccacctgagccgccgtcttgcctgggtccatgccactgtctactcccaggagaagatgctggacatctactggctgctgcgcgtctgcctgcggaccattgagcacggtgatcgcacagggtctctctttgccttcatgcccgagttctacctgagcgtggccatcaacagctacagtgctctcaagaattactttggtcccgtgcacagcatggaggagctcccaggctatgaagagaccctgacccgcctggctgccattctcgccaaacactttgccgacgcacgcattgtgggcactgacatccgagactcactgatgcaggccctggccagctacgtgtgctacccacactccctgcgggctgtggagcgaatccccgaggagcagcgtatcgccatggtgaggaacctcctggcgccctatgagcagcggccctgggcccagaccaactggatcctggtgcggctctggaggggctgtggcttcgggtaccgctatacacggctgccacatctgctgaaaaccaaacttgaggacgccaatttgcccagcctccagaagccctgcccttccaccctgctgcagcagcacatggcggacctcctacagcagggtcctgatgtggcacccagcttcctcaacagcgtcctcaatcagctcaactgggccttctctgaattcattggcatgatccaagagatccagcaggctgctgagcgcctggagcggaactttgtggacagccggcagctcaaggtatgtgccacctgctttgacctctcggtcagcctgctgcgtgtcttggagatgactatcacactggtgcctgagatattccttgactggacccggcctacctctgagatgctgctgcggcgtcttgcacagctgctaaaccaggtgctgaaccgggtgacagctgagaggaacctgtttgatcgtgtggtcaccctacggctgcctggcctagagagcgtggaccactatcccattctggtggcagtgacgggcatcctggtgcagctcctggtgcgtggcccagcctcagagagagagcaagccacatcagtgctcctggcagatccctgcttccagctacgctcaatatgctatctcctgggacagccagagcccccagcacctggcactgctctgccagcccctgaccggaagcgcttctccctgcagagctatgcggattatatcagtgccgatgagctggcccaagtggaacagatgctggcgcacctgacctctgcatctgcccaggcagcagctgcctccctgcccaccagtgaggaggacctctgccccatctgctatgcccaccccatctctgctgtgttccaaccctgtggccacaagtcctgcaaagcctgtatcaaccagcacctgatgaacaacaaggactgcttcttctgcaaaaccaccacatccaacctccttgcctgcctgtatcctcattggtgggagcccagccatggccctaattgtgcctgagcttgactttcagtcagggccacagtgagcattaaattattattccatcaaaaaaaaaaaaaaaa

SEQ ID NO: 60602 - DNA, 436 bp, Homo Sapiens
ctgcctctgattgtttctacatatgtggcactgcttgttaattgtgttgtcaaatctttcatatctttactaacttttgtctgacctattaataattgataaaggtattttgaattctcctactgtaatggtagatttgacaatttcccctcttttatcagttttaactttatacattctattgagtgaataaagtgtggaattcttgtgttgtcctggtgagttgaactcttcttgttatgtagtgacttccttattgctaatgctttttgccttagcaaataaaaatctgttttctgtgatctcaatatagctttggttggtatttagtgtatatctttaaatccttttacctcctacgtgttgatggtttagttttgtctcttgtaagtcaagtaaacctggattttggcttttcatttggccatctctaccc

SEQ ID NO: 60603 - DNA, 458 bp, Homo Sapiens
ttttttttttgtattttttgcagggacagggtttcaccatattgctcagggtagtctcgaacccccgagctcaagggatccaccctgcctcggcctcccagtgtgccgggacttcacacgcgagccaccgagcccagctacattcttatttcctaaactttacaagttcacactcttccctttaaacaaatgtgccccctttggcggtgtcatttgagtcccggtgtatgtcattaagcctcttaacctcaaccactacttcccactgaaataactctattttctttttttctaatgaaaaagtaagacatgttctatgtaaaaattaaaatatggtgagcacttaccacttactatgagccaggcattgaactaagtattttttaatcttattttcatcctcgtgatatgaggtcagtgctttgatgagttccattttacgtaagaaagtagttaag

SEQ ID NO: 60604 - DNA, 473 bp, Homo Sapiens
aataagttatttgctaccacaaaatctggtgtttaaagatccagtaaacatgtccatatttcattattcatcacccaaacaaaacatgacaagcctcacacaaaccactgtgattttttatttttttaaatagagacagggtctcgctctgtcaccaaggctgtagtacagctgcacaatcatagctcaccacaacctcaaactcctgggctcatgcaatcttcccgcctcagcctcctgagaagctgggactatgggactacaggtacccacatccagctatgatttcttaaattattctggatatcgcaaaaagccacccacttcatttatctcatcactgcatgatttccaataccttccttccagcaacaaaaagaaataaacagttccctttggcattctcccatgtacctttttctatttctctctaaatatattcatctaaatcttctacataaagtttctaatgc

SEQ ID NO: 60605 - DNA, 2080 bp, Homo Sapiens
gtattcaatatgcttatgttttatttatgtaggtggcatttaaaatacatgatgtgtttagggttacattgtccacagaaagcatcaaataccactcctctccccgccaaaaccaaataaacaaagccaactctttggcaacagttgtgttaaataaaatcccaggtcacacttgtttctggctcccaagcctgggtcactgctacatggattgcgccaaaaaattcccagcttcaacactgctagattaaaattgctggcatttttaaatcacagcaaagcttttcacaatgccctcaagtccaagaggacaaaggagaaagcaacatgaacggcagatcctcatgtgaaagggaaggaaagtcactgggagggagcatgcagggaagaagtcaaggcagccctggaattctactccgtgctcaataaaaaaaaaacgtgaagaagcaatacatcatgcaaacgaaataatgaccggaagtgggcgcatctagttagaatgaagtgactttcgtaaggagtcaatgttcgcgaactgaaacatgagttcaacctccttgtgccgtctctgggtgttttgcacgtgtgtaaataccggcccgttttccccagcatggccctaacccatggacactagggagggtgccactgagcaaaaattttttgctaaaaataattagcaaaaatccaagaaaaaaatatggaatctagcaaaacctacaccatatttgaagttgaatttgcactacctgcaaagcaaataatttaaaagaataaacattgtgaacatcaattcccatcacagcaagccctggatgaaaacatggacctcttggaaggtataactggctttgaagactctgtccgaaagtgtaagtccctctctgaggctgggctccccaaggggaaggggtagggagtggcagccaggtccggggggacagctgctcaccggttttgtctctgacctccacagttatctgccatgttgtgggtatcacttaccagcacattgaccgctggctgctggccgagatgctcggggatctgtcgggtaacgccctctgggtcctggtgcacatctgggaggttgggggtggctagggcagtggacctcagtcagctcctccaacaggcctgtctgggtctcatcaggtcagcatggaaggcccagcccaaggaggaaataagaacttggtataagacagtctctgccttgagggagatcctatgccatttgctcatttattttgcattaattgagtgcctaccgtgtgtcagtgtgctaaactgggcgtgcagcagtaaacaaagtgggatggctccaattcattctcatggaggtagcaaagcacatggcgacatggaggtgtccagtggtgattcctgtcatgaaggaaagcaagacagctcacagaccagcggcatctgagcccttacctccgtagagagaggcccgtggcctgaggtagtgcagaggaggatagtagagcagggccctgacttgtaacgttcatgggtagccagggtgtatgtggccagagcagagtaagcatgggcgaaagtagagagctgggggttggaggggcatttccaggtcatgtggggcctcgggaggaccttgtcctttcccctgactgagaaggagccaccggagggctctgagcagggtagggctctgatcagatggatattttttaaagatccccccaagaacaaaaaaagaaaaaataacttatttgcttacttttgtaaaaagaaacgtagaaaaggaagtcaagaaactaaggaaggccgggtgcggtggctcccgcctgtaatccagcactttgggaggccgaggtgggcggatcatctgtggtcaggagttcgagaccagcctgcccaacgtggtaaaaccccctctctactaaaaatacaaaaaattgctgggtgtggtggcgtgcacctgtagtcccggctacttgggaggctgaggcaggagaattgcttcaacgcaggaggcggaggttgcagtgagctgagatcgcaccattgcactagtgataagatcgaaactccatctaaaaaaaaaaaaaaa

SEQ ID NO: 60606 - DNA, 429 bp, Homo Sapiens
tttttttttttttttttttttttgagacagtctcactgtcacccaggctgcatgcaggggctcgatctccacttgctgcagcctctgcctcccagttcaagcaatatttgtgcctcagtctcccgagtagctgggatcacaggcgtgtgtcactgcgcccagcctatattcaataacaatttgtaattaaaatgtcaataatatggcaggaataatttaaaagtggtaataataaaggacattttcagagtcagttaaaaaatccacttaatgctgttatagaagacaatctaaaattaaacaccaatggttgaaataaacaggaaaataaaataggtcttggctaacaaaagaaatgtagatatggcattattactgtatgcaaactagaattcaagtaaaaaagcatttgcaagggtgaagatactg

SEQ ID NO: 60607 - DNA, 502 bp, Homo Sapiens
taaaaaaaacatagtctcgctctgtcgcgcaggctgcagcgcagcggcgcgatctccactcactgcaacctctgaccctgggctcaagcaattcttgtacctcagcctttagagtggctgggactacaggtgtgcaccaccatgcccggcaaattttttgtaattttttttttttttttttaggagagacagggtttcaccatgttgcccagggtggtctcgaactcctgagctcaggcaatccacctgccttggcctcccaaagtgctagaattacaggcatgagccaccatgcccggccttctactgtattttaaaggcagatgcttctcttccagtcctgtgtacaatcttttttcactcaataaatgctgctgcttgacttaatgatactctaacatcagataaagtcaggctgtagtaaaggtttttgatataatggggtaaagtctctagagaaaaaagaaattgaccttggggcagggtgaagcacctctaagct

SEQ ID NO: 60608 - DNA, 396 bp, Homo Sapiens
ggctaggaaaacatttattacctcacccttggtagcagaagcaaggaccaccccagttctaggccactagcatgtatctcctacacaggagcactgagtcctatgatggtggcttagagaagggatttgatggttagattatacagcccatcagggatgaagagagaatactgctaaggagagatggagctctgaggacaggggcaagggcaatggaacctggactggttatgttcaccactgaaaccccagtaattgccactgcaactccatatacttcaggcattcatcaatcattaacatagagagggcggagggacaagaaacagatgactctgctacagaaacaacatcctgaaaaagtagaagcaccttagaagtagctaatctaactgc

SEQ ID NO: 60609 - DNA, 546 bp, Homo Sapiens
tttttgagataagttctcactgcgttgcctaggctggagtgcagtggtcattcacagacacacacatagcagactacagactacagccttgaactcctgggctcaagtgatccacccacttctgtatcctgagtccctggaacggcaggtgcacaccaccgcacccggcttggatgtgatcttttgtccacattcttttccaattggttcaaaggtgtaggtgtgccttttgcatacctgggaagggccccattaggctcgactcctcatttttctccattcaccatcagtttgagtctgaattcatagcatggcctggacagatgcagcaaggggccagttccaaggcagaattcagggtgaactcaattcctataggcttgggatgaatggctgctgggacatgaggcttgggtgtgagatgccccgtctgctgctgctcttggttcttagttcagagaaattctgggacccttcctcctcccggcaccacgttttcagtgaatggttctttgaagaggaaccctggtccataggaactgagtg

SEQ ID NO: 60610 - DNA, 469 bp, Homo Sapiens
catgattaggcaaacacaactttatttattcaccttggaataagggtatagacacccatacagaacagcactcctttgctcatttcttccccatccattccagggaaatagctcaatgttctttcacgggagacacatacttttataatgttatcaaatacatcatcaacacttctaaaaaaatggcgtccaccacctggaagtctcatactgttcgcgtaaactaaaactgtttcctatttgtccaacatatccacttgaatgaaaacgtcacagagttgtttgcaagaacttcttataagggaactaagtcaacgggttccatttctatctgctagtttctggcctttttcactttgaagagaaaataagatgcagtaacacattaaaaataggcaacttgggtcaggctggcctttcttctgtggaaaaaaagagtaactatgaaattaaatatccaaccctaact

SEQ ID NO: 60611 - DNA, 470 bp, Homo Sapiens
  misc_feature (37)..(37): n is a, c, g, or t
  misc_feature (377)..(377): n is a, c, g, or t
  misc_feature (412)..(412): n is a, c, g, or t
  misc_feature (449)..(449): n is a, c, g, or t
  misc_feature (454)..(454): n is a, c, g, or t
tttctttggagacagagcccgcttgtgttgcccaggntggattgcagtggcacaatcttggctcacttcaatctctacctcccaggttcaagagattcttccgcctcagcctcctgagtagctgggattacaggcacatgcctacacaccgggctaaggagtaaacattttagtaaccaagtggacactgaagatgttgagaactggtaaacaaacaatcaagcaagtaagaacagaaataacagcatttggcttttgagttaatgacaagaacactcggcatgggagcctggggtgagcaaatcacagatcttcaagcttctgtaagtggcctgcattgggggtcaccgtgggtagcttacgtggcaccctgggantttccacagtgcttctcttgaggccagccaccagnggtaggagggccagcttagttagggagtccccacttnccccnttcgaaaggggctttc

SEQ ID NO: 60612 - DNA, 427 bp, Homo Sapiens
tttgctattcatttctaccttgtctattgattatgtcatttattcattaataatactttcaaggcccgtgattcacaaaacccagtaacactcttgatattccctatcagtatacagaatcactcaaacattgggtgtttcattaactatcctgttttttatatatgcatcatcaatataatacttcatgtcactcccatatcactggaataacattggccatctttgactgtatttcacacttttaaataatacgttgattactcttaaacaaaccacccaaacaaaggtaaggactttgactattactccccttggtcttcacgctccttcctaagcgtggtgcaaacagagtatgtgaccttggaggcatcctcaaatcagaacaaggacatccattattggtctccatgctcctaataccctg

SEQ ID NO: 60613 - DNA, 468 bp, Homo Sapiens
tttttttttttttttttgctttagggtttttttgtttcccgttttgacaatatgaagaaaattcagtttagaatctggaactggcctggatgggattcgagggcagctggtgggggctgcagagccccttcgattcctcccccaccgtgggagctaagctactggacagaggagcaccaacagggcaccgaaccaggaactaagttagtgtcttgagtcaggcaagaatggggaggccaggccagagctacagcagggactgccctgattgtggttagttctgtctctagccctttaacagcattttaaaagtgcttttcgtacttacttcctacactgcttcccactcctataaagtgggtacttggagaaagctcctataaagcgggtactcggatcccgcagcaggttagcaggactgcactcacaccaaatctgtacgtcatgctcctgatgacgagaacctac

SEQ ID NO: 60614 - DNA, 560 bp, Homo Sapiens
gaatcgaagcatcttgactatgtcttaattttcgagcaccgattagttgatccaaccctccttctcagtgtatgcgcacacacactcatccaatctgttctctacacagaaagaaccctttgtaagtgccagtgcctatgtttttttcacttaaaagataatttcattcttaacatggaaaaagcggagtaaaaaaaaaaaaattcacagctgggcgcggtggctcacgcctgtagtcccagccctttgggaggccaaggcgggtggatcacgaggtcaggagtttgaaaccagcttggccaacagggtgaaacctcatctctgctaaagatacaaggaattggctgggcatggtggtgggcacctgtggtcccagccactcgggaggctgaggcaggagaatcgcttgaaccctggaggcggaggttgcagtgagcgtaaattgtgccaatgcactccagcctgggtgacacggtgagactccgtctcaaaaaaaaaaaaaaaaaaaggaaggaaggaaagaattcttgctcagaaaattaagttagccacaaagggcc

SEQ ID NO: 60615 - DNA, 615 bp, Homo Sapiens
tttttttttttttttatcttctgaaggcagggcccccaggctctgcaccaactccctccctcggcgagaactgagctgtccatttccacagatgccctgcacgcccatacctctgtgccttcatccatgccatgtccttgtctgagatgctcttctttctttcctcatattcaaactttaattgattttcaaggcccggctgaatgcctttcccccaccaagcccttcccaaacagataatatgtctctatccttggaactccctgagccagtgatccacacatctctgacagcacttatcacttgtggtttgacggtcttgatgcatctcatctcttcttccagcattttaaagtcagagatcattccctcttcatttaaatataaaccacagggcctagtacagtgcctagcagagtaggtcttgcataatctattgagtgatacattaatcaactaaaggaaaactgaaggctattaagcaagatggcgtgaggtctgccactacagaataagcttggtttccaggtaagccagctctgggttaagtagaaccatgggatatggggcagaacagtgccctatcagccatgcatggtagtgttgggcaagaga

SEQ ID NO: 60616 - DNA, 482 bp, Homo Sapiens
tttttccaaaaattggcttaccaccaaatttttgaaatatattctatcatagattaggaaatggagggatttttaaaaattttcatgtacacaaattctttcaagtggggtttctgttccaagatggccaaataggaacagctccgatctgcagctcccagcatgactgacgcagaagacaggtgatttccgcatttccaactgaggtacctggttcatctcattgggactggttggacagtgggtgcagcccacggagggcaagccaaagcaaggcggggcatcacctcacctgggaagcgcaaggggttgggggatttccctttcctagccaagggaagcagtgacgactgtacctggaaaaatgggacacttctgccctaatactgcacttttcccacggtcttagcaaccagcagaccaggagattttctcctgtgcctggctcagtgggtcccatgcccacagagccttgctcactg

SEQ ID NO: 60617 - DNA, 523 bp, Homo Sapiens
  misc_feature (461)..(461): n is a, c, g, or t
ttttagttaagaaacagaacaccttttgtttaagcaactaaattaacacgtgatggttcttggcaagatcccatccatgacagcattcccgtccaccaatcttttccgaaagtctggagcttactggacgtagtgtaatggcaactcctcccactaaaaggccccgtcaggctgggcacagcggctcatgcttctaatcccaacactttgggaggccaagacaggaggatgcttgaccccaggagttcaagaccagtcctggcaatgtagcaagaccccaactctataatttttttttttttttttttgagacggagtctcgctctgtctcccaggctggagtgcagtggtgcgatcttggctcactgcaagctccacctcccgggctcacaccattctcctgcctcagcctcctgagtagccgggactacaggcgcccaccaccacgcccggctactttnttgtatttttagtagagacagggtttcactgtgttagccaggatggtctcgatctcctgacc

SEQ ID NO: 60618 - DNA, 2218 bp, Homo Sapiens
tcgatgcagaactccgtctccttagacatcagaaactaaaactagatactcagatgaaattatctgacctgcaccatgtcaccttatttcaagaaatacttctcctgaagaattttgaaaaacaggagaacatacttcaagaacgtgttaattccttagacaaagaggaacagtacatgcaatggaaaataaatgaaactcttaaagagatggaagagaaaaagaatgaaatcaccaaactccaggagcaagaaaaggcactctatgctggttttcaagcagccattggagaaaacaataaatttgcaaacttcctcatgaaggtcctaaagaagaggattaaacgggtaaagaaaaaagaagttgaaggagatgctgatgaagatgaggagagtgaggaatcaagtgaagaagaatctagcttggagagtgatgaagatgagtctgaatcagaagatgaggtttttgatgattctatttgcccaacaaattgtgatgtggctctttttgagctggcccttcaccttcgagagaaaaggctggacattgaggaggctttagttgaagaaaagaaaattgttgataacctcaaaaaggaatatgatacattgtcaaaaaaagtgaaaattgtggcaactaatctgaatgcagcagaggaggccctggaggcttatcagcgagagaagcagcagcggctgaatgaactgctagttgtgattccgctcaagctccaccagatagagtatgtggtatttggagaaatacctagcgatctttctggtactttggtcttctctaaccatgccttgagacggctgcaagaacgaatccgtgagctccaggaggaaaattccaagcagcaaaaacttaacaaagaatggagagagagacgtaaacagctcatccgagaaaagagagaaatgacaaaaaccatacacaaaatggaggaaacagtccggcagctcatgatcagcaagtttggccgtgtggtaaatctagaagcccttcaaacgctttctgttaatacaacacttgaagaactgaagatcagaaaacttcgaaaggagctagcaaatgcgaaagagatgaagatgtgggaggaaaagattgctcaaatgcgatgggaactgatgatgaagacaaaagaacacaccagaaagctttatcagatgaatgatttgtgtattgaaaagaagaaacttgattctcggttgaatacactacagaatcagcagaaccctggaaatggtctaagctaagtgttccaacagtttggtcctctgaagaagagcatcagcatcacctgggaacttgtttaaaatggcaatgccttccagggccctcgggaagcagatgttgtggcaagagaggaggtcactgaattgatccaactccaggcggaaaggatttcggccttaaaggaggagattgctcttttgcgtaggaaaggcggtcttatcctcccacccattcagtctccacgagagaaagagatacagcccgcagacctttgagtttgctattttctcaaacccatacaaaatttctgacataactcactggaagttctgtctcctcatcacctccaacaatcttattactttaaactgaacttgcctgaaagtgtaaaaccagatccagtcacgttaagtcactttaagaatctctctacaatttggttatcttagaactgactgcagcacccaacctctgttatgaaactgaatcattttagatgtttcgaacctactagattgaatatgaagtctcggaaggctgtgtttcatgattgcagcaaatcacctgtaatatattttgttttaggaaaatttgatttgggggtatcctgaatttttagcccttggcaagaaaaactatcattcagcaattcatgagaaaactttgttttcttgatccttagaaaataaacttagatgttattaagtgttctctgagaggatgcaggagaaaaggacattttgtcagctatatcttagaatagaaatgcaaatttcagttttggcattgttgacttcataaagcagtgttttgagggctcaggattcaggaaatacaaacagacatggcagagcagtttgctttgggttggcagaaagcaggaaaataaccagccttcttggattgcccacagtttttgtagactcctcagttctgagtggagcagaggggcatgcttaataaaacagtcaataaagag

SEQ ID NO: 60619 - DNA, 504 bp, Homo Sapiens
tgactttatgataataaataaattctgtttatttttttctctcacatagttcaagaaaaccagacattagtgtaagttggagaacatctgagtttggaaacaggtctttgccttaatggattgttgactagaaaatcagaggccgaaattcaaataatatgttttgaagtgttgttgtaccgtgttaataggtgtttcatataaaaagggtagcatcgactgggtgcagtgtggctcatgcctgcaatccagccacagattcattcattcattcgttctttctttgttttaagactagtcaagtgcagtagtgagaagaggggaagagtagaacaaggagcttgatctataactgactgcgaacaatcaattgagctaactcactaccttcagaccagccacaaattcatttctttagaaaaaagatgagaattattttctaaaaactgagcaatggaaaaggaaccccttcaatgggtaaagggaggtaaagttaactgaatg

SEQ ID NO: 60620 - DNA, 840 bp, Homo Sapiens
  misc_feature (632)..(632): n is a, c, g, or t
cagtcaatggaaactggatacagcagtagggtggatgcggcaggttataaatgatgctgtctcctttgtttggtgtacactcgtggcaaaactgctggtccccgggccaggagagacccggcatccaaggtgtgccacagctgagcttcacccggatatatagaccagctctccccacgtcccagcaccctgcctggcagcgcaatggaaccgaggatggggctgcaggacgataccagcacttcaggaactgtgacagaatcttgctccgctgccaaggctggagtgcactggttcaatctcggctcactgcaaactctgcctcccaagttcaagtgattctcctgtgtcagtttctttaggaatacagcactccatattgctaccataataatgaaacggattcccatggctacagcgatgaagcagcagaaaaaaaatggagatgctgtcaaagaaaaaagacaccagatcagagaaagaagcataaagggttggggtatctttgtattactataatatcagagttttttaagaaaaaaaaaaaaaaaaaaaaaaattttgggggtgccctaaaaagttttaaacactttggttggggaggcggcccatagtaataacatggtcatgcngttccaggaaaactggtctgcatgtgtcgggttctcccaaaaaagccggcgaccggcttgtgacacccaatggtttcgggtctacggtctcaccggtcagcttctcccgccccccgccatcagagaagagacaacagaggtcggcaggagcggcgagggaaagaaagaagaagagcacaggagagacaaacgagcagcagaagaaaga

SEQ ID NO: 60621 - DNA, 592 bp, Homo Sapiens
ttttttttttttttgtagatacaggatctccttatgttgcccaggctagacttgaactcctgggctcaagggatcctcctgccttggcctccaaaagtgctgggattataggtgtaaaccagtgtgcctagcctacagttttttaattttataaaatgttatttctaatttttctccaaaagtaaaagtggcattccaatggcaatattaattcaggtatccagaactcttaacctaaatttgggtgagatgaggaaaagtgtattgttaattttatgtgtcaacttggaaggtgtttctggatgggaataacattgacactgatgtcctctgagtaaagaagattgccctccatgatgtatgtgcactttatccaatcaatagaagacctgagtagaatgaaaagaccaccttctccaagccagaggaaattctccagcagacttctgtgagactggaactgcaccatcagctctcttgggtcttgagcctgccagaccacattgcagattcttggacttcccagttgccataatcacatatgccaattccttataataaatgtgtgtgtgtgtgtgcacgcacgtgtgtt

SEQ ID NO: 60622 - DNA, 460 bp, Homo Sapiens
ttttaaaggcacagtagataccagatgctcagagcaaagcagccatggagctgctgggaccaaaccttgcctgacctagccaccaccacaccccagacatataaatttaaattttactgatataaagaatgcaaaacacaaaatttacaaagatcataaaacatacaatgttgtgtattgtaaattagtcacctgattctcacagaaaacttgttaatttctgctgtactccaaagccactaatggatgaaacttacgattagttccaacatgaatactggttgacatttttgtttatgttaaagtcaaagctgaaagtgatacaatggagacttcagaacttcacttgtcagttatgtgagtgatttctttgctaaatgtttagtaactttgggatggtggaagaagattcattttttggtgctatttacaatgtaatgaatctgcattattaatattt

SEQ ID NO: 60623 - DNA, 545 bp, Homo Sapiens
ggttagttgataataagcgaaggctttaaaattttttatttgaaagaatttgttaaattctactatgggtcttggaaataacccatagtagaatttaaaactaagagcatactttccaaaatatggtctgaagaaaacctctatcatatggcaaatgaagcaaactgaaaaagcatgaaaatagaaatcacagaataagaatgatttgcacacaccaagagtttgagaaacatgctctaatgatggaggctggcttaataagatttggggttttcaatgcaatagaattcttgtagtattgtgaagaacaaattccacaagagagattagaagggcacacgtggctagaagatactgttacagaacaaatgagaagtctggaagattaaaacttgaacattaacagtagaaaggaaggaggcatgataagcacagaaaaggtaaagaactactggaactattctactacaacacatacattagctcatatgcaatcagtaaataagggaattatgtcagtacattcagaaatcacattggttcat

SEQ ID NO: 60624 - DNA, 420 bp, Homo Sapiens
  misc_feature (400)..(400): n is a, c, g, or t
ttttttcttttcttctttttccccagaaactcactttttaattattttgttgcgtttcattttcattttcattttgccttcaagtccagcgtcgcaagcatggcaataccccttctctactaatgttcaaaaattagcagggcattatggcgcgtgactgtaatcccggccactcaggaggatgagactggagaatcgcttcaacccgggagatatttgctgcagtgaacccagtgcaccactgcattccagcctgggtggctgagcgagagtccgtcttaaaaaaaaaaaaagacacaagaaagaacagaccaaaatactccattgtttcagaacatttccccagaagaccccaaacgccctgagtcaggtcaaggaggtggtgctttattttacttgnctctctctctttctctctct

SEQ ID NO: 60625 - DNA, 463 bp, Homo Sapiens
ttgagacagggcctccttctgtcacccagactggaatatggtggtgtgatcttggttcactgaaacctccacctcctgggctcaggcaatccttgcacctcagcttcctgagtagctgggactacaggcgcatgtcatcatgactagctaattttttttttttgtgtgtgtgtgtgtgtatatatatatatatatatatattttttttttttttttttttttttggtagaagtggggttttgccatgtcgcccaccctggtcttgaactccgaactcaagtgatccacccacctcagcctcccaaagtgctgggattataggtgtgaaccacctcaccaagccaatttttcattacgtgatataatacacttgaggtttcaaagctatatcaggactggatcgctgtaacttgagctgaactaccttagaaaggtagagtgaccactgcattcaatcacattc

SEQ ID NO: 60626 - DNA, 2569 bp, Homo Sapiens
  misc_feature (1351)..(1351): n is a, c, g, or t
  misc_feature (1387)..(1387): n is a, c, g, or t
  misc_feature (1402)..(1402): n is a, c, g, or t
  misc_feature (1641)..(1641): n is a, c, g, or t
  misc_feature (2009)..(2010): n is a, c, g, or t
aattcccagaccacaggaatacctaatgccttttttctcttcctgtctttgtccctcacactacagcggcccctcccttccctcttcaacctcatcctccctccccacaggcccagagaaccagttgggctttgttctcctgcaggctatggttcatcatgcaaatagctcctgtgtcagaaatgctttttggcttcaaataacagaaaagctaacaccagctttatcaataataatatcggtggtttacttaaggtgtccagagatggtggagaacaggattggtttcctcctcaatgtcaaggactcaaagactctttctgtggtagggccacatcctaaaccctgtatcctgtgattatttacccgacaggcaaaagagattttgcagatgcaattaaggttaaggaccttgacgtgggaagattgtgattatttacctgacagggcaaaagagattttgcagatgcaattaaggttaaggaccttgacgtgggaagattatcctggattatctaggtgggcgcaatttgatcacatgggtccccagaagtggagaacctttcccacctgtagaaagccagagagctggcacctgagaaggacagaactgtcattgcaggatttgaagatgaaggggcccatgagccaaggaatgccagtgacctatagaggctaaaaaacagcaaggaaatggactctccccagagcctccagaggaatgcagccctgttgatcacatgatcaccagatggctgccccagagccaaatgtcgcttcctgagcaccatactcaaaggcaggggaagtggatggagggcaggagctccattcttgtttgccactctccttttgtcaattgggaaaaaattccagaaactctgggagccctccccttacatttcctgggtcatggggccagccctagctgctggagggactgagaacagctgttgagcagtttacctgacggcatctgccatggcttggcaggaactctggctttgggagagagcagcagcaaggtattcaagcaccacctccacccagcccctcccacatttcactcaggactgagtaaaggagacactcagatgctactcagatgctggcttcagctaagtattttgcaaagcctctcgtgtcttacaagtttgtggctatcatgacaaaatggagcagcctactatatctacatatacaactatgggggacctagttttatctcatttaccacaatgttttcaatcattttttggatgacataatttttagcctcttctctaaatgcttcctcaagctttccttgccttccagccactgcaaatgacttgcagtttcccctacatgncacctgacccttgtgcctccctccctctgcccatgnccagaaagccctttnctgtgccctctggcttcctgataaactcctatcatcttcaagagccagttcccatgccagctctccccaagtgctccactgaggcttccgtaacacctctgttcccacatcgggttgactgtctttgttttgtcattgcttgctctggctgtgtctccctcattagactgggatgccttcaaggtagggaccctatctgggtcagcttggcaccccaaagcgtaccacagcacctgatnctgaggaggctctcagtagatatctgttgagtaaccagaatgtagggtggtcctgatggtttctgacattgaatagaaaacagctccctatttgatcttaaaataatcactataacctggacatactgtactagatgctgtttttgtctgacttctactctgtcaatctctttgcacctccatttgttcatctgtgaaatgaagaaaatgctcatggagttcagtgaagattaaatgaatgaatataggtagactgcctaatctggcacttgccacgcagctgacttcaatatagtagctctaatattatggtccttgaggatcttactgtcttatggcccagaactgcatttgattaaagaaggctnncctaaaaaaagagtcatacatattccatttgtcctttcagaaggccgtgaagcatttacactctttaagacaaattcccatccaaaaatagttaagatttctaaaatattttgatgctgaaagaggtgtgcttcagttgggtggcaaatttgcttctatggaagatttttaatacaggttgtttctattttactttttctggctgaaaggattttacatttattcaaagtcaaaagggaaaagaaatccaagaactacagaagagcagttgaagtgatttatgcttgatttctaaatgcaacttatgtttatacataatttaaaactcaaagaaagcatgcttatacaatcatgtgcaactttaaactttaagaactctggatgaatacatggtggcaacagtccatgacacctgaaaacatcatttgtggagtggcgtagagttcagtgttcgcagtcgcatattacaaccatgtttcacacagccctgctcggtttgattttctccacgtggttgataattgtcttcagttgctgctaagtgattttgcaaatttcg

SEQ ID NO: 60627 - DNA, 479 bp, Homo Sapiens
ttttttttttttttttttttcttttcttttcttttcttttttttgaacatgtagaagctgagaagcagggaggtaaagtatgctggccgaatgtgattgtgagtcacagaggcagagccggtgcccagggctccccatctccaaggccaaggttctttccctcacactttcagctgacatgtccaatgctccctgctgccctgcagaaaaggtcgttccccaccttccctgctgctttagctacaacataatcagagagaaatctatcaggaaacaaaatttccaggcattctaatgaatacatagaaatgtggtacttaaaaatgtttttaaatctcaggagacaaaaactaaaatgaaacaagaggggaaattcaacctcttgtgtagaaatgctatggagacctcatctccaagtcaggaagagggtgttgtggaggaagaagctcatactcccaggagtttgaaacaccacattc

SEQ ID NO: 60628 - DNA, 419 bp, Homo Sapiens
  misc_feature (419)..(419): n is a, c, g, or t
cgaggtgaaatgatgaaagaatgcttttttcccacccaaaaaactatgctctataaatgcagattagctagtgggtgcctgtttaaatggtattattttatacattacaaaatggaaggaacttactttattaaacttaactttgatacttctcttatgcatctctaaaacccttgatgaaaacatgtaaacttcagtaatggcagtattagaaagttcatgtaggaactaaaagaattgttaagcttgtttcctttatatcatcagttacatatcccactgttctaagctagtttgtacagtatgtgggatcggatatacttagatatttttatttcattcattaatgctttttttgcttatttttttatcctttggcaacagcagcatggagcaaggatatgtactgatatcagtcn

SEQ ID NO: 60629 - DNA, 520 bp, Homo Sapiens
gcgtttccagtggtgtgtggtctctcaagttcatgtgatcatttctaagttgttcatctggctccatcttcttgatctgtactgcctgagcactgtcaataatataactctctgtggcaaacatatttctgtatctggatttgccaatgtaagggctttcatctggggctttatcaatttcagcatactctgatggataataatttagtggctcaaatttagcatcaattttataaaaggccaattcctgttccagctcatattgcttctgacatgctcgtgttaattctatggtcttctgttttagccaatttcacagctgggagtgggaagaggccgaattcaattccaagtctcctgatttcaaatccaatactgcctattcttccatgctgccttcgatgtactgctgcagggtgtccagcacattacccacattgatattttcactgaatgatcataagtctccgagtctcaagaaagcaactcacaatcaacactgtcaactaatcttgggttc

SEQ ID NO: 60630 - DNA, 1500 bp, Homo Sapiens
gtgacaggaagatgggtttgattgaggtcctggtttccctatgacatggaagcaagatgccaggctgaggctgacaacaatagggtggggagctaaggggcaacaggaccctcgtgaaggatgcaagcagctgcccagacatgtggagctgaggccagggagcatgcgcattggaggcagtgtgaatgtcccctgaaaggcttcgctgcccaagggacagatgggctgtccaggacccaggtggggcaagccagggttggaagaaccaaaggcagagaaactaaaggccccagcagctgcagcagtcaatcttggggtccaggctataataatctggatttaagatctcaggaagattctgagttaggtcaagggaccatggaggtgaaggccattgactcagaggtgtaaggaatggagtgatttggacttgagtcgggtggggacgaagaggggccatcctcagggtgaggacgggatctgtggaggtgaagtctgtgcatcagatgccagagtcctcagggaatgagagaaagtgatggcaatcatgctgatgatgatgaagataaagatgagagcagacatcagagagtatcaactgttctgtgcgtgtaccaggcatgtgaagtgcagcgagggcttaaccctcctcacaaccaccctgggagatcggtaccatctcttcttctttttacagatagggaaatagcacagaaaggttaagaaacttgcccaaggtcacacctaactgggaaatgggacccggtccagggatttggactcaagggtccatgctcccaacccttagcaagaggagctggatttccatcaggagggggaagtgaaagaaacattcggtaaagaggggaagatgtaagggagcttgttaacaaggaacttccacaaggcccactggaaaaatgagagaagtgggaaagaagcaatggaaagctgggtcaggaaagagaaagcaggaagaaaatcaggatccccatttgacaagtaaggacatgaagaagctaagtgtcctgcccaaccagtaagtcaaagactggaatttgaaccccaagatagttctctaagggtgggaaatccatctcagtaggaacttgagggaaggttgagggaactttagggaaggtttccagttcaacaaaaaaaaaagcggctgggcatggtggttcatgcctgtaatcccagcactttggaaggccaaggtgggaggatcgcttgagcccaggagttcaagaccagtctgggcaacaaattgaggcccccatctctacaaaaaaatacaaaaaaattagccaggcatggtggcatgtgcctgtagtcccagctactcaggagtctgagctgggaggatcactcaagccctgggaggtcaaggctgcagtgagctgcaatcacaccactactctccaacctgggtgacagaccgagaccctgtctcaaaaaaacaaaaaaaagagagagagagggagaaaaaaaaaaaaaaaa

SEQ ID NO: 60631 - DNA, 582 bp, Homo Sapiens
  misc_feature (445)..(445): n is a, c, g, or t
  misc_feature (487)..(487): n is a, c, g, or t
  misc_feature (568)..(568): n is a, c, g, or t
  misc_feature (582)..(582): n is a, c, g, or t
gtgtgtgtggttttgtttgttttttttttgaggaatttagttctgtgcttttttccataaagaactcctaaagctccattaagaaacccaatggtgctaccattttagccaattcatttccagttactgagcctgtgttggctggagtacagggacctgcacataggtagaaggaagtttaccagaatgagttcaaagtattgaagatgggtctctgaaaatctaaaacttacgagaactcttgaagtagtctggcaattacaagaagtaacaattagttggaatatacctgtggttattaatgccaatgttagatgaaacttatatacagtagaatcctcaaatgatagcaaaagtcagacgtgccagttatgtaataattagaggcttatacaccttaatgaaatttaatcacacttagaccaatagcattatagaaagcatncacactttataatattctaagtaccaaaaatcagtttagcanccgaacaagcatgaaatgaggaaggaaaacaggaagagagctaatgggtatgtttctgtgccttggggaaggtgggggggnccggtttaactaan

SEQ ID NO: 60632 - DNA, 1095 bp, Homo Sapiens
gatgatattaaagatgaatcttcggagttttcaagccattcaagtcagtccatcttgaagacaaagctctgatggcaccaaatcttgactcctttggacgcgatcgggcactgtatcaagagcatgcaaaacgtcgcattgcagagcgggaggccaggaggactcgtcgtagacaagccagagaacaaaccggtaaaggactcgtcgtagacaagccagagaacaaaccggtaagatggcagatcaccttgaaggcctttccagtgatgatgaagaaacttctacagatattactaatttcaatctggaaaaagatcgaatttcaaaagaatccggcaaagtttttgaagatgtccttgaaagtttctattcaattgactgtattaaatcacagtttgaagcatggcgttcaaaatactacacatcctacaaagatgcttacattggcctttgtttgccaaaattattcaaccccctcatacgacttcagctcctcacttggactcctcttgaggcaaaatgtcgtgactttgagaatatgctgtggtttgaatctttgctgttttatggttgtgaagaacgagagcaagaaaaagatgatgtagatgttgccctactacctaccattgtggaaaaggtgattcttcctaaactaacagtgatactaaaattaatcaatggatatccttcagtagtgaatgcagaaaataaaaatacacaggtatacctaaaggcacttttattgagaatgagaagaactttagatgatgatgtatttatgcccttatatcccaaaaatgtcttagaaaataaaaattctgggccttacttgttttttcaacgacagttttggtcttcagttaaggtcataaaacccccattccagagagggtcctgccccatacccagaaggaaagaatgctgctcagagaggccaagaagaatctggacggacaggccttgtgttgtcttctcttgagcagtagatcatacctttttgtccagtcatgtttctgcatgcctgtacatatttcgttaaacctaaacatagtagacaatttctcctccatctttgggtcttcattctgaaggctg

SEQ ID NO: 60633 - DNA, 451 bp, Homo Sapiens
gtcctttttaataaaacaaatttctctaagtggttacaacaaaccaaaacaattcttgggagataagtcttctccataagccgtgtggatttgactgaaaatagtaatgtccctttggcataccaagagagcaaaaatgagagaaagatacatagaaaagagtaaaaaaaatagggaagaagagaatgaaagactaatagagcaattcattcaacaatattatttaatcattactaacatttattgaccatttacatgataggcaaagtgctaaaccctttaagttaatttaagcttctacttcacaaaccaacccaatactattatctcaatgttatagacaaagagaatttaaaatcagagaagttgagaaacttgatcagataataagaggccaaagcagaatacaaattctggtcagtcttactccagggagctcttaacctacatg

SEQ ID NO: 60634 - DNA, 1352 bp, Homo Sapiens
cacacacacaaacgcacagcacacacaaacgcacagcacacacgcacacacagcacacacacgagcacacagcacacaaacgcacagcacacgcacacacatgcacacacagcacacacactagcacacagcacacacacaaagacacagcacacacatgcacacacagcacacacacgcgaacacagcacacacgaacacagcacacacagcacacacacaaacacagcacacacatgcacacagcacacgcacacacagcacacacatgaacacagcacacagcaccatatggcgcgcacacacacacacacacacacaggctgagagacaaggtggagatccagggagaccccagggagcagtgcaggtgtccgtggattctgctttcagttaaacccctgatcacttcacctccctgagcctcagttaccttatctgaatatcgggatcatgacggataattgtatgtcatctattctaccgacggcagccagaggacgcctgtgagcacctgagtcagggcccatccctgctctgcctacagccctccatggctcccaccttcctatgcgtcaaagcccaagtcctccctgcagtccacaaggccctgcacaccttgccctgtcccttccctgccctcccctcctccctctctccccctcgttcactcttctggagccacacgggccatcctccctgttcctccaacacccaggtgcagtcctgccttggcgccttggcacgggctgtgccctcttctcaagaaaaccctcttcttccaaatatccacacagcttgttctctctcctcctttaagtctttgctcaaatgtcaccaatgtctcaattttacaatgaggtctctctgagtaacctataaagtcgcaaatacccaccctgagcgtcccccctccccgctacacacactcctccttcctgccatgtcctgcaaatgagatttattcatttgataattgcttctcccatcgcctcgccctctattgaacctaaatccctccaggaaggaattgttatgtttgttgagggttttgtcacctgaactcagcacaatgctggtatatagttgggtttaataaaaaacttactggaagaagcgagaaggatgggaggagagaaggggaaggagggtgttctcatagaattatcatgaggatgtgttgaaatcatacaaggctaggtgcagtggctcacacttgtaatcccagctgtttgggaggccaaggcgggaggatcgcttgagcccaagagtccaagaccagcctgggcaacacagccagaccctgtctctacaaaaaagaaaagttaaaaacaaacaaaaaaaaaaaaaaa

SEQ ID NO: 60635 - DNA, 544 bp, Homo Sapiens
  misc_feature (5)..(5): n is a, c, g, or t
  misc_feature (19)..(19): n is a, c, g, or t
  misc_feature (70)..(70): n is a, c, g, or t
  misc_feature (165)..(165): n is a, c, g, or t
  misc_feature (240)..(240): n is a, c, g, or t
  misc_feature (455)..(455): n is a, c, g, or t
  misc_feature (488)..(488): n is a, c, g, or t
  misc_feature (501)..(501): n is a, c, g, or t
  misc_feature (504)..(504): n is a, c, g, or t
  misc_feature (511)..(511): n is a, c, g, or t
  misc_feature (524)..(524): n is a, c, g, or t
  misc_feature (537)..(537): n is a, c, g, or t
ctganacagggcctgactntgtcccccaggatggagtgcacgatcacagcacaccgtagtctcaaccttntgggctcaagcaaatctcccacctcggcctcctgagtacctgggaccacaggcatgcaccaccatgcccagctaatttttttattttttgtaaanatggggtcttcctatgttgctggtctcaaactcccaagctcaagcgatcctactgcctcaccctcccaaagcggngggattacaggcgtgggccaccatacctggctcatatttgaatttaatgaataaagaaactgaggctcaaagaggcaaagtaacttgcctgataggacacagcaagtaaggagcagtctgcatcactgcaaagtggtgtcttcagatgcccctgctgcccggtctccagtagccccaccacaagcactttgtcaccatgactgacaagatgaccnacttacacacactttctgaatcccaccagtcanggccttcgactgnatnttgaaanaaaactgggggtntttttcccccagngggaatg

SEQ ID NO: 60636 - DNA, 1595 bp, Homo Sapiens
cacaaagtcatgcattccttgggaacccagctcccatctgctgcccatggatgctctggctgagctgaactgtgtctcatcattttgttatctgtgtcttatagcttttggatggttttatcgttacgatggcaaattcccaaccatccggaaggtaggacagggttgggtgctgtgctggtgtgctgcttagtttgctgtgggttttggcttttcccaaacattccttgtcctatcaacactaaatggtgtgacttggcctgttcacttggaaggctaactccatctccatctttgtgtcaggctgacatcaaatggcagggtgctgttgcaaaggcaacattgggagagggatccatggtgtgagacctatccaagtaccatctggcagtgtgtgcatcagcactggccctgatgggaacaggaaaggggcaggaagcttctcctgtgtttctctgtcaagtagaactagagaccaaggccagaagcttggggtcagacagagcaaattatcggagtgggtgtacctagtgcatgttatgagaccagctgtgccagacgcagcctggctgacgaggtggggatttgctgcctcaggttgggacagagacccactccaagcacagccctctcctaggaatatctctgcatgtgcccaggataatgcatttttccaatctctaggacctttaattttctctctaaatcttattacaatatctccaggccttgtaaaactctcttgtccttatctttctaaatcacattgacatttgattgtgaaaacattgctgttaatatctataattggacattcgagatgacttggtatttggaggtcaggcagcagcataaatctgggtgagctaaattggatgttatcacttgaccagcgctttctggcaagacgtcagtcccccagaaaccagagcactggcagctgagtgaccttgatgatatataattctccctgcctgtaaaatgggaatattaactgtgccaggaaaatctacccccttcctccagcacattgctattaaaataacaaacagtaatatttttcctgacagaggttaatgcctttatctaggaacatatatcaagatttgtatagcattgaataaacttggaacagagttcctctgggaattccttcacacactgtcctggtctcagaaaggccttggtctcataagactatctgtttcccttgacaggctgactttggtggcttaggatgcctcattgggttagatttctaattcttctctatattctgcctctactagaactcagctagagaggacaaaacacacacacacacacacaagcacacacacacatgcacacataggattttacttgaaaaaaataataaaggagacagatatgtcaaatctttttcaggcactaataacatgtaaatgtaaaagaactagaatcttctccacataccacctcccatcagaaatcatgtccttgaaagtgctgttgataaagaaatagggttgcctttcccctattccttaatctaattattccagaaacagctgtcattttggttttcattttcacttcaaaaaaaaaaaaaaaaa

SEQ ID NO: 60637 - DNA, 478 bp, Homo Sapiens
  misc_feature (72)..(72): n is a, c, g, or t
tttttttttttttttttgcgtgaatgaagaaacaggcataaggtgggaaatattaaactacagacttttctnggtggtgttatcattacagtggtaactaatgtagaagtcctagatccttacccgctgagttaaactagcttctaagaggcaggtcagcaaccgacgtcctactgtctttgaacactcagtgctgaccagagattaacatagggcatgcaatactaaaattggtttgcatttcactttctgcttcaacgttcagtaaatccatcatagccctaccaagtgccagggcagttgctggtcagtggttgtcctagtctttctccacaaacctgaaaaaccctggagatttccaaaccccttcaggagcagataacatgaggagacaagacctcagggattcagtctagttggaagatagttgtggcttcttctcagagcctattctggaggtccaaattaattggacagg

SEQ ID NO: 60638 - DNA, 383 bp, Homo Sapiens
tttccccttccatgtttacaccttaagtcctttattgtcccttttattgtttcctcatgccgaacttattgagcatcgcctattctgctgggatccaaaatcaaactttcagaataagctgtctgcgaatttgaacactgcgcactctctaccttcccgtgcaccacctccacccgccaagaaagctctgtttgcctgaaattagtaagcgtttattggtgtgaagagtttttggtttgggatttttattttatctttttttagctggggagaagaaattttaacttgagctaatggtttgttaatttggttttaggcgggaaatgatgcccctgctgtccctgatcttgtgtgccctgttcatcctcttcggcgctgtcatc

SEQ ID NO: 60639 - DNA, 1991 bp, Homo Sapiens
gtctggaatcaagcgaaccatcaaagaaaccgaccctgattacgaggatgtatctgtggcccttccaaataagcggcataaagcaattgagaattcagctcgagatgctgctgtgcagaagattgagactattatcaaagaacagtttgctcttgaaatgaagaataaggaacatgaaattgaagtcattgaccagcgactgattgaagcaagaaggatgatggataaactgcgtgcctgcattgtagcaaactactatgcttctgcaggtcttctaaaagtttctgagggatcaaagacatgtgatacgatggtttttaatcatcctgctatcaagaaatttttggaatcaccatctaggtcatcatctcctgccaatcagagagcagaaacaccatcagccaatcattcagaaagtgattctttatctcagcacaatgacttcttatctgacaaagataataacagcaatatggatatagaggaaagactctcaaacaacatggagcagagaccaagccgaaatactggaagggatacttctagaattactggctcccataaaacagaacagcggaatgctgatctcacagatgagacttcacgactttttgtaaagaaaacaatagtagtgggcaatgtgtccaagtatatacctccggataagagggaagaaaatgaccagtcaactcataagtggatggtatatgtccgagggtcccgtagagaacccagcattaatcattttgtcaagaaggtttggttcttccttcatcctagctataaaccaaatgaccttgtggaagttagagagcctccttttcacctgaccagaagaggctggggtgagtttcccgtcagagttcaagttcattttaaggacagccagctcaaaccactcagcgtaaacacatctggaggggtgcagacgatcctgatgcctgtgaataaagtggttcagtcattttctaccagcaagccacctgccattctgcctgtagctgccccaactccagttgtccccagctctgctccagcagctgttgcaaaagtgaagactgaaccagaaacacctggaccgagttgcctctctcaggagggtcagacagcagtgaaaacagaagaaagttctgagctgggaaactatgtcattaagatagaccatttagaaactatccagcaactcctaacttagtaaagaagattccattaatcactgcaaaaagtgaagatgccagctgcttttctgcaaagtctgtggagcagtactatggctggaacattggaaaaaggagagccgctgagtggcaaagagcaatgacaatgcgaaaagtcttacaagaaatcctggagaagaatccgagatttcaccacctgactcccctcaaaaccaagcacatcgctcactggtgccgctgtcatggctacaccccaccggaccctgagagcctgaggaatgacggggactccatcgaggacgtgctgacccagatcgacagcgagcccgagtgcccatcatcattctcctctgctgacaacctctgccgcaaactggaggacctgcaacagttccagccctggtgacagaggagaccccgtctcaaaaattgattgatcaattcagcatctgagggctgcaagtacagaaggaatctattctcagcagggcatagggcacgcactggcttaacagtttagtatataaggctcaaatagtctatacctgaactgctataagcaaggtcgatagggaagtggatagattgcttcagcaaagtgaactgtgagatctccaggacagagggagaaagatctgatccaaatgagaacagattggttattgcaggtatcacagcctaaagaaattatctttttgcaaaagaaatattaaatgatttagcagtctccacgtgtgttaatgtttcaaacgtgtatcataatgtgtataattgtgtaacaaaattgtctacaataaatcttttggtatttgt

SEQ ID NO: 60640 - DNA, 552 bp, Homo Sapiens
aagcaatgaaagcttccaacacaaatttttctatttaatgattgcttattttcctaaaaatttacagcactgatagctcatgcacacaatttaccagctaattacaaataacatgtcaatcaagtaggagatataaaacttaaattgccataaaaataaattccagaaaaagcatgctgaattttttttttaatgcaactgttcctcacagaatttcaaacaaattcaggctgaatattatcaaattaaaatactacaagctgagagggtgcttttagtgtaaaagccagatttacaaagtaccactttaacaacattcaatttcatttttctaacaaaccaagaatatatcctaagcttctgtataacaactgagaggatgttgccatttaggtaggttaaatgtagttcaactggtttgagtccaccatattacaatgttaacaggccttcttggtattagagaacagtttcaatatcaatgtgataggttaaagtttggattactccaactgctataataaaaacaaaaggtcacacacacatttaatc

SEQ ID NO: 60641 - DNA, 429 bp, Homo Sapiens
gctgtcattctcttgaatgtatacttatgatcaaaataattaggatagaagatccactacaaggcattttacaagccaaaagatggaaatctcacaaagcaggaggatcttctaacattaacgttgcaaaaattcagttttatattttgaaaggtggcaagcaaagcccaaggaaaagcctgaaagcatattttacatcttaggacttacctcaatgtatgccggttctgtcccagcaggtgagatgtgtggctgccagtctttcggtggctttgaaaggtacttggaatctgttacaacccatttgagccggggccaacctttaaactgtacaatttctccattctgggtttttggcagtccttttagacaaacttcactggtaagagctaaggcaataccacagcttcctagcaagaagccaatctg

SEQ ID NO: 60642 - DNA, 508 bp, Homo Sapiens
ttttttttttttaaacttagaaagtgagttgcagcaaattttctcctgaaagaattgcaaagatgaaccgtggcctctttctatattcataatttttgtcttagggttaaaaagactcccccaaggacagaaaattgtacctaatgatacagcctagagcgcatgttgttccttttgtctacagtaccttctacctctggctcaaatgcactctggtcactgatgcacctccagttctcacagcttagtaaattatggtgtagtgatcacgtctatgtccctacttccccaaccaaattttctgagctatgccagggtgaggatgtggcccttttcatcttgtaattcccaaaagtctgtggtggagtgcagagatgaccactaaatgaaagaatcactcgtactggttgaaacaataccaataaataccttaggttctgtggtgaacacagatcagtaaataaatgttgggcaatcttccagtctctcagtgtcccacggtatatct

SEQ ID NO: 60643 - DNA, 454 bp, Homo Sapiens
  misc_feature (433)..(433): n is a, c, g, or t
ttgtgagcaacatcggctgtttattcacttgtgtgtgagtgggctgagtccgagaaaggggtcagcaaaaggtggtgggattatcattggttcttataggtttgggataggcggtgtagtcaggagcaattttttacaggcaggggatggatattacaaagtacattctcaagggtggggaggatgttacaaagtacattcacaagggcagggagggtgtatcgtcacaagggcagggaggatgtattgtcacaagggtggggaggaatgttacaaagtacattcacaaggacaggagtatcacaaagtacattatcacaagggtgggggaatgtcaccgtggcttgaccattagtgcagccagctccagaggaccttaccaaaaagtttccatacttgcacgtgttttcctggtggccaaaaatataaaacntttaatttctgggattccttt

SEQ ID NO: 60644 - DNA, 478 bp, Homo Sapiens
  misc_feature (158)..(158): n is a, c, g, or t
  misc_feature (172)..(172): n is a, c, g, or t
  misc_feature (176)..(176): n is a, c, g, or t
  misc_feature (178)..(178): n is a, c, g, or t
  misc_feature (184)..(184): n is a, c, g, or t
  misc_feature (197)..(197): n is a, c, g, or t
  misc_feature (429)..(429): n is a, c, g, or t
  misc_feature (462)..(462): n is a, c, g, or t
acttttttgatattttttattataaaagaaaagagaacaacataaaactagtggggtacttgacattgtttttgagaaactaatccatcagtatctggcttgatggaagtagttgcaattctcagtgagttctcaaggtgctcatcagatattttggntctaattttactcntcgngntcctcnaccctggaaaatngtagcccccaaatgtaagtgctgccaaaaagcaatgacatgaacaaggtgtgattgtgaagcaagggatatttgtcattggggaagacaggtccttacaaaaagtccagtaaagaggcaaaatcaaatttttctataagttgaacatcagattgcagctctaggcattccatttcaaaattggccaggtaacatatatatgtcgactgaaaatgggagttgcaaatataccnaaatattggatgattttttcccgaaatcctggnaatacccggttttcca

SEQ ID NO: 60645 - DNA, 610 bp, Homo Sapiens
gggacaggtctatgttctccaggctggccttgaacttctgggttcaagcaaccctcccaccttggcctcccacgtagctcgaactataggtgtacaccaccaggcctggccagtggttacattttgtgcatccaacctggagtcccctcctgcatttcaggacatccctatgcccatttagctctgtgtgaagtgctttctctggtgtagtttccccttccactagatggagctgtcaaagtccaaagcagtgtctaggcatgacaaatagctcaagaatacccaagtattttattgttgattttggaactgggactaaaggcagatgattttataagtaatctctttaagagtcatttacttccatctaataaaaacaaatagacaactttatactgcatggcttattatacttggaggatagaatctataatttaaaacagaatttagattgaaccagcatgtattatttttggatgaaccaatatgacaacctaaatggatggaggcagatcagaaatagtatacaaaacatacacagcagtagtaattaaagacaccgaattcaaaaagtaaaccatgacttaacaacatgcaaattgagcaatat

SEQ ID NO: 60646 - DNA, 602 bp, Homo Sapiens
ttttttttttttttttttttggtagtagatgcccaggaagctggttgggcactccgaaaggaaagaaatgcactgacccactttgtgcattttcccatatgctctgatgtctgcctttatttacttttgctaagtggtttttcctataaaacagaaaatatttccccttctggctgctgtactttgcacagatgtcatgcctaatgtcacacaaacaaatggtgtaatgctagcctggtcatccaaatattaaaatttttttttatattttttgggatttgttttgagacagggtctcactctgctgcccaggctggagggcagtgatgcaatcatggctcactgtagcctcgacctcctgggctcaggtgatcctcccacctcaacctccagagtagctgggactacaggcacacaccaccaggcccagctactttttgtaaagatggggttttgccatgttgcccagctggttttgacctcctgggctcaagtgatctgcccacctcagtctcccaaagtgtgaggaatcacaggcatgagccaccacgcccggccccagatattaaaattagtttgtcataactgaatgattaaatagt

SEQ ID NO: 60647 - DNA, 488 bp, Homo Sapiens
tttttttttttttaagggagggaggttggacaggaggaggctataaagcttcctgaaggtcaaagagcaggtcatgggcacagaatgaggccagagacaagtctcctaccaccagtgttaatcttgagttagtcacatttaaccagcctcaactgcaaattcttcgtctataaaggggtgtgtcactcaccttcctcagagtagtgttttgagaattgactaatatctaaagcatgaaattctttagataaaagacatcatgaacatactaaatatttttatggaaagagtcatgccctctgtgaagtgccaagtagatattatacacgattgttgccctcatgtacacattgaaatcgcctcactcatctttctagttcctcaaaattatacaaacaatataattacttaattcattaaacaactattgaatgagcatttactatgctatttacttctaattttaaacctacaagtgcaattgtgtt

SEQ ID NO: 60648 - DNA, 285 bp, Homo Sapiens
ttttgcgatttggataaatatatttgaaaaacataatttataatggattagtatccagaacatgtaaggaatcaataagaagacaacccaataaaaattggacaaaagaaaacagagatttcatagaaaaagaaacaggaatggacaaagaaatgtaatttatgcctactatgtgatattttataatcatctggttggtaaaaattaaaaagctagacaatttcaaaaaaagaaaaagacagactgggctttaaagatcagtagggaaaggattgattctttaat

SEQ ID NO: 60649 - DNA, 1579 bp, Homo Sapiens
gtctcgccctcttgcagtctgcagcttctcctgtcatcggaaatgccaggccaaggtggctgccccctgcgttcctccatccaaccatgagctggtgcccatcaccactgagaatgcaccaaagaatgtagtggacaagggagaaggaggctcccggggtggaaacacacggaaaagcctcgaggacaacggctccaccagggtcaccccgagtgtccagccccacctccagcccatcagaaacatgagtgtgagccggaccatggaggacagctgtgagctggacctggtgtacgtcacagagaggatcatcgctgtctccttccccagcacagccaatgaggagaacttccggagcaacctctctgagcggagacctgacatcacgaagctccatgccaaggtacaggaatttggctggcccgacctccacaccccagccctggagaagatctgcagcatctgtaaggccatggacacatggctcaatgcagaccctcacaatgtcgttgttctacacaacaagggaaaccgaggcaggataggagttgtcatcgcggcttacatgcactacagcaacatttctgccagtgcggaccaggctctggaccggtttgcaatgaagcggttctatgaggataagattgtgcccattggccagccatcccaaagaaggtacgtgcattacttcagtggcctgctctccggctccatcaaaatgaacaacaagcccttgtttctgcaccacgtgatcatgcacggcatccccaactttgagtctaaaggaggatgtcggccgtttctccgcatctaccaggccatgcaacctgtgtacacatctggcatctacaacatcccaggagacagccagactagcgtctgcatcaccatcgagccaggactgctcttgaagggagacatcttgctgaagtgctaccacaagaagttccgaagcccagcccgagacgtcatcttccgtgtgcagttccacacctgtgccatccatgacctgggggttgtctttgggaaggaggaccttgatgatgctttcaaagatgatcgatttccagagtatggcaaagtggagtttgtattttcttatgggccagagaaaattcaaggcatggagcacctggagaacgggccgagcgtgtctgtggactataacacctctgaccccctcatccgctgggactcctacgacaacttcagtgggcatcgagatgacggcatggaggaggtggtgggacacacgcaggggccactagatgggagcctgtatgctaaggtgaagaagaaagactccctgcacggcagcaccggggctgttaatgccacacgtcctacactgtcggccacccccaaccacgtggaacacacgctttctgtgtatttatatagatggaaatatactttatattttgtatcatcgtgcctatagccgctgccaccgtgtataaatcctggtgtatgctccttatcctggacatgaatgtattgtacactgacgcgtccccactcctgtacagctgctttgtttctttgcaatgcattgtatggctttataaatgataaagtt

SEQ ID NO: 60650 - DNA, 458 bp, Homo Sapiens
atactaattaaattactggtttattcagcaataaataaataaacacttattgagcacaatatgccagacactcttctaaactctttatgttaacttttttaatcttcacaaacacattttgaagtaggtactgttcataaccccattttacaaagaaaaaactgaattttagggagtttaattgctgaaccaaggccacagaattggtgagttgcaggtaaaatttgaacccatttctgcagatgtcaagttgtgtttttttgtctttccatcatgctactgacacccaaaccaaatgaaactggcagcccggattctttcagagagatgttgtaaaagagttcccccagcaacctcacctgttaaacccccaaattaagtctgaagagcaaagcaggagtctgactgctcttcaaagggagagatgtcaggaagcatgatgtagtgaagcctctctc

SEQ ID NO: 60651 - DNA, 639 bp, Homo Sapiens
agtcaatcgcccttgaagtgttcctaccagttgctggctctagctgcggcttctactcagtaatctgtgattctctgtatttgtctgttctggttttgggggcagtggtctgtcccgtgtcttcattctttgatggatctaagaagagctgttgattttcagtttgttcttttttttggtgaggataagagtacaacttccaacctctttacatgttggatgggaaaccacaagatctcaaaactatagtggttaaatattttgtaaaattttattttaattttattaaaaaaatttttttttttttcagatctaggcctgcagaggttaaaagatttttcactcattattcattcttttgttctttcttatctatcctttacatttaagtatatttaaaaaaatgggcaaccaggcctattttattttattaaataattttcgtttcttctgtttcaacaaaacctacattcaaaaggcctattttagattttttattgacatctttaaaacgtaaaatatagcactttgggaggccaaggctatattttgagcccaagagttcaaggccagcctgggcaacatggtgaagcctcacctctacaaaaagtaaaaagtaagctgggtgtgttggtgcac

SEQ ID NO: 60652 - DNA, 529 bp, Homo Sapiens
  misc_feature (267)..(267): n is a, c, g, or t
  misc_feature (328)..(328): n is a, c, g, or t
  misc_feature (351)..(351): n is a, c, g, or t
  misc_feature (359)..(359): n is a, c, g, or t
  misc_feature (428)..(428): n is a, c, g, or t
  misc_feature (433)..(433): n is a, c, g, or t
  misc_feature (461)..(461): n is a, c, g, or t
  misc_feature (468)..(468): n is a, c, g, or t
  misc_feature (473)..(473): n is a, c, g, or t
  misc_feature (498)..(498): n is a, c, g, or t
  misc_feature (504)..(504): n is a, c, g, or t
  misc_feature (516)..(516): n is a, c, g, or t
  misc_feature (521)..(521): n is a, c, g, or t
aattaaggctttcagacctaatctagccatgaccaaaggccaaactccacagctttgtacaactgaagctcagcagacctttctggactttctcccactgctcctgttctatagccagttgctgtgttcaccaaacttgcctgacccttcctcctcctgtgctttcactcactctcctcctattttaatactcatctccagcctgcagcaccccaggcagtacaccttcacatgaggaaaatttacccatctttctacgctgagttnaaattcttccttttatgaaacttccctgaagtctaccagcatgacattccttctctttccntaagtccctattgctcttctgcncatcccanacaatttgggcaacctaagtcacaagttggctttgtggataatttcaaggtattactcctatttattantggtntaaggtccaaatttttcccattttgggnggataanttagncctttaatggttttcaaggaatggnttttgngcacaagcttanctttnaaaggtat

SEQ ID NO: 60653 - DNA, 546 bp, Homo Sapiens
tttttttttttttttttcctcgttttatttttgtagagaggaagtctccctatgttaccagagctggtctcgaaccgctgggctcaagtgattctccctcctcggcctcccaaagtactggggacaggtgtcagccactgcaactggcctgaaatatgtttcaggaagcaagacttcaccttattatgcttggtttactgactttcaaccaagtcctctgttttttgtctcttccctccttaacgatatgcccttccccgaatttgttctcagtacactggcactagactcatatcctccatgaaggaacttggaggatttttctctaaagtaaatgactcgaaaaaacacctaccaaaacaccgccatttcaggtaccccaacaaaagtccaggtagataacaattaccctacagggaagtctaccagtcaacaaatctagaccatccaaagagctttcaatgagcattttagtgctttacccttaaatatgaataggcagtcatatatcacaaatttgaagaaagcctccaaaatcaaagacag

SEQ ID NO: 60654 - DNA, 922 bp, Homo Sapiens
  misc_feature (607)..(607): n is a, c, g, or t
  misc_feature (726)..(726): n is a, c, g, or t
gctggttcccaagcctattggaggaatgtgggtgtggccgaggtgatggcaagaaaggtgcaagaaagtgagcagtctgcctgtgagtgagcacagatgccggggtgtgtgtgtgtgtgtgtgattttcactgtggggtgtgtctgtgagagctagctgccttacccctccttggcacatagtaggccttccataaatgttggatggatggataaatagattgggaccatcagaccatgggaccatcagaccatgtccactgtaggagtgatgacagctcagcgtccccactcagtgtatctgaccatgtgtgtaagtgcacaaaaatgtggttgtagatgttgctctacattcaaaccttccaggctacactcttccatcagcatgagtcctggagagctgggggaaggtaggaagaggagccttgccttgagttcctaaaccgacccactgcagacacaggctctgattctcttacccagagatgcggatgagctgacattttactcatggctctgcctccaagaaggcctgtattatacgtgtcctcctgggggttggagatgatcgtcaagtacacagaggtccactggcccttcatctaggnatcatatgatcgatctacgtctaggaatctcagacgtggtcctcgattgaatctagacgaattatctcggtctaggacctgtggaatgatgtgacacttggtctgttcgacgagacatnagtgtgtgcgatgactctacatggactcatccaaaagcgagcgggtgtggggctctaaacattggttcacaacagaggttgtcagctcttctttccgctgcgcgggtgaatgaaagctcacactgggagaagggaacatttattggaggagagtctcgtttgagcgttcaactcgcattacgaggccacgtgccga

SEQ ID NO: 60655 - DNA, 557 bp, Homo Sapiens
ttttgtattgcaagaactgggcagtgaaagtaggtatattttatattaattgaggaagggctccatgtcaaaattcaatagaaaattaaggacctgctctctaaaacagcatttctcagacatactttcgagatagaaaaacaagcaagaggcagataaatcaagaatctacaagagaaaactaaaaaattcataatagctttcaaaagttgcgagagcttcccccatgcctagccctcaattatcccgttgcagcatcactgctgagtgtcaggatgatctcaatctgtgggtgctacaactcgattatttctctctttaccatacgcttctcacaaaatggtattattttatgttagatgacggcacacccagtggaatgctgaagccttagcatttaatacagctttccagaaattagctctctgaatccaaattgaacttacacaagattcctcaagacaatgacttccctttccaagacagcaagaatactttagtgttggtgttaattccaaatattttcaaacaattttcaccattatgtgagtattaaa

SEQ ID NO: 60656 - DNA, 384 bp, Homo Sapiens
tttttttttctaacgaaaatgggagttaaaagatgagaaaacctcgtagtattttagtctggtacttttagcatccccaacttttaagattataaattcacaatagtgagacagccctagtgacaacttttaaataaaatactggatagctgggcgcagtggctcacacccgtaatcccagcacttattttttttaaaccattatcagatatttcatgttctactagtaaagggaattcgcattttcaatgtcctgtctgcattcctcctagcctctctctgctcaggttttggaaaatagatctttcaaatgcaattgcagtatccaaggaaattcccacccatgccaccagtgctcatcctgtgggcaccccacagtcagca

SEQ ID NO: 60657 - DNA, 933 bp, Homo Sapiens
atggctcgcacagggtggaccagccccattcccctatgtgtttctctgctgctgacctgtggctttgctgaggcagggaagctgctggtagtgcccatggatgggagtcactggttcaccatgcagtcggtggtggagaaacttatcctcagggggcatgaggtggttgtagtcatgccagaggtgagttggcaactgggaaaatcactgaattgcacagtgaagacttactcaacctcatacactctggaggatctggaccgggaattcatggatttcgccgatgctcaatggaaagcacaagtacgaagtttgttttctctatttctgagttcatccaatggtttttttaacttatttttttcgcattgcaggagtttgtttaatgaccgaaaattagtagaatacttaaaggagagttcttttgatgcggtgtttcttgatccttttgatgcctgtgcgttaattgttgccaaatatttctccctcccctctgtggtcttcgccaggggaataggttgccactatcttgaagaaggtgcacagtgccctgctcctctttcctatgtccccagaattctcttagggttctcagatgccatgactttcaaggagagagtacggaaccacatcatgcacttggaggaacatttattttgccagtatttttccaaaaatgccctagaaatagcctctgaaattctccaaacacctgtcacagcatatgatctctacagccacacatcaatttggttgttgcgaacagactttgttttggactatcccaaacccgtgatgcccaatatgatcttcattggtggtatcaactgccatcagggaaagccattgcctatggtaagtcacctctcctttagcacattaggaataatcttggctttggaaattaaaaaaagattccttactgaattgtga

SEQ ID NO: 60658 - DNA, 473 bp, Homo Sapiens
aatgataatctggaaaatctgtattttcattttaatgaaatctggaggagattgtctagatgatttaaatagtgactttataacccaagtgcagccttggggttttagtactcacgtgtgcattaaatttatgactgtactggtgccaagcagtcagtacttctttaattgttaggaggctaatgagatcagaacaggggttcacttaacaagtaaatgatgcattctacctatgagaaaactgagtaacaatttgttatactgtataaataaaggttttatggtgactctacagacaacctggtcatcaaacactatgtaggaacataggcatgacaaactcaacagtattcatgctgtaagcagtgagctggctttggcaaaaatacatcatctagcacattaatgttgttaacttgaacattattggtttcagaaaatgcaaatataactctgaatcaatcttttttagt

SEQ ID NO: 60659 - DNA, 523 bp, Homo Sapiens
  misc_feature (242)..(242): n is a, c, g, or t
ttcttacttgtacctcctgggatgcaaagtaagaatgcaaagaggcttatagaaaagtttgctcaacaaaaacagttttatttggtggtaatggggagtgagagtaaaaatgggaaatcccactaggaattaatggtttttcttcattttctgtcacttttacgtaatggtacatttcagaacactgagagttggaaaggaagtaaatggaagtaaagacaaatttcacatgactgcatcangaaagtgagaaagtgagggcgggatcttcacttttcagggcctcatgatttctgtgatctctgctgctctccgctttctcttctcccagtggtcatccctgggctgctcatgaccatgcacggctgtcagtctagtatcttatacagcctccttcaaattctcattgtaatctctatgtctttgttcaagtttccaaaagagaggatttgattggcatggctcaactagtggctttattcccctgggagtgcttgttcaaccttggtctgtatctaggaga

SEQ ID NO: 60660 - DNA, 473 bp, Homo Sapiens
tctaagctgatctcactattcagtggactgtgagtcatggcttgaaatacactggatatgaggttacaattttgagatcatcagacctgagatatcttggaacactgactgctttttctgttgctttacgatcattacttttcaatcatatttacctcttcttttttgaaggtaggcttgtcttcttggagcttttctcttttagcttgcactttagttcccttctcttctccctttttattttcaagaatggtaaggtcacacaagtaaaagaagccctttctagtttacaagagtgacagggtgctcggatcgccttgcaagtgctgcgtgggatggcttctcttctgccgtctcagcgctcacagcacagtggttctaaacagcaaggtgggatattttcttcccaccccaacatcttctcgtgtagctgccattgcgctcactgaaatctagcatgatgtggcactcct

SEQ ID NO: 60661 - DNA, 629 bp, Homo Sapiens
tttgtagtcggcctggcagtggacagggaggttggctagaactattaccttaggtccgtgataatatccctgaatccaacttttcagaaagaaataggtaacatatttttcaccaggaagcttcacccagacactgaacagaatggtctcagtgcactaatggaggctcagttaaagggttgtggtagcacaaggaagagacattctgacttggaaatttggagaaggctcacaaatgaaggggcattgaaatgagcttgaaggtgcaagagtatccaagttgagaagacaacctgagtggtgttgggtgaacagtcattctacctggctgtagtgtagtatagtgtagtgtagtgtaggaaacatcagaggagtggagtgggatatgagcctggagagagctggcggccatggatcattgaaagccttgaatgtctgatggggaggttgactttattttgtaggcaatggaaagccaccagtggttttagttgagcagcaatgaaattaagcctgtgctttgcaaagattaatctagcagcaacagattggaagcaacaccaccattcctggtatcagtccaggtaaaatatattacagctctttactggagcaataacagtaatatt

SEQ ID NO: 60662 - DNA, 504 bp, Homo Sapiens
ctctcttttcaaatccctcactcatcctctactttgccatctgttatggtctttctcattcttcttttctctgtctcaggttttctactgctctctctctcagtctcctgatccctttggccaacacaatcacaggagggctttggagtaagacgcctgcatcccggaggagcgcattttccaggggctggtgcagggcaggcaagaacacccggtgtcatatgacagccccgggcacctccccaacgcgggctcagggtaagcggtgactgcggtggggagacctggggagcataagggcctggaacgaggagggaggtggggggcgacggcgccttaagacaagactgggaggcgcccagggcgggaatccgcctcgcggtaaggactttaaaaagtgctggtcgggaggagtcagaaaaaggttttgagcagggaaactacgcgatgggaagtgtatacattgccctatagcagaaagattcgggaagggaccatcctcag

SEQ ID NO: 60663 - DNA, 320 bp, Homo Sapiens
ttgaatgaaaagtttgatatattcatgtgaaatgtataaacaccacatacgaagaaaaacatatctaaagactagccaggtagagtaggaaaaaggaaagaagcacgtgtacatcttctaagatctggtgggttagttccaaagaaaaggtgtatgggccggctttatgtggaaaggaaaggtgaggatgacttcaggtcatcctggcaggatgccatgtgttcggtttcggtctaactaaagtcagctttagttagaaactgctgagactgctgaggcagacactgcgcatctccagcaaactgagccactaagctgcg

SEQ ID NO: 60664 - DNA, 419 bp, Homo Sapiens
tttggttctggcataagtaggggcagtatatggggttctaacctctattttattttattttatcttatattatcttatcttatttttttaccacttcccagatacccacttctttaaatgactttagttggtgctcttcttttcagtctcaccttatctctctctctctctctcctctttcttttttttttttttttcggagttttgctcttgttgcccaggctgctggagtgcaatggcacgatctcagctcaccgcagcctctgcctcctggctcaagcgattctcctgcctcagcctcccaagtagctgggcgttacaggtgtgcgccaccatgcccagctaattttgtatttttagtatagacggggtttctccatgttggacaggctggacttgaactcttggcctcccaaagt

SEQ ID NO: 60665 - DNA, 476 bp, Homo Sapiens
  misc_feature (463)..(463): n is a, c, g, or t
ctttttttggaagagatctttattaatagagtgcttttattaataattcataccttgtctaagcggtaaaaacccagcagaggattaacccatgcccatggtatttgaaactataaagaataaagttttctcctgtatttgttaggaattgctcttggctgcaagtaacagagaactgaaataacagtcatttaacacaagacacaaatttctttctgtctcatgtaaaagaaacccaagcagcagtcctgggcccccaagtatcatcagtgactgtggctccttctttctttctgatctgccatcctccaagtggggtttccaccctcacagtcacctcaagatgcaagaacactgctgggtgctccagccattgcgtcttgcatccgcagcagaaaactggaggaagcgccatttgtctctcccccaaacttccccttacatttccctaattgcaaggganggctgggatatat

SEQ ID NO: 60666 - DNA, 300 bp, Homo Sapiens
tttttttttttttttttttttttttttttttcccaccactcaaaaattttaatatgtattgaagattttggccaaaaaatatgcaaaagacaaggaatataaaaataacttacaacaaatttctaaaacccctcatatattaaaattggtaagacaaaaatatgatttataatacatgtttgccattgtggtatatataagaaaatagtactcatactaaattcaatctacttatcaaaattcttaatataagaatgacaatattcagatgttataaatagaaagacaggtattaaaaag

SEQ ID NO: 60667 - DNA, 471 bp, Homo Sapiens
aacgttttgaaccattttgtttgtccaaaaagatggcattttaaaaaggaagagtgtgaacaggagaaatatggaagagaagaggaagcagaagtggccaagggagagaacctgatggagaaaataaggaaagataggaggggccaaagcaaacagaaggctcatggctggtagttactctattaatggaaatagaatcacacaggcagaaagaaaagtgagtagataaaggaaagacaatttaccttgaacttttaattccaagctaatatctattaaactactcctaggttgatagaatttccccccattaactgcctcaatccacagaagctttggtaaattttagcacaaaggaacacttggaactggtaagtggtaacggtcctacattccgaaccttctgttgatcagctgctttggaggcaagaagaaagaggcccacattctaagactaactgaatgccacag

SEQ ID NO: 60668 - DNA, 555 bp, Homo Sapiens
aatacagatttattaaaacaatattcccttaaaaaatcacggtcaaagtggggtacagggattttcaggcatggtcaggagctccaccaatctaaatcaccacagcctgccgttatataatgctgaatactttcacagatttatagtttatatattataaatttgttacacatatagtttatatatatttattcttaaagtacagttttatatatatatacacatacacacacacacatcacttatagttaataagtatggttatctagtgctgaatacatctgaacataaagggtgagcagtggtgggaaaagactgagaagtcaggagggttggtcagctgcatccactgaagattccatgttgctggtggaagtctccccctcctgccactggtgagaaaaatggctcaaactgttgcttcttcactttaaaaagtttggtggagctcttgtttgccaacagtagcctatggtggcacttgtcttaaattgtgtatcatgcttttcctgctccctccctgcagtggcatagcatgttaataaagatctaact

SEQ ID NO: 60669 - DNA, 539 bp, Homo Sapiens
gcttgccttatccctgggataacccgtcccatttaattccctgcaccgctctattccttaagagcccttctgtaggggcagagaggttctacttcattactgcgtctcctgggaaggccatcaggactgctggctaaagtgggaaccaggactctttgtgagttaagaatttgtgtatttatatgtgtgttatacacattttttaaaaaactgtaacgacatcaggttgagcagtcgtctccgggtggtgaattatgtgtatttttaaattttatactatattgttatttttcaaatgttcgaaattgaatatgtagattgttgttatcagcagaaaaataaacattattcaaatactctattcagtaaagtaatttattgggcgcctttgtcaagcacgcatttgcctagatgtgactctacagataaaattcacttggggcctccccttacagacaatcaggcagtggagactgagtgcctgaatggatagaccagcactcagaccactattttcagtatctgtttttcttaactca

SEQ ID NO: 60670 - DNA, 568 bp, Homo Sapiens
  misc_feature (337)..(337): n is a, c, g, or t
tttttttttttttttgtaggaatggggttttgccatgttgtgacagtgtctttcatcccatgtgtgtttccacaatgagagcttgatactctttccatcaagagctggggtctatggcaccctcctctcaaatctgtgcagtttggtgacttgcatacaaccaacagaattcagctgaagtgaagttgcggaactcccaaaatgagctagaaaaggccatgcagcttctgcctgggtcttcagcggccatataaagtttgactaccttgaggcagccatgctgtggggaagcccaagctggccagtgcagagactatatggtgggggaggccctganaccacagagagatgcccacttgtccagcacccccagccgccctgtggcaagcatcactgattgcactgtttgtttgcatcctgagccaaaacaaaccagccacgcctttcttcaaatcccagcccacagcaaccatgagacttaatgcaatgattgctgtcatttgcggctaagttgtgaagtgatttattaacagcaacagctaatgagaagagcagccatatcctattt

SEQ ID NO: 60671 - DNA, 489 bp, Homo Sapiens
  misc_feature (328)..(328): n is a, c, g, or t
  misc_feature (377)..(377): n is a, c, g, or t
tttttttttttttttttgacttctatattcgctttatttacaaaaaagcaaagcttgcttttaagattttcagtaggatatgtatgaaactgcagcgctcactaggtagtcttcttaggtttaacccctgacactcatataatgccacgcctggcagcagctccactttggaggactgaggagaagaaacacacttcactgcggtacaggcatggaagagctctactctttggcccaaatgcaattcaggagcaaaccaatatgggtgggggcttggcttggaagtccttgaccggcgggaaaccagttccctgagtttgtcttttanattcccacattcagttaagacagtaacagaggctaaaggtatggcttcncactaggtgttttaagattattcagtactttcaagccagaggcagtctacatgtcagaggtcatttttaccatgagcaatgttttatttatttatttggagatggagtttca

SEQ ID NO: 60672 - DNA, 481 bp, Homo Sapiens
tttttaaatatatcatatgattatttatttgctttaattgacattgcacacactccattctcagaataacgatgacatcactatcacccaaaatgattactgaaaggctaaaaagacatttttcatacgctctcccagtgccctcctcatatgtcttcagagtggtggtgtatctacattgtcaagtcatggatctgttgcatactagcttctcttttttgaatccattgatgtgctaggaaatgtttaacaagagactctccagaaaaagggggaaaaagccctgattcatagcattttgcagctttccatggagtaaatactttcaccattggtgagctatcaaggtgacatcattaaatgtggagttcgggaaaagatgtgcagaagctgaccctatctccaccatttgatacaatcaatgtaaataacctcaaaagcatagataattgtaaaatgtagtaacataattatgaagcga

SEQ ID NO: 60673 - DNA, 684 bp, Homo Sapiens
  misc_feature (389)..(389): n is a, c, g, or t
  misc_feature (476)..(476): n is a, c, g, or t
  misc_feature (522)..(522): n is a, c, g, or t
acgttgaagctactagagcttcatcttctatatgcaaatataatatatcccatttaaagtgggtcaaatcaatagttaccattaaaacaacagttttttaagatgtgatagaacaattttctactcttgaagtatccaacatctagattcggggtaaactgaaccttggattcaaagactatgctctttatgatacctaattctactcttattttgctgtccttcaatgtctatcttaacaacagtcacttcttggaaatttctaaccccttatcctcatttttacagcctccgggttgcgggggattaggaattctgtgaatgagactacaaagatattacaaataaagtattctttttcatttttttgagaagaaacaagaactggnttcacttttgggtaatataaaggaaagtgctaatgttaccctatgactgcgtacagtgacatttcaatatacaccatgactggatanagtcaaatctcttatatatgcataaacgacaaattcaagtctctanaagattattattattatttatttcagagacagtctactggctgccaggcttggatcaatgtggacatagtcactcagcttgactctgactcatcatcctccgctaagctccagtgctggacatacagttgcacctactgccttatgtgtgttattgtgagac

SEQ ID NO: 60674 - DNA, 506 bp, Homo Sapiens
tttttttttaattactggtcatgaccactaaattgacttcatggcccactaagaggtaactacccagttggaaaacaatgatctagctcactcttacttatctgttgtgactcactttaggaagcctcacctgaaggtaaggttaggtgaatttcttctaagcgactagtacagcatatctttatacataccaattatattaaaattacctgttttatgtctttgtctccccacttctcagggtagaaaacctatcttattcatctttataccaatctggctcataattaaactgaattatgatattctaactattaaaaaaaagaatgacttcactggtaagtattgggtttttttaagttttcttaaaacggtatcaagtagctgttctgaaattcaagcaaataaaggacaagttttacgttcacttgaacttactataaacagtgggatgaagaaggtcaaggcttaatttatacagataactactgttttaagatctcatg

SEQ ID NO: 60675 - DNA, 772 bp, Homo Sapiens
ttttttttttttttttttttaaggaaaaagagaataccattattttctgctatatggggacatttttgttatacccatacaaggcagaagaccagagttttgaacagcactcaactgaaacaggactgaggacccacaaattcctgctccaagcaatgaaaaagacaccttacctcataaatttagaattcctcaggcacaatcagaatcagaatggatttaaccaaacacagcaaaaagtcagtcaatctcttccaaatggtgacaggtccttgaagtctaatttttttttttttttaacactttactgctctgttttttaaagtcatatgacttcttgttgagacagacagaaaaaccaaggttaggccataaatggtcttttccattttttttttttgagacggagtttcgctcttgttgcccaggctggagtgcaatggcgtgatctcagtcaccgcaccctccgcctcccgggttcaggcgattctcctgtctcagcctcctgagtaactgggattacaggggcacaccatgcccggctaattttgtatttttagtagagacggggtttcaccatgttggtcaggctggtctcgaattcctgacctcaggtgatccacctgccttggcctcccaaagtgctgcaattacaggcatgagtcaccacgcctggccatgccataaatggtcttttccatttagcattgttgattacgctttcaaaattggccagagctctagagggctgccagactgcacacttaacact

SEQ ID NO: 60676 - DNA, 178 bp, Homo Sapiens
agaagcaggaagcacgcagacttgctttctctggtcgtatccgccagatctctgagaagagagtgggcttacccctcaatgggcaaagaaccagcttccattttaaaagctctcagaaaaaaaagaaagaaaaaaaaaaaaaaacccccaaaaccaaaggccttgtttttttggagga

SEQ ID NO: 60677 - DNA, 540 bp, Homo Sapiens
  misc_feature (506)..(506): n is a, c, g, or t
ctttttaaagacagggtctcactctgtcactcaggctggagtgcagtggcacggtcatggctcacagcagccttgaccttccaggctctaaggatcctcctgctttagcctcccaagtagccagcaagtacggccatgccctaagccaaaatttaagattaactttgagcttgtaccagatatcaagatgtaatggaattcttagaattcggtggaatcaacaacactgattgcacattttttccttcggctactccaaatcccctcttccctatcatttctcctcccttctcagcacccagaaaaagcaccccatgcactgtacaaatactgcaaacactatagttgcattcataggaccattaaaaaaaaagagccaaattacaaaacaatctatattttacaaacatttcagttgggttcttaagctaaagatattactgtttactttggtacgataactagaaaacacaaacattatgctccagaaaaacataatgtggttntagctgtaaataactcaaatgaacagttacttta

SEQ ID NO: 60678 - DNA, 287 bp, Homo Sapiens
ttttttttttgactatcacagttgttctacttacttagaattttatttctaggaaaactttcaactctgggatggagatgagtttctccaaagagaatttctgttagcttctacaagagtctggggatactcactgccagtctatgtatactgccattatggggataaattatcttagggaattctttttcttttttttttttagatcacctacacagcgttaaattcgcactgcaaattatacaagggtcagctggttgcttaaaattctcagcagcctcgtgccg

SEQ ID NO: 60679 - DNA, 522 bp, Homo Sapiens
tttttttttaagaaaagaagcttaaaatctagaacctgtaactcaataagatgtcagtcacaatgtgtcccctgtcatctgccagaggacagcagagatttgtgccagagagaagggcctgccagaggacagcagagatttgtgccagagagaagggaagcatgctctccaaggagcaagtcctggggctgctggatggtgggtgggcaaatggacatgcttgagggcttgatttgggaacaggtgggccttgacatctagtttttagagaacaatgtacacattaaccaaaaaaaatctaccatgagatttaaaaaatctaaaaaattatataaattccattatgtaaattttaaagcatctctatgtgttcattaacaaatattaatttgataacatacagagagattttagtaggtgggtacagtcaaagtatttgaaagttaacttttttcgtcagctcttccttcactctactatcattatagttttgcaggtactcaaggagagtgtaaacaagat

SEQ ID NO: 60680 - DNA, 468 bp, Homo Sapiens
ggcttttccaaaattcccttctttcaccattttgagttgaaaagtcaagataaatatttatgctgtataataacccacctctctgctacagcaaccacaaatgtcacaggttcctaaagcctccaagaatatttgttttacagcaagaagtagttgctttttctaaaaaaaacacacaattttctcctccaggatagacaatgggtaaaaatctagctgttaactactagccagagttatgggaaggaaaagaatccctcctttttctctcaaccagttttcctttctaacccacttcctttgccaactgctgatgaggcatgtctaattttgcagagtgatactagaacagtgagaggcactgcagctccttcttccccggtccaaagcacctccttccctgaaacacaaccttacaactgcaagtattagatgtcacagcgagcaagcctttaggagattatttta

SEQ ID NO: 60681 - DNA, 512 bp, Homo Sapiens
tttttttttaaggaactggcaatacagctattgcagagctaggatttaaacccaggcaggttggcttcagttatcttcatggtacacataatagctagacgaggtggaagcagggataccagtaagaaagttattgatagtggcttggattagactgatagcagtgagtttccctaacgggttcattttccccagtcatgggatttttatgaataggatgattaataagaaagtataacaataaaggggagttaacatttgccagttcaacagactgagtaaagctacacgatttagctttactaaataaacgcccatgcgttttattttgactgcatgcttcaagaagctttcactttcaaattactcattacaaaaaagaagaccttaagttgggttggctttccaacgtgttaaatactcaaatgcaggtgatttggttctattagcactaagaacaaaaaactcagtctttgacccgagagaattctgacaaatgccaacttattaac

SEQ ID NO: 60682 - DNA, 355 bp, Homo Sapiens
aaagacaggatctttaccatgcctagccttagtttccccattatatcaccagagagacactaacaaaggtcctcccctctcccttttcccatttcccatgtccctcacaagatgacagttgtagcgtagataagaccaacgtctagataaaaggttgctctgacatttttaattaataatgattttcggccaagcatggtgtctcatgcctgtaatcccaactctttgggtgggctgaagcaggaggatcacttgagcatggtagggtgaggctgcagtgagctgtgatcatgtcactgcattccagccagggtgacagagtgagatcctgttctctcaaaaaaaaaagtaattt

SEQ ID NO: 60683 - DNA, 565 bp, Homo Sapiens
tttttttttaacttagagaaaacagagacacagagatgtaagctgcttgatcaaagcttcttcattcatcagtggcagagcagccccagatagctctggaaacatctaaggtatagtaactattaagtcactaagttgttattaaatgagtgctctgttcggggctgaggtaaaagtcattgtgaagatatgaaagtactcacccgttgctccattgttgcttattagactgctcagaatatactctgcttttaaaagttttcctgaaaagcagcaaccaaatgccacacaattagctttgaacatgcacttaacaattacaagttgttcatgttctaagactgatatattgcagcaggaactgtaacctcctttggaagcattccattttataatttaaaatcaacaatgacatcatctataaaactgaaaagaaagatgaagtttttctaagttggtaaggtgggaagttggacagtatctgaaatgaaaattagattcatatgtatgtgataattcattcacatagagcagggtttgaggagtagaggcaaacttttcttac

SEQ ID NO: 60684 - DNA, 806 bp, Homo Sapiens
ggcacgagggcagaatggctcccgcaaagaagggtggcgagaagaaaaagggccgttctgccatcaacgaagtggtaacccgagaatacaccatcaacattcacaagcgcatccatggagtgggcttcaagaagcgtgcacctcgggcactcaaagagattcggaaatttgccatgaaggagatgggaactccagatgtgcgcattgacaccaggctcaacaaagctgtctgggccaaaggaataaggtgctaaagttatctgtattcgaaggtgaacttttgcaatgacaccagcttcacttaaccctgcaagagcccatatcagaatgtgccataccgaatccgtgtgcggctgtccagaaaacgtaatgaggatgaagattcaccaaataagctatatactttggttacctatgtacctgttaccactttcaaaagtaagttctccatcccataaagccatttaaattcattagaaaaatgtccttacctcttaaaatgtgaattcatctgttaagctaggggtgacacacgtcattgtaccctttttaaattgttggtgtgggaagatgctaaagaatgcaaaactgatccatatctgggatgtaaaaaggttgtggaaaatagaatgtccagacccgtctacaaaaggtttttagagttgaaatatgaaatgtgatgtgggtatggaaattgactgttacttcctttacagatctacagacagtcaatgtggatgagaactaatcgctgatcgtcagatcaaataaagttataaaattgccttcaaaaaaaaaaaaaaaaa

SEQ ID NO: 60685 - DNA, 1736 bp, Homo Sapiens; identical to SEQ ID NO: 30886

SEQ ID NO: 60686 - DNA, 395 bp, Homo Sapiens
  misc_feature (192)..(192): n is a, c, g, or t
ttgttcagtaatttgcttttattaggcctttacagagcattcaacttcccttgggaacaattttacatagcaactggtataaacaggtttaggaacctgcaaacgcattcttggtaggcattgtgacactcagtggttagaagaagcatgcaggggtgcccactagacatgggataactgactgttgtacanaggtaatggagagcattggacaatcaaggaagtcagttaaggaggttttagagcaattattgttgttgatgatttatcaatcagaccttctcagttttctagattacagctctgttgggaatgctgtgtttgttatcaatttatatttaacattgacattatataccatacttattaagtgtatgtgaaaaacaacaaaataa

SEQ ID NO: 60687 - DNA, 533 bp, Homo Sapiens
tgtgatgatggactttatttctcccctctacttctgtccaaggtaaggacagcaaaaatatttgcctcaatgccttgcttgcagcagcagcccaaaggccatgctgaggagctggagttccctccaacctcccagattttacagctccaagagagattacatccttgcaccggggaaaatagaaactgtctttccccattatcaatggaataatgtagttcagtctgcaacaaagagaaacatgaaaatatcatagataggataatgttttacacacatgccagcctgcccttcaactggctttcaattttcagtatcttctaatcatggaaatgctaacacaattattaactttaaacaaatttttattacacaaaggttgtcacataattggatacttctctactttgtacacaattattctcactctccacagaaaggctgcttaacttctcatctggtggtggcaagcactaaaatcctgattttaacagaatagtagtaaaaatgccttagtgatttaagttaaaagc

SEQ ID NO: 60688 - DNA, 918 bp, Homo Sapiens
ggcggctcagcgacgcggcttctagaaccgggtgattgaactaaaccttcgccgcaccgagtttgcagtacggccgtcacccgcaccgctgcctgcttgcggttggagaaatcaaggccctaccgggcctccgtagtcacctctctatagtgggcgtggccgaggccggggtgaccctgccggagccaccgctgccagcgacatgttcaaggtaattcagaggtccgtggggccagccagcctgagcttgctcaccttcaaagtctatgcagcaccaaaaaaggactcacctcccaaaaattccgtgaaggttgatgagctttcactctactcagttcctgagggtcaatcgaagtatgtggaggaggcaaggagccagcttgaagaaagcatctcacagctccgacactattgcgagccatacacaacctggtgtcagacagctatgactatctccaaaatgcacctcctggatttttttccgagacttggtgttattggttttgctggccttattggactccttttggctagaggttcaaaaataaagaagctagtgtatccgcctggtttcatgggattagctgcctccctctattatccacaacaagccatcgtgtttgcccaggtcagtggggagagattatatgactggggtttacgaggatatatagtcatagaagatttgtggaaggagaactttcaaaagccaggaaatgtgaagaattcacctggaactaagtagaaaacttcatgctctgccatcttaatcaggaaaaactagaccagacctctgttatcttctgtgaaatcatcctacaagcaaactaacctggaatcccttcacctagagataatgtacaagccttagaactcctcattctcatgttgctatttatgtacctaattaaaacccaa

SEQ ID NO: 60689 - DNA, 4117 bp, Homo Sapiens
ctgctctgtgccgtcagctcctagaggcccagcctctgtggccctgtgacctgcaggtattaggagggtcacagctaggacgccgggaccccctggaagcctagaaatgggaccattgcaatttagagatgtggccatagaattctctctggaggagtggcattgcctggacgctgcacagcggaatctatatagggatgtgatgttagagaactacagaaacctgatcttccttggtattgttgtctctaaaccaaacctgatcacctgtctggagcaaggaaaaaaacctttaactatgaagaggcatgagatgattgccaaacccccagttatgtattctcattttgcccaagacctttggtcagagcagagcataaaagattctttccaaaaagtgatactaagaagatatgaaaaatgtagacatgacaatttacagttaaaaaaaggctgtaaaagtgtagatgagtgtccagtgcacaaaagaggttataatggacttaaacaatgtttggcaactacccagagaaaaatatttcaatgtgatgaatatgtgaaattcttgcataaattttcaaattcaaacaaacataagataagagatactggaaaaaaatcttttaaatgtatagaatatgggaaaacttttaaccagtcttcaacccgtactacatataagaaaattgatgctggagagaaacgctataaatgtgaagaatgtggtaaagcctataagcagtcctcacaccttactacacataagaaaattcatactggagagaaaccctacaaatgtgaagaatgtggcaaagcctataagcagtcctgtaaccttactacacataagataattcatactggagagaaaccctacagatgtagagaatgtggcaaagcttttaaccaccctgcaacccttttttcacataagaaaattcatactggagagaaaccatacaagtgtgataaatgtggcaaagcctttatttcatcctcaacccttactaaacatgagataattcatactggagagaaaccctacaaatgtgaggaatgtggcaaagcttttaaccgttcctcaaaccttactaaacataagagaattcatactggagatgtaccctacaaatgtgacgaatgtggcaaaacctttacctggtactcaagcctctctaaacataagagagctcatactggagagaaaccctacaagtgtgaagaatgtggcaaagcctttactgcattctcaactctaactgaacataagataattcatactggagagaaaccgtacaaatgtgaagaatgtggcaaagcttttaactggtcctcagcccttaataaacataagaaaattcatattagacagaaaccctgcatagtgaagaatgtggaaaatcttttaaatgttcctcaacccttaataagcataagataattcatactggagagaaaccgtatgaatgtgatgaatgtgggaaagcctttaactagccctggactctgactaaatatgagaatttatatggaacataaaccctacaaatataaagaatgtgacaaagctttttaaggaagttctcaacccttattacacataatttatactggacagaaaccctacaagtgggaagaatatggcaaagcctataacaacctgtcaactctttttgttttttgagatggagtttcactcttgtcacccaggctggagtgcaatggcacgatctcagctcactgcaacttctgcctcctggtatcaagccattctcctgcctcagcctcccgagtagctgggattactggtgcccaccaccatgcccagctaatttttgtatttttagtagagatggggtttcatcatgtttgccagactggtctccaactcctgacctcagatggtccacccacctcggcatcctaaagtgctgagatgacaggcatgagccacgacgcccagccacaagttctcaattcttaagagacatggcgataattcatgctgaagaggaactctacaaacctgaaagatgcaacagtgcttttaccaccacctccaacttttgtatacataaaaataaattatactaatgtgaaaccctggaaatgtatgaaatgagacaaagcgtttatatggttgccacacttgattgtagatggagtctcggtctttcacccaggctggagcgctgtggcgcgatctcggctcactgcagcctccacctcccaggttcacaccattctcctgcctcagcttcctgagtagctgggactgcaggcacccgccaccatgcccggctaatttttttgtatttttagtagagatggggtttcactgtgttggccgggatggtcaatctcctgaccttgtgatccgcccgcctcggcctcccaaagtgctgggattgcaggcgtgagccaccgcacctggccattatgccactaactttaacctatcccaccttaatcaagggtgtacttaaaagatggtaacaatatactgtttggtacgtagtggaataacatctctactcgtcactttgccagtggctttaaactgcaaatgagttgaattgttcccatagcttaaattttttttcttattgaaatctattactagtatttgtgggtatacagtatgtgtatatctttatgccttatatggcatattttgattcaggcctacaatatgtagtaattacattagggtaaagtatccatcacctctagcatttatcctttgaattacagtgtaattatacatttttaattattttaaaatgtacaattaaattgttactgactacaggtttatttttatggtcataataaaaattatacagaaaaataaataaaatatggccgggtgcggtggctcaggcctgtaatcccagcgctttccagggcgggtggattgtctgaggtcgggagttcgaggccatcctggccaacatagtgaaaccccgtctgaggaagcgctcctttcgcgggggcactcgctgtggatgaataaagtacactgacacacattctgctctgccagtccagctgagggtccgagccgcttacaggctccaaggccaggcacggtggctcatgcctataattccagcactttggagggccaaggcgggcggatcatctgaggtcaggagttcacgcaaatcagggggcccgtgaaaggcaactgagcagggatccatgggaaagacaccctcagaggcacaagattctctcgttacctttcagtttgctgatacttcagttaaagtctcctgggaaacgtctgcattaggttcttcctctgtagttcttcttaccttgcctgtaaaacaaaacctatctagtgtctgcataggtttccacttcttgtccccacctgaggaatggaaagcaacggcacagtccttgctcatgttttggagtgaaaggagcttgaaggtcatgtgagctttgccaaggcttctcctggcctcatgtcagatacagctcctaactcccaagcagcctaccatagtgtcctcctttttttgcgtgtgtgatggggtttcgcacttgttgcccaggctggagtgcaatgggtacaatctcggctcactgcaacctccgcctcccaggttcaagtgattcttctgcctcagcctctcaagtaactgggattacaggcatgcgccactaagggaggagaccactcctcatattgtcttatgcccaatttctgcttccaaagaaagaagaagtaaaaactaaaaggcagaaatgaaatccacaggcagacagcccagcgccacaccatgggcctggtagttaaagatcgagccctgacctaatcggttatgttatctacagattacagacattgtatagaaaagcactttgaaaatccctgtcctgttctgttccattctaattactggtgcatgcagccttcagtcacttactccctgcttgctcaatcgatcacgaccctctcatggaaacccccttagagttgtaagcccttaagagggataggaattgctcactcagggagctcagtttttgagacgtgagtcttgccaatgctcccggccgaataaagcccttccttcttcaaaaaaaaaaaaaaaaaaaa

SEQ ID NO: 60690 - DNA, 419 bp, Homo Sapiens
  misc_feature (2)..(2): n is a, c, g, or t
  misc_feature (391)..(391): n is a, c, g, or t
  misc_feature (397)..(397): n is a, c, g, or t
  misc_feature (416)..(416): n is a, c, g, or t
anatggatattagttctttattgagaatcagaaatattttaaatttactaaattcagaggtagtcatggcctctccccaataaactttacagtcttagacaatttgtgcattttaataaattcttagttatagtattaaagaaagtggctgggcgcgggggctcacgcctggtaatcccaggcactttgggaggtccagggcagaggcagggcagatcatgaggtcaggagatcgagaccatcctgggctaacacggtgaaaccccgtctctactacaaacacaaaaaaattaggccgggcgtgggagacagggcaccggtaggtcccgggtacttcggggagggctgaggacagggaggaattgctttgaacccggggaggccaaggttncagttnaggcccgagattcacgggnact

SEQ ID NO: 60691 - DNA, 936 bp, Homo Sapiens
ggcacgagggttcctgtgggcgcgagtcgcgggatgaagaagctgctccaggagaagttccccaacatgagccgcctgcaggacatcagcgagctgctggccacgggcgcggggctgtcggagagcgaggcagagcctgacggcgaccacaacatcacagagctgcctcaggctgtcgctggccgtggcaacatgcgggcccagcagagtgcagtgcggctcaccgagatcggcccgcggatgacactgcagctcatcaaggtccaggagggcgtcggggagggcaaagtgatgttccacagttttgtgagcaagacggaggaggagctgcaggccatcctggaagccaaggagaagaagctgcggctgaaggcgcagaggcaggcccagcaggcccagaatgtgcagcgcaagcaggagcagcgggaggcccacagaaagaagagcctggagggcatgaagaaggcacgggtcgggggtagtgatgaagaggcctctgggatcccttcaaggacggcgagcctggagttgggtgaggacgatgatgaacaggaagatgatgacatcgagtatttctgccaggcggtgggcgaggcgcccagtgaggacctgttccccgaggccaagcagaaacggcttgccaagtctccagggcggaagcggaagcggtgggaaatggatcgaggcaggggtcgcctttgtgaccagaagtttcccaagaccaaggacaagtcccgggatggtgggcgaggccggggccggggccgcccagggaagagagtggcctgagcccaagccgcaccggagcagcggctggattgaacgccccagattggggcccgagatgtggcccttggtttcctttcataaaggagttgtgtccccagcccttccactccagtaaagaactgaattggcaaaaaaaaaaaaaaaaaa

SEQ ID NO: 60692 - DNA, 1135 bp, Homo Sapiens
ggcacgaggccgatctgggggcttcccgggctcgggtaaccggagtgctggtatctaatcgtcgctcaaaagctcctaggtgcgcgggtggatataattcccggcttctcgagaagacactacagcctcaaggaggtatatcccgtgccttacctgactgggggctctgagtccagttgtgttgtcttcaacttagacaccatggaggcacctccagtcaccatgatgcctgtcactgggggcaccattaacatgatggagtacctgttgcagggaagtgttttagatcacagtttggaaagcctcatccaccgccttcgtggtttgtgtgacaacatggaacctgagactttccttgaccatgagatggtattcctccttaagggccagcaagccagcccatttgttctcagggcccgacgctctatggacagggcaggggcaccctggcatctgcgctacctgggacagccagaaatgggagacaagaaccgccatgccctggtgcgaaactgcgtggacattgccacatctgagaacctcaccgacttcttgatggaaatgggcttccgcatggaccatgagtttgttgctaagggacatttgttccgtaagggcatcatgaagattatggtgtacaagattttccgcatcctggtgccagggaacacagacagcactgaggccttgtcactctcctatctcgtggaattaagtgtggtagcacccgctgggcaggacatggtctctgatgacatgaagaacttcgcagaacagctaaaacctctggttcacctagagaaaatagaccccaagaggctcatgtgactaagaggatctgtccacatttggggcctatccttacttgtttgaaaaaatatgtttgctttttttggtttttgttttgttttgtttttgagacggagtctcgctttgcactccagcctgggtgagaagagcgaaactccgtctcaaaaaaaaataaaaatgaagaggggaaaccagaataaattatcttttggaaaggacaatttcttgtttggccatttgtgtataaggttggtaacattagaggctgtgagcttgtgttacatggtaataaagccaatgaagagacaaaaaaaaaaaaaaaaaa

SEQ ID NO: 60693 - DNA, 414 bp, Homo Sapiens
  misc_feature (210)..(212): n is a, c, g, or t
  misc_feature (217)..(217): n is a, c, g, or t
  misc_feature (221)..(221): n is a, c, g, or t
  misc_feature (225)..(225): n is a, c, g, or t
taaactgaattagttgccaaaaatttaaagatattttatcggaaaaaacagacacccagcttctcataaaaaacaaagtcatgtgacaacattggacccacatggctactgggcaacagagtaactgagtggtcctgccccccttcacccttggcacatgttctccagcttgcaacatccagcaccactccctgcttacctacacctggnnnacttnacanacantgtgttgaactgacctctagaaacatgaattcgatatagcaaccctgggtgtactctagatcccatattttagcgtttatttctatattgtcttgagccatccaagttggtttagcctctctggataggacagagctctggggtcttagggggaggcactggatgtcctgtatcactctcagcctccct

SEQ ID NO: 60694 - DNA, 520 bp, Homo Sapiens
  misc_feature (465)..(465): n is a, c, g, or t
ttaaaaaaaaatccaattatagcacaaatctctcagcaggggtcagtgtggaataagaatagccaaagttaatggacatgacacaggcaagattaatgcctaaagggtttcaaaagttgtgtgatacggatttcattaacattttaattgtaatgtatctttttaatcttctctcaccctaatggatttatatccaaaaaaaaaagaataaactgctgacaacaaaaagtatcaatatacaaaatttaacaaaggcgcttagctgtgcaatggaaatgaaattaaatgagcaaaactctgttaaagctgattttttaacagcacaaaagtcaagaattcagcaaagatggtacttcccctttcttggcacagacaccagctgggtggtagaagggagatgggcacagcccccgaggcagatgcccagggcctgggtgggggccctggccagagggtatgcctcangggtccctgggaggaggaagatgtgggacaacttccttctgctccgatccaaagg

SEQ ID NO: 60695 - DNA, 529 bp, Homo Sapiens
tctctagtttactttatcgtaagaatacagtctatgatatatataaccacgcaatatgtgttgtttatgttattggtaaggcttctgtcaacagtaggctgttagtagttttgggggtcaaaagttatacacaaatttttggctgcataggcaggagtggttaagtttggtaaccccaaacaccaagttgttcaaggaccaactgtatttcaggcaaacatacattaagcccgcactaagggcaagatgtggttcctgtgcacactgtgggggaaaccaaggaaccacacaagaacttgctctcaaagggacttacaaatcaaaggcaacttcccctactcctcagcagccccaggcaatggtgagaccaaatgatctctctagaaccagccagcactatgtgcatggagagccagcatgctcctccacaccagatttgcttaactttgtgataagatgttgagtggaccggccaagctcatgaggtcccttcctgggccactgggtcatctgagaatgccccttccct

SEQ ID NO: 60696 - DNA, 543 bp, Homo Sapiens
gttacatgacgagatgtgcttttattaacctctttgttagtttcatcaatcgagaagagaggggagggtatgcaaaataaaaatgttagaaaatgggccacactttacaaattgagattatgtctccagttaaatgagttcccctattgctgtgtaattcacaagaaattctccaagagggagttaccaattcaacacatatttacccatgacttccacggtggctcttctgtaaggaaatgcttgaacccaaagagagaacatgcagatcataatcagttcatatttataatcttgggctggaggcaaatgcatacagtttaccaaatatgaaaaggtgaggtgggcaaagggaaatgcccttgagatcccaattcctctggccaacgaaagacaaccaaggtttacttccagaacatcatggggtgaatgaatgatgcacagtgaacacctgcctcgtggccgacataaaatggcttttgccagataaccgacatcatgtctggcaagggaacccggcagggtgaaaaatgccacacagct

SEQ ID NO: 60697 - DNA, 524 bp, Homo Sapiens
tttaactttacttttctctttccttttccgtttctagcggccagacctttgcccagccctgcccgtttattgccgggtacttgctggaaggggacagaagataagactcggggtgactcccaaggcctgaagggggctgattgggccgggggctcccagaggataaacctaggggccggtcggtcttcctcggcgtggaagtgagagccacgcggcgtggcggagctccaccaccgtctccttatctctttaaagcctcaaaatcaaacaaaaccactactacccaggcctcaagtttccacagtttttgtctgctctggaccgtttactttttttgaaaaaagagaacttggtggaatccaaattctctactaggcctccgaaccaaaacgaaggaaaatccgttttcttcttgggcttcagagaactgggatcgaagtgattgacttcctgctccttttgtctgctccaggggcctggttaggtgcccttctggatgggagagcaaaaggttctccatcctg

SEQ ID NO: 60698 - DNA, 295 bp, Homo Sapiens
tggtagcacaaaaggagccatagacaatacataaagaaatgggagtgactgtgtttcaacaaaactttatttacaaaaacaggcagcaggctagatttggttcacaggctgtagcttgccaaccactagtctaatataaccttttagtacagttttccagcagttcacacacccccaaagacatcaacaaaaaacagattaagaccccctgatttagtagaagaaactcatgccaacatacagttacagtgatataacaggtgctataaatagaaacatttcaaaagtgctatgg

SEQ ID NO: 60699 - DNA, 531 bp, Homo Sapiens
tttttttttttgtttttctgaatattttctatctgtggctggatggaatcacggatgtgcaactcacggatatgaagggcagactgtataccttgtcaggcacctttttctttccattgtatcccatgggggaaatggatggcagattggtggaggtggctagaattgtaaagaaaaacatgaaattcacatgaaggctggagtcactcacatgacaacaacagctcatggggctcaactctactgcccttgcgtctgtcacacagttgaggtcttggaatgaactacgtatgccatccttgttatcaaatatttgagaacaattagctttgctggcaaaaaatgacttacattgagaattctaggaatgccttgtaggtattctttttcaagtgaattttatgtttcttttttatgatttcattgatttatgggtggatgtattgctgatgatcattggggaaggggtctgcagggaattaaagacaaaaacgtatgctcctactactttaaaagactatgctaaatgca

SEQ ID NO: 60700 - DNA, 608 bp, Homo Sapiens
ttttttttttttttttggttaaaaaaaaaacatatatatatgtgtatatatacatatgtatatatgtacacaaacatataatacttgggaacaataaaatgcataggggtgtgggccttttcacattttaggaagaaaaggtgatccagatggctatctagaaaggcaatgattgagaagggcacccaacaacagcaacaataaaaaaactaccctcaactcctttgcactggttctgtggcttccccaggacagacagagaaatagcctcctggtatgagacaggcccggtgggcacaggcagggctttgagcctcgtaggcatataaaggctaccggtgccaatagagggtctatattccaggcccaaatgccatcaaagcaaaaacaaaatggtgacatcaaaataaaaagagtgctttccacctccagggaacgtcaaagggagcttcaggctaagacaccaagtaccagcagagagggtgcttcaatgcttactgatataaccaaaggtgatgaaaaaaacacatcaaggcatcaaaagcaaggccaaaggagtttttaaaaaatcaaagctcatgaacaactgctaagggcttctaagaaag

SEQ ID NO: 60701 - DNA, 1606 bp, Homo Sapiens; identical to SEQ ID NO: 23556

SEQ ID NO: 60702 - DNA, 432 bp, Homo Sapiens
gtttaagagttttgtattatgtcatacaaactgtcttcacatacaagtgcattaaaaaaattatccccccctcctcctccccaaacatcacagtagaccaattcttgctaatatatgacaaagttaaaacatatgtcccctctgaattctaaacagctaattctagacactaacatctggatcttataatttaccggtctggtatggacatgaacagttccagtgcctttcaacttatccctgaatttttctcttctcaaagttctaggcagtaattttaatgccctcaaattagataaagctgattacttagagcttataaattagctacactttatgacactaagaatagagctatgacttatgcatatcatacctgtcaagctacctagcaccacgaataggactaatattaatggatggactaataca

SEQ ID NO: 60703 - DNA, 479 bp, Homo Sapiens
taagtggaagcaaaaggaaggagaaaacaagagacataaacaaagttaaacaaatattccattctaatgtataaaagtcctgtctatacttgaagtcacagggaaggtgctaatgaagttaaagaaactctgtcacaagcactgtgctttatgtatttattttatgtaatcttcacaaccctgaattcctattttctgacagtgaaacactctgaaaaggttaaatactgccaagtaagtgataaaggggaaatttgaaatcagaactaactaacccaagtcaatattcttccctttcctactaaagagagctacttaaagggcaaaaaaacaaaacaaaacagaactcagaaatagtcgcccaggattttctatcatatttgactactctttgattcttctccactctttaaaatgtaaacattctctaaggttaattccttaattctatgtcctttgttctccatcacagagagaca

SEQ ID NO: 60704 - DNA, 462 bp, Homo Sapiens
cggccgccaactttttttttcatgtagtgaattctgtggattctgtattccctgcagcagttgccccagggtctttttaatttttatttttaaagtttttattctacatctggcttcctacttggcatacctgggtcagtattatttagtggtcagccagtgatttgttgtaagatttccctaaatctcttgcctgtacatctcccaccctttgtcaaagtgatttgtgtgtgaaggcatgccttcaaagttcagaaaatgacagccttagttttcatttcctgcttacgcagggcttcatggtgaagcagaagggagctgattatttgaatgaggtgttttcctttctaggaatttgcaaagtcttctagatccccaaaaatatgttgtagcttttcaaagctgcgtatgttttccagttttctaagaattcctcttatattttgatcaggatcttgtttc

SEQ ID NO: 60705 - DNA, 495 bp, Homo Sapiens
  misc_feature (241)..(242): n is a, c, g, or t
  misc_feature (423)..(423): n is a, c, g, or t
  misc_feature (429)..(429): n is a, c, g, or t
  misc_feature (472)..(472): n is a, c, g, or t
ttttttttttttttttttttttgcctaataacatttcatttattacaggactaaaagttcattattgtttgtaaaggatgaattcataacctctgcagagttatagttcacacacagttgatttccatttataaaggcagaaagtccttgttttctctaaatgtcaagctttgactgaaaactcccgtttttccagtcactggagtgtgtgcgtatgaaagaaaatctttagcaattagannggagagaagggaaatagtacttgaaatgtaggtttttttttttttttttttgacaggttctttctctgtcactcaggctggagtgtagtggcacagtcacagctcactgcagccttaccttctgggctcaagtgatccttccacctcagcctcctgagtagctgggactacaggtatgtgncactanaactgactaatttttaatttttttatagaggcacaggatcccnctatattaccccaggctggtctt

SEQ ID NO: 60706 - DNA, 456 bp, Homo Sapiens
tttttttttttttttttcagggcagaagagggtgaaataagttggactcttgtttttattctcaaatgctccctggaaacatactttggggaatctgtttttaaagtgagcttatgtcacataggcttgatactgtctagaaaaatctcttcaggtgagggtggggcctcaactaagagtgcaggcccgaagagcctcccaaaggaaacttctagaatcaggctgtgggctgtgactctcctcagcaaagccacgcagaggtaaggtgcttcaattcagggacttacaaaagggcctccctgctctgctcagatggggaaaagttgatgatggtttttttttgttttttaaaaaaacaccttcttgccactttcatttcccttagcattttatttatatccacaatgttgttcttgaaaaacagataggtaaccaaaaaggaaaaacagagctgca

SEQ ID NO: 60707 - DNA, 513 bp, Homo Sapiens
  misc_feature (510)..(510): n is a, c, g, or t
tttttttttttttttttgagacgaggtttcaccgtgttgccaaggcttggaccgagggatccaccggccctcggcctcccaaaagtgcggggatgacaggcgcgagcctaccgcgcccggaccccccctttccccttcccccgcttgtcttcccgacagacagtttcacggcagagcgtttggctggcgtgcttaaactcattctaaatagaaatttgggacgtcagcttctggcctcacggactctgagccgaggagtcccctggtctgtctatcacaggaccgtacacgtaaggaggagaaaaatcgtaacgttcaaagtcagtcattttgtgatacagaaatacacggattcacccaaaacacagaaagcagtcttttagaaatggccttagccctggtgtccgtgccggtgattcttttcggtttggaccttgactgagaggattcccagtcggtctctcgtctctggacggaagttccagatgatccgatgggtgggggacttangct

SEQ ID NO: 60708 - DNA, 554 bp, Homo Sapiens
ctcgggcgactctagaggaccccgaacatgtcgatgctccataccagtactttacttctatttttcatctgtcctttgtttttctgtttctttcttccttttttatttccaaacatttgtgcgcagcaagcttaatgaattccttttgattattcatctctgaagaagtgctggttgtccagaacctgatatttgtaggaggtttatgcagaaggccagagtgcctccagttctggactgacaactttttcgtgattcagagatttacctaagagacagtttagcattttacttctcaacagccaatgcagacaggcagtctggaggtttttcacaatgcagtcatctcctccccaactgctatagagatagacacatattacttcctgcaaaaatggcttgtttatgtgactccttgtttggcttcatttccccgacttcttagaattaaaccaggtgcaggaaagctcctgccttgagctgaagaaacccacttcacttttgtaaaccaggggtttaggttttatacctcaggggggacttcgagtttcatg

SEQ ID NO: 60709 - DNA, 455 bp, Homo Sapiens
ttctgatgctggtctaataagccttccttttctccaataaagcctattccttaactggtgctatgtgtaaaattgtggaattcatcctgagggctgaagaaaacaggtggaaaccgagtagggatctaccttgaaggacaacataagcttccagggcaagaatatgtgttcacaaatatatacaaagtactctgaagagtactaccttcagcaggcactccaccaatatgtgttgaataaatgaataagaactatttcacaccatataaaatgaactacacatgccttaaaggattaaacatacaaggcaaaactatgaaacagaagaaaatggtggggacatttttgtggtctcaggatagaaaaagatttcttaaataaaattccaagaacataaccgtaaggagaaaaatctgattacataaaaatcaagatttatgttcaacagacaggct

SEQ ID NO: 60710 - DNA, 544 bp, Homo Sapiens
  misc_feature (497)..(497): n is a, c, g, or t
gttttataattttttgtttaatcaatttgaaataactgctgatccaatcaaattatctttaagtaacaaagatatcaatctgatttcaatattagattagtacattagctaccaatattgactcaaatgattattacataaaatcttaggaagtcaatgaaaatagcaattacccatgataaatattttcaaatatttcctattgcgtaatttgtccatttgaatacaaataaatccttgtacaagtatgggagaatcaaatgcagataaacctatgaagggaagaattttctaatttatctacaggatttttcttcaatttaaaaaaagattgtaaaatacacataaaatttaccatttttaagtgtaccatttaagaacagtattaaatacatccttaatgtgccaccatcaccactatccagctccataactcatcctgtaaaactgcataacgtcctcaaggttcattcatgctgtagccagtgtcagaattntcttccttgaagtggaataatattccattgcatggatatactacatt

SEQ ID NO: 60711 - DNA, 538 bp, Homo Sapiens
  misc_feature (452)..(452): n is a, c, g, or t
  misc_feature (507)..(507): n is a, c, g, or t
  misc_feature (522)..(522): n is a, c, g, or t
caattaaaactgaaggaccaaagaaacccaaggaattagattcatgatgctacttgttctgcttctatcaccatcaaacattaggtaaaataattcttctttgccttcaccttgtccattttctggaggaagggacataggtttgatacaacgaatcaaaaaaacaaaaaagatcctcggggtatttatgcagtataataaagagcaaagcaatgtaattccaaaaagatagctctcaaatatttgaaaaaaaatcactaaatcctaaaacttctcttggaaacaatttccatgtctcaagaccattacattggttacccttgtaagaattttcttaggaatagtttaaaatggttactttgataatacaaaagatctcacactatagaactgctgaatggactcacaaatcacttatacttttaaagtctaaccatcccaatgtacactcngaaaggaaataaatctggacattccaaaaatattcctttaccttttatagtatcnacattttaaaatatnatccaaaataatatcc

SEQ ID NO: 60712 - DNA, 454 bp, Homo Sapiens
ttgagacagccttgctgtgttgcccaggctggagtgcagtggtgcgatcttggctcactgcaacctccgcctcctaggttcatgcaattctcctgcctcagcctcctgagaagctgagattacaggcgtctgcaaccatgcctggctaattttttttttttttgtattgttagtagagacagggtttcgccatgttgaccaggctggtctcaaactcttgacctcaagtgatccacctgccttggcctcccaacagctggcattacaggcgtgagccaccgtgcccggctgagttatgtaaactttaaaacacacacacagacacacatacacacacacacacaccttttataaggaagcatgcgtgttcaggacacacatcaaacacatcacagtgggtatctgtgaggaggcatttgggagctaaagaccaataaaggggaaaaaataaatc

SEQ ID NO: 60713 - DNA, 450 bp, Homo Sapiens
tttttttttttttttttttaacagagggcagaaattttattaaaccagcaaaaattcttatcatacagctaatatagaaggataacaataaaataaaatatatagaattttagggggtcgtaagtgctatagaaaaaacgaagcaggaaagatagagaaggcatgctcagtgcaaaatggggctaggatgtagggttttaaatttcagtagggtgtcaggtgaaggcattccgcctgcagcccaagaggcctcatagaatgctttgtcgtgcagtgatgatgaaggaatccaaactgacgaacatccagcagcgccacatcatggacatcatgaaaagtaaggggcagtccacagaggcttcctggacagagggatctggggccacacttttaatgcttctccatgttaagggagagaggacctcatataaaaaaaacaaagacagccgg

SEQ ID NO: 60714 - DNA, 836 bp, Homo Sapiens
gctgggctgcaacggttccaggacacaagtcagtacgtgtgtgcagagctgcaggccctggaacaggagcagaggcagatagatgggcgggcggctgaggtggagatgcagctgaggagcctcatggagtcaggtgccaacaagctgcaggaggaggtgctgatccaggagtggttcaccctggtcaacaagaagaacgctctcatccggaggcaggaccagctgcagctgctcatggaggagcaggacttggagcgaaggttcgagctgctgagccgcgagctgcgggccatgctggccatcgaagactggcagaaaacgtccgctcagcagcaccgagagcagctcctactggaggagctggtgtcgctggtgaaccagcgcgatgagctagtccgggacctggaccacaagtagcggatcgccctggaggaggacgagcgcctggagcgcggctggaacagcggcgccgcaagctgagccggcagttgagccggcgggagcgctgcgtgctgagctgagggccgcggccgggtggcccataacttctcgcgtcccggcgtcgcgcgccgggctgcgctgcggacgaccggcgtccggagccgcgcgcgtgtccgctagggggccgcggcgcccttcccgtatgggcagggggatcccgacccaggggggcggcgcgattattggcccggggggttgcgcgctcggggggtggggtccccgaaggaggcgggccggcgctcgggggggggcggggttacgccggtggtgcccggctcaggaaatgcggccaacacacaccggtttgggggccgagaattgggcggcagtctagg

SEQ ID NO: 60715 - DNA, 553 bp, Homo Sapiens
ttctttcaaggcattttttattgtgttttcaattggcaaaatgttaataaatcaaggactgaagataaacaaaaggcaaatgagataaaattaaatcatgttccattgtttaaacaaaaaggcaagcttatgccaacactaacagaaacactaatatgtttacagtcacacttctgtctgtaattacatgccatgtcaactatcatggtgggacaacagtattgaaaaagaaatcttttgaaaaaattgaacaaaagaaaccatgtgagcccacggacaatcacaagatctttatcctaaaaaaaaaaaatttgtcctttgaaaattctatagaccataacaaaagcatagcttatgatagttttcatgggaggaaataggtctaagggattaaggaaacaatgtgacagagttttaagatatctatatagttatgtatcttaatggatgcctatgacccttgcgttcacctcaggcctctgcattttctataggaaaataataataatctatttaagaggacttaactaatgacaacacatttctaaaatgg

SEQ ID NO: 60716 - DNA, 523 bp, Homo Sapiens
tttttttttttttttttgcttaaaatttttcttaaatttaatataaaaaaatgtggctttatgttaaaactttaggaaaaatatgcatatatttcatcaggttaaaagtttacgagaatatgaatatatatgaaaatgatattaaaatttggaatataaactgtgtttttcataaccaaatcatagaaaatttatggtagtatatgtataaactgtaatacgaagcaagataaatggaactataaaatgtagttttaaatttattaacggagtatgttttgttaacatactacagaatcacaaacgtttaaatagtttcattataatgccagaaaatgaaggctaactggcacaatttgggtacaatccttattgatgttttatgttactacaaacaacagcatcaactaaatgaatacatataacaacacattcacaataatgcttcaagctatcttaaataatagcaccacagaaaagatcaacaccagtggataacacctgtctaaaataaatgttaata

SEQ ID NO: 60717 - DNA, 256 bp, Homo Sapiens
cttttataaagtcaaggacgtttatttcctgaggtcatgacacaggaagtggaatcctagccacggctgcggacgtctcgtgatgaaggccagagtgctgactgacatgccgggtggaccaggagctggagtctgttatcttagcacgaatgctcatgaccttggtttagtgttaaacagtggagcaggtcctgagcgggcacggccaggcctggaggagcggccgcacacacagccaggcgctaggctccctgcg

SEQ ID NO: 60718 - DNA, 3234 bp, Homo Sapiens
gctgctaggatggagcaggttgcggagggagcaagggtgaccgcagtccctgtgtcagctgccgacagcactgaggagttggccgaagtcgaagaaggagttggagtagtgggcgaagataatgacgcagccgcgagaggagcggaggcctttggcgacagtgaggaggacggagaggatgtgttcgaggtggagaagatcctggacatgaagaccgaggggggtaaagttctttacaaagttcgctggaaaggctatacatcggatgatgatacctgggagcccgagattcacctggaggactgtaaagaagtgcttcttgaatttaggaagaaaattgcagagaacaaagccaaagcagtcaggaaggatattcagagactatccttaaataacgacatatttgaggcgaactctgatagcgatcagcaaagtgagacaaaagaagatacttccccaaagaagaaaaagaaaaaattgaggcagagagaagagaaaagcccagatgatctgaaaaagaaaaaagcaaaggccgggaagctaaaagacaagtccaaaccagacctggagagctccttggaaagtttagtttttgatttaaggacaaagaaaagaatttctgaagccaaagaagaactaaaggagtccaaaaagcccaaaaaagatgaagtaaaagaaacaaaagaattaaagaaagttaaaaagggtgaaataagagatttaaagacgaaaacaagagaagatcccaaagaaaatagaaaaacaaaaaaagaaaaatttgtcgaatcccaggtggaatctgaatcaagtgtacttaatgattctccctttccagaggatgacagtgaagggctacattccgacagcagagaagagaaacaaaacactaaaagtgcaagagagagagcagggcaggacatggggctggagcatggctttgagaagcccctagacagtgccatgagtgctgaggaggataccgatgtcagaggcaggaggaaaaagaagaccccgagaaaggctgaggacactagagagaacaggaagctagagaacaagaacgctttcttagagaagaaaactgtgcctaaaaagcagaggaatcaagacagaagcaaaagtgctgcagagttagagaagctgatgcctgtatctgcccaaacgccaaagggccggaggttgagcggggaagagagaggcctctggtccacggactcagccgaggaggacaaagaaaccaaaagaaatgaatccaaagaaaaatatcagaaaaggcatgattctgacaaggaagaaaaaggcagaaaagagccaaaaggattaaagacacttaaggaaatcagaaatgcatttgatttatttaaattaactccagaagaaaaaaatgatgtttctgagaataatcggaaaagggaagaaataccactggattttaaaaccatagacgatcacaaaaccaaggaaaacaaacagtcacttaaagaaaggagaaacaccagagacgaaacggatacttgggcatacattgctgcagaaggtgatcaggaggttttagacagcgtgtgccaagcagatgagaattcagatggcaggcagcagattctgagtttgggcatggacctgcagttggaatggatgaagttggaagatttccaaaagcaccttgatgggaaagatgagaattttgctgcaacagatgcaattccaagtaatgtgttaagggatgctgtgaaaaatggggattatattactgtaaaagttgcacttaattcaaatgaagaatataacctggaccaagaggattccagtggaatgacactggtgatgcttgccgccgccggagggcaggacgacctcctgcgactcctcatcacaaaaggcgcgaaagtgaacggtcggcagaagaacgggaccaccgccctcattcatgctgcagagaagaactttttaacaacagtggctattcttttggaagcaggagcttttgtaaatgtccagcaaagcaatggtgagactgcactgatgaaggcctgtaaaagaggaaattcagacatcgtacgactcgtaattgaatgtggagctgactgcaatattttgtcaaagcaccagaatagtgccctgcactttgcgaagcagtctaacaatgtgcttgtgtacgacttgctgaagaaccatttagagacactttcaagagtagcagaagagacaataaaggattactttgaagctcgccttgctctgctagaaccagtttttccaatcgcatgtcatcgactctgtgagggtccagatttttcaacagatttcaattacaaacccccacagaacataccagaaggctctggcatcctgctgtttatcttccatgcaaactttttgggtaaagaagttattgctcggctctgtggaccgtgtagtgtacaagctgtagttctgaatgataaatttcagcttcctgtttttctggacagtcattttgtttactcattcagccctgttgcaggtcccaataaactcttcataaggttgacagaagcaccctctgccaaggttaagttgctaataggtgcatacagagtgcagctgcagtgaccaaacagaagggactgggcggagttctcttcagaccgattcctatactctctttgacagcagtttggaattcttctagcacatctatgtaaagttttgtctgtaaacctcttgcagttaagcctgttgtctgttgtagtctgtaagatgcgacatagctgtgtctgtgccagtatgccggaatctcagtgcagtgtccagactgcgtatttcagtttttccacaatgtggatagtacatatgaggattatttaagaaaattaaagacttcactttcttttttctggagacggagtttcgctcttgttgcccaggctggagtgcaatggtgcgatctcggctcgctgcaagctctgcctcctgggttcaagtgattctcctgcctcagcctcctgagtagctgggattacagacacccgccatggcacccagctaattttgtatttttagtagagatggggtttatccatgttggtcaggctggtcttgaactcctgacctcaggtgatccgcccgcctcggcctcccaaagtgcttggattacaggcatgagccaccgcacccagcaagagttattttcttaacttgaaattttctactagccctggtgaacttctgtgcttaaaaaaaaaaaaaaaaaaa

SEQ ID NO: 60719 - DNA, 497 bp, Homo Sapiens
  misc_feature (342)..(342): n is a, c, g, or t
  misc_feature (375)..(375): n is a, c, g, or t
  misc_feature (420)..(420): n is a, c, g, or t
  misc_feature (450)..(450): n is a, c, g, or t
  misc_feature (457)..(457): n is a, c, g, or t
  misc_feature (472)..(472): n is a, c, g, or t
ttttttttagcaacaggctctgcctaaatatctcaagaaaatactttaaagaacaaaaatcttcatgccaaattagcaagatacaggaaaaaaggtaagtgggcaaaatacagggaaaaaaagctaattcaccctgacagttgttacacaaagctgagagagtctttccctctcacatttacaaagtccagggagcggaaagactttcagcaggagtaagccatgagggtttgggacaaggctggtaggggaaaatgttatctcctggggcatactgggaagctgaggagtccagggcaggtgaatggggttggagatgggaatgagggaggacagcatctnaggcagtaaatcctgggaactaggagttaggcntattcaaggcagggctattcttatggcaccccaaggttaagtttntgggctggggaggaagccaggttgggcaanttaaggntgttgaaattagggntcccaaggggaccagttcccagttt

SEQ ID NO: 60720 - DNA, 392 bp, Homo Sapiens
ttttttttttttttttttttttttttccaaacaacttttgtcattaacatttatttcaattaaaaaaatgtgaatccagaattaatgtaaggggaaatattaaagtatctggcgaaaaaaatgctattaaaagtttaagtaaaatgtttgcggtcccagggctatgtttaacaaacaaacattaacaaaattaaaaacacattctttttttgttttaaattgaaatggagtcttgctctgtcacccaggctaggagcgcagtggcatgatctaagttcactgaaacctttgccacccgggttcaaacaatttttgtgcctaagcctcccgagtagctgggactacaggtgtatgccaccatgcctggctaatctttttgtatttttagtaaa

SEQ ID NO: 60721 - DNA, 450 bp, Homo Sapiens
tttttttttttttttagctcatctgctgttgttagtgtgggcgtattttacgtgtcgcccaagacagttccttttccagtgtggcccagggaagctaaaagattggacacccctgacttagagggttctggagttctggggcccagcattgtcccagcttctgggagcctccctctgtgcccatttgtaaaccttccagactgctcaggaaatccagcgggaagccacagggcacactgggctttggaatcagccagttctgagttcaactgtggcaccactgtctactggggactgtgtgtggatgggctgtggattcaggcaggcatagctcacatttcagccttgctgctcacgaggagacaaacttgggcaagtgtctccacctctctgtgcctcagtcacttttcctctaaaatagaagcagcacaatacctcatccccagcacg

SEQ ID NO: 60722 - DNA, 537 bp, Homo Sapiens
tttttttttttttttttagtcaaacaaaatagataacatccaactgcacctgccactgttaaggacagttactgtattatgaaacttcttgttttacccacacacaaacattcatacatgcatatattagatagaagtgtgacatgtatttcttactataggtcatagtttaaaaattaaaacctaactcaccattccccacatctcctgggcttctcacctccaagcctttgcttacgctaatctctcaggcaggaatgctctctttcagtaatctttgccaatcaaaatcctatcaatccaaaacttaaaaaaaaaaatcttatcaatcccttcaaagactagctaaaattccacttttatgcctttaaagttctgtctcaggttttctcctaatcaaatgcattttctgccttttaaattcagtaatatttggtatatttgtgactcacagatatatttgtgattatagtacaggtatttgtgcacaagtccagctgccctaccacaatataaatcccaaaggttttattcctg

SEQ ID NO: 60723 - DNA, 321 bp, Homo Sapiens
gacgagcaaatggaagtgtatataggaaaacattctgagcacagtaaagcactgcacaagtgacagataatgaaggacacagctttttactgagtttccaacaccagaaactaccaatggtaacaaaaaaaaaaagaatttggcagcaataaattataagccaccatttattccttaacagtaatggccactacttacagagcacttactgtgtgtcagccactgtgataatggctttatcatttaatcttctcaacaatgagaattaaaaccatttaatcttctcaacaatgcttttgaaaaaaaaaaaaaaagtcgacg

SEQ ID NO: 60724 - DNA, 522 bp, Homo Sapiens
  misc_feature (15)..(15): n is a, c, g, or t
  misc_feature (218)..(218): n is a, c, g, or t
  misc_feature (236)..(236): n is a, c, g, or t
  misc_feature (406)..(406): n is a, c, g, or t
  misc_feature (436)..(436): n is a, c, g, or t
  misc_feature (488)..(488): n is a, c, g, or t
  misc_feature (510)..(510): n is a, c, g, or t
gagacagggtctacntttgtcacccaggctggagtgcagtgacacaaacatggctcactgtagccttgacctcccaggctcaagtgatcccctgacttcagcctcccaagtagctgggactacaggcatgtaccaccttgcctggctaatttttgtattttgcagaatgaatttctaaatgaaaatctgttgtcaacagctcagaatccttccatggngtttcactgcttatagcngaattccccaagtgaggttttctagggttttcctacaaaaggggtttgggtcctctatatttccctgcttggggagagctttaacttgggcatctcccaaattcatttgaccgtgacttttcgtttttttgagggaccacatcttgggggactagggaaggcacaatgtnggtaaggtacccgggggcccagtgggtctnggcatccatcacctgggcccctcctgcttgaccccgtccagagtcttatctnggtcgctaaccttgtacatttnggctgcagtccc

SEQ ID NO: 60725 - DNA, 2678 bp, Homo Sapiens
tttttagaaatgtttttttccttgtggtgacatatattcctcttcctggctattggcaggtgatggagttgagaatcatgtacttgacttcttgacgcatggctgacctcagaaacagctccatcctttgcacttgtcttcttcatgtgtcacccaaatagggcttgggtttttactttcacttcatttctgagattaaggtgtaaccaagtagagcatttctttgcttgatacagaaagttactagtctcaaccatggcctgggcataggagatgtcaaaataagtttatttcaaatggcaccatttaaatagggatttttggtgatttctcatcagtggaaagaggatttttgttttgcctttgttttgttttgaaatttaaatcctaatttcaaaacatcaccttgccaccctgacactcctctttttattattagcgtttctcaggcacaaagcctgctgcagctggccctgggtcctggctttcagccagcatctggcagcctaagtgtactgataagtgtgttttctcctgttacatcatgctgaatcctttcccttagccattagcttttatgatgtggtcttcgtaggaaagccaccctggtgccaagcctagcttgtggggaggggtatgtgttccagaaactgctctttgtgttcccttcaatgaggaaacaacatgtgtctacttatgtggcatccaactgcttggagctccacacttccctttcgcgactcaggctctggtgctgttgccaatccttgcttggcaaagactgttcgatcatgtggggtccttatttacaagggaaagctgggccagaaggctagcaattcaggtgttaccgctattgctgtaccttgtgttaggacattgtgtttgtgcatggactgtgcctccaaactcagtagctcctatctaaatataaagtatattagaaacctgaaagtacagaatctcaaccttacagtctttcccttagtcctgtggccttcctaagccagctgttaacgtgttgattccttccacttcccccaagtaggcaggcaacagatatgttgattgtcttagaaagtaatctggttcctctgaactccattgaattccagtttgacgcatactgcctggaaccagactgtttgcttacagctttttaagaaaaatctgccttgtctgcccccattatggttggtcttggtagctcctgggcactgtgggcgtgtaccatgggaaagtgattcaacacagtgaaggtgattgtctcctcaggcctcctgaagccacctgtgcggtgggacttcacgtgtctcggccaaggcgagcatttccacaatgccgtggatgctgcagtcaggccagattgaaccatgaccccatttttcacatgataccaattttgtcttaaaattcactgagaaaaatgagactaaattttttttaaccctcaggagcacctgaagcaaatatttatccgtatttattgaaaattcattttgtttctacttgaagctttaaccccttccattcctgcaagtgtgccttttgagagctcccatggcctagtgacttcactggtcaccttgtccatcttacttaagaattttagtctctccctaccctcttggacagagcttcctgttctcttatttcacaggttatgcagcagagcgggttttgtgttttcattcctatttccacccttcatttggttggtggactccacaacctcaccctaccctacactttgggagcacaaatttggtgttgaaacaagcttaaatttcattttagggcatactgggcttactctcctcccagctgtctgtggattgatttgattttaatgttcgagttttacagcaacagctgaaaaccatgaactattctaggaactgtgttggaactctttaaaataaagaaaagaggaggaggaggaggaagaaagaaaaccaacttaagaagccttgactttggaggacagaaagccaccagccaatggagaacaaagagatgtttccctttcctttctttcaccttgtcattctgggtttccttctgcttcactctttccttcccccttaaaagtggtattcctggttggtctgtctgtctgtccttgtccttgtggtgatcctggcatggtgatatgctccactttgcattatccatggtctcttaccagcgcacaagtcagtggggaggatctaaccacgcctggtggtgaggaagctgaatttccaggcctgcgtcccatgtagcctctccatgaactgcagaaggcatgttctgcatggttaccagtaagtggctccctctcaccgtgttcattgtcaaatgagagcaaactttaggtgttggctccattgtacactctacttgctctgctcccctccctccaaccagggttcatgtcagtgcacaccccatgtgccctggcgaagctggtgctgtgagtgatgtttcccatacaactcagggatgccaggtggcttaccctgagatagtcattttgggcacataacagtgtaggaatgaaacatggatttcattgatatttaaatctgtcaatttcattttttgttaatgttttcccctgatgactttttagcaatttaacaaataaaatggacaattgtcttaactgttttattagcaaaaaaaaaaaaaaaaaa

SEQ ID NO: 60726 - DNA, 596 bp, Homo Sapiens
ttgaatttaggtgacactatagaagagctatgacgtcgcatgcacgcgtacgtaagcttggatcctctagagcggccgcctactactactaaattcgcggccgcgtcgactttttttttttttcaatagtctactgtttttatttgtggaagggttggtcttataggaactattctgccattagcagaagtggaaactcagatttccatattttagaaagtattctaaaggagtgttgagaatggatctgaaatgagactagggatagagaaaccagtcaggatatatagcagccacccacggaaaaggtaatgacagttcacagaacagcagcaatcaagtgcaatgaaagtttgtatttgcaagctccagactcttaaattccaactctgcagtaaaatagctaaaaacagtctgaactaaaatatcaagagtttttggatagagatgtaggttgtggtgagaggggaggcaatgatcttgagtggtattttcctatgaagtgtgagaaggggtcgacgcggccgcgaatttagtagtagtagtcgacccgggaattccggaccggtacctgcaggcgtaccagctatccctat

SEQ ID NO: 60727 - DNA, 532 bp, Homo Sapiens
caaattaattccaaatacttatatctgctacatgaagaacgaagcaagttcagctctcttgctgaaatgttcaaatgctgaggcaaggctgctactacaaatttgtgtaaccaaaaccacagtgctctcaatgctcctagtgttgcattacagcagttagaagagattgagctattttgtttccatggctcattaagctagagttagactggtgtccataatcaaatttactgcacttacccttgcttcttccctatgaagtacagccagaccttagggaaaatctcaactattccaggtccatggtaatttggtccacgaaagaaattaacacacctgaaaaggattaaattatttttccttttcaaaatgatcctcttccttaagcttcctctgtcaattgactgccaaccttatttgctaattcccatccctcatcgggcttcctagcacttcctgctgcaaattagtgtgcagtgaacctgagcctgctctccaaaacacatccagactcttggggctttctgggctt

SEQ ID NO: 60728 - DNA, 186 bp, Homo Sapiens
  misc_feature (116)..(116): n is a, c, g, or t
  misc_feature (177)..(177): n is a, c, g, or t
cctctttaatctaaatgtaatacatggaaattttaggaactggtttgaaatctgccaaaagtagtttttccaaagagtagttcagaccaacccagaactcttgcttcttggcaganaagtaagtaagctagttctgggttaatgttcacaccagggtgatcaggcctgataggagtntgctctgtg

SEQ ID NO: 60729 - DNA, 392 bp, Homo Sapiens
aaaacaacccagtaagaatttattccaaatacatcaatacatttaactcagcttaacaaatctgcttaaaatgggcttttttttttttttaataggaagagagtcaggttgtgaaactagactgtgcttggaggcgatgtattaaatattctgaagcattttctaattgtcagtccttaaaatgtaagaaaatctcaaggggtaaaattggaaaactgggggtgctctctgctgaaagttcaatcaaaagcaactgtaatttcctacaaaggtaactaggtcaactcagcatttgtccctgcttactggaaacaacaaaatctcaacaatcaggccattaacttatcatgtcctatatatagtttcaaaagaaatctaaattcactcttaaa

SEQ ID NO: 60730 - DNA, 570 bp, Homo Sapiens
  misc_feature (60)..(60): n is a, c, g, or t
  misc_feature (279)..(279): n is a, c, g, or t
cagtcagtcaggagcccctgggaaggaaccagcatgtaacatgtatcatcatatggcaanagggacgccagataaggatgctgggatgaggcagaacatcctagatgatcccaggtgggccttaaatgtaatccacaggtagtatccttttaagagagagacaaaagatttgactacaggagaaggcaatgtgatgatggaagcagaaactggagttatgtgctctgaggatggaggaaggagccacgagccttcccacacctagaagctgaaaagagncaaggaaatgaactgatcctccctgctctgagagcctctgtaatgaatgcagccctgtggacccattttagactttaagcatccagaactttcgaatagatttctgtttttttaagagccactaagtttgtggcaatctgttaaaccagctgttacctaagcccttgatcctatgtagtgcgcttcccaaaatgtacaccaccacctttagtagaattgggaagttttagcacatacccatggagggaatcaggaataaaggcagactggtctcccaaaaaaaaaaaaaaa

SEQ ID NO: 60731 - DNA, 778 bp, Homo Sapiens
  misc_feature (650)..(650): n is a, c, g, or t
  misc_feature (733)..(733): n is a, c, g, or t
tttttttatttttttaatatcttttttaatcctattgttcttcctcttttgctcagtaaattttgtatgaaactttaaaaggacttatggcatgtaaacattatttataaagtaagtcatggttataattatttttctcctgcctccttatgtatttatttcagaaatgagccgtcagactgctacagcattacctaccggtacctcgaagtgtccaccatcccagagggtgcctgccctgactggcacaactgcatccaacaatgactttgcgagtctttttgagtgtccagtctgctttgactatgtgttaccgcccattcttcaatgtcagagtggccatcttgtttgtagcaactgtcgcccaaagctcacatgttgtccaacttgccggggccctttgggatccattcgcaacttggctatggagaaagtggctaattcagtacttttcccctgtaaatatgcgtcttctggatgtgaaataactctgccacacacagaaaaagcagaccatgaagagctctgtgagtttaggccttattcctgtccgtgccctggtgcttcctgtaaatggcaaggctctctggatgctgtaatgccccatctgatgcatcagcataagtccattacaaccctacagggagagngatatagttttcttgctacagacattaatctttctggtgctgttgactgggtgatgatgcagtcctgttttggctttcacttncatgtagttctagagaaacaggaaaaatacgatggtcaccagcag

SEQ ID NO: 60732 - DNA, 886 bp, Homo Sapiens
ggacaccattttaaggctcacaaggctgtttggctgcttgtagtcatgttcttcctcaaattttttccatatgtaaaatcaaacttaaatcattagaatacaagtttatgtattctaatgcatgttagaaaattgaataatataggaaacacaaggctgcatgatgaaaagtgcattgttactgtgcagttcacacttttggcttctggctttctttagtttgaacaaacgtccttgtctaccccagtagtcacagatgccatctttgcaacagaaagagtggtggtggcaaaatttctagaactgttcaccacaacaaccaaaaaattccaaaccccagtgttgcccttcctcacaaacccacactgtggaacgttcctataacagacatcactcgggggtccttcccaaacgttcggtgttcccaacggacgcactgcagatgactgctcatacactacttcaatcttaaagggcatcatcaacgacacgcacccaagctttcttttgccacctcaacggttacgctcggcacaaatacattcgcagcggccactgggcagggcgcccatcagtccacagggcgcccaacacgcaatccacccgccagggaggggcaaacacaccatcatcgggcatgcaaacagtggccccacgtcttactagacccccgacgaatgagcaccacgaacgcagcccggacattacgcacgacaacgcgcaccacaacacggtgcacgtcaaccacccagctcatcatcaacaggggaccgattagcaggcagaacttccgcccaacaccagtgcacagacctggcggcacacccacggccccagaaccgagcgcacgctgcccacaccggcacgacagacaccgccacgcaac

SEQ ID NO: 60733 - DNA, 432 bp, Homo Sapiens
aactgaacaagaaatcgtgactaagccactgttatataagggttctctgttatttgcagctggtctgaatcataacttaccccatgtttctcaaattaaacaaactgccagttaagtctccatcaagaagttgttgctggtgagcagcacctgattatgatcctctattcacttcaaggccataaaactttggttcctccaacccatctatcttaacaccatcacaggaaggtaaacgtccccaagctaagaaagctgcattctgtacctgtgttggcagcttgagaaaaatcacaggaagtggccagttaaaaatagaactcactgcttggtgctcttctaatctgtgaccctctcccacgtccatggtacttgcccttcgggttctacggctgtctgtaccagcgcttcctagatgtgcgttcttttttc

SEQ ID NO: 60734 - DNA, 614 bp, Homo Sapiens
  misc_feature (554)..(554): n is a, c, g, or t
  misc_feature (562)..(562): n is a, c, g, or t
  misc_feature (575)..(576): n is a, c, g, or t
  misc_feature (601)..(601): n is a, c, g, or t
ttgacaaaaataataataaattatatttgactcagaaaataaattctgttcagcagagtgacaggagggtccattcattgcattgcacgaggggctctacggaggggtgaggatgggtgcaggatgccacagtgacaagggacatggggtgcgggcccagcagcacaggctgaagttagctgacgcatgcttttggcttttatcccacgggcgggtagtggccggacccctggctgtggcctgtcccaagtgagactgcaactgtccccttcctcctcacgtccgccttgtcttctgtttcttggcttgtctctttgcatcttctgggccgctattgtcagaggctgcctggccgagcgcgccgactccctgtaagccggcttgtcaacttgcagcagcaaaggaatgagcttgtcatggttgtaaccgggccagcagaaccagcagcgtcaatggcagggcaatgtaaggatcctttgtgcgaatgtcctgttcaggcagcttcctcgttgggattaaaaatcaaggtgatgtgtttatggtagcccattgcngttgaaanaactttaaggcannatgtaatcaaactgggatttggggnattttgagtccaa

SEQ ID NO: 60735 - DNA, 468 bp, Homo Sapiens
  misc_feature (43)..(43): n is a, c, g, or t
  misc_feature (383)..(383): n is a, c, g, or t
  misc_feature (404)..(404): n is a, c, g, or t
  misc_feature (429)..(429): n is a, c, g, or t
  misc_feature (465)..(465): n is a, c, g, or t
cgcattagtgacactgcaagtgctcaacagccacatgtcgtanctggcttccacactggacagcacagataaaaaacattccaatcatttcagaaagttctactggatagttttgaattagattatggtaggaagaatgatattaagacaagtatctgtcatattctgcaagttaaccattaaaattcctcccattgtcaaggaagcataatatgtaaaagcaggttaagtacagatcattgcagctgcaaactgagtaagggtaatgagtaaaaactttgaataccaacagcatcctcaatttatgatttggtcagtcctatggcactgacctaagttaaaaaacctacacggaaggcaaggctttcctttttttttaggcngggtctcgctcttgttgggcngggtgggagtgcattgggccggccntcggctcactgcaacctcccattcccgggttcaacnttt

SEQ ID NO: 60736 - DNA, 437 bp, Homo Sapiens
ttttttttttttttttttttttttttttgttctccagatgtcctttatttatattcgtattcataagttctcatactacttctggtctttttagtagctcttttagggctgtagccacagaacggtcattctagtgattctgagcagggtggagaggagtgcagcatccctgggcgggtgggtcagtgaagacacgcccagctcacctgatattctgtgactggttgcagaacacaagtccctctcgaaattgtttaggtttgtggggagatatcgcggctggctggggctggactacgtggcggcgctggaagggatgtcgtctcagcagtgctcgggcgcaggtaggacaggcccgccctgccgcctcccctggtgctattcagaccccttcaccccagaaccctgagggagcggggggcgctgcgggtccgggg

SEQ ID NO: 60737 - DNA, 709 bp, Homo Sapiens
  misc_feature (448)..(448): n is a, c, g, or t
tctagagttgtatatatagaacatcctggagtccaccatgaacggacagttggatctaagtgggaagctaatcatcaaagctcaacttggggaggatattcggcgaattcctattcataatgaagatattacttatgatgaattagtgctaatgatgcaacgagttttcagaggaaaacttctgagtaatgatgaagtaacaataaagtataaagatgaagatggagatcttataacaatttttgatagttctgacctttcctttgcaattcagtgcagtaggatactgaaactgacattatttgttaatggccagccaagaccccttgaatcaagtcaggtgaaatatctccgtcgagaactgatagaacttcgaaataaagtgaatcgtttattggatagcttggaaccacctggagaaccaggaccttccaccaatattcctganaatgatactgtggatggtagggaagaaaagtctgcttctgattcttctggaaaacagtctactcaggttatggcagcaagtatgtctgcttgtgatcctttaaaaaccaagatgaaatcaataaagaatgttatgtcagccgtgtggcttaacagatgatcaggttcagggccaccccatgctcctgcagaagatcgttcaggaacactcgacagcattgcttctgcttcttacagctcacccaaccagcgttcagcccag

SEQ ID NO: 60738 - DNA, 420 bp, Homo Sapiens
gagactgcatagggctcggcgtgggtaaaagcagctcctataagctgtggtctggggtaaaaacagctcactggggcaggagctttactgaatagtaattctgtccatgctgggctccccaggcctggtcagaaggcctgtgtgttttgattccatcctacctccagtaagggaaaaaagatgaatgctctcaaactgaaacctctactggctggtatgtttctttactatctgtacaaaaccaattgcaaatatcaaactattacacaacaaaggaactcaacattaaggggacactgcctaatgataacaaaaacttaagttataattagagtttcagagattagatttagattggggggtttaaggtatttttcttacatcagctggaaacttatggcacccaattatgtgggggga

SEQ ID NO: 60739 - DNA, 527 bp, Homo Sapiens
aaatattaatactccatttcttatttcacttgccagaacagaattttttttttttaattatctacatacaattttaggttagaaaatgagaagtgattcaagggaacaagaaaaagttctggaaattacttaaactcttaaagactttaatattacaaaccagaagcaacatgacaatggtgagaggatgtgctgctgaagacatgtagttggggtagctgggtatccacctggctatcagttcagaaaattagaactgcttcctcccacacagctgcaatcccattcagatggggcgcagagttccatgttaaaaaaaaaaattggaatagcatatttattccagctggggaaggaagataaacttctgactattgggaaataaaagatttcatcagagaccaattggatagggttgaatttattaaaataaaatagttttgcccaatgaaatgtaaaaaagggacagttattgaggaggaaaattgctgttaaacgtttacaagcttatatatttggatataaac

SEQ ID NO: 60740 - DNA, 553 bp, Homo Sapiens
  misc_feature (409)..(409): n is a, c, g, or t
tttttttttttttttttgctagagatgggattttgctatattgcccagggtgatctcaaaggatcctcccaaagctctggcattacaggggtgagctatcacatttggcccacatttattgggcacttaacaatgtgcctggcaaagtgctaaccacttgatatgcattatctcacagaatcttcagaccaaacctatgatgtaagtactgttcacagtatagataagaaaattaaagaaacttgcccaaggccacaaagccactaaggggtgaaccatgattcaaacttaggtttgtctgtcttcagaagttaacttcctaaccactgaatcatatttcatctgttccactaaatacatttttctggggcttagcaatgccagtttatttacctaagattatcaacanacgagtggtaataccaggactcaaactcaagccatcaacactaagtcagtgagatcttcatcaccttacactgccccacaataaccccaacagtaaccctgtatacagtcagctgtattcacaggccctcgtgccgaattcttg

SEQ ID NO: 60741 - DNA, 374 bp, Homo Sapiens
tttttttttgagacagggtctcactctgttgcccaggctatttttaaagggaaatcaggaaataggtaaggtaggaacatcaaaagaagagcaataagctgtgtgcagtggtgcactcctagtcccccagctactcagcaggctgaggcggtaggactgcttgagcataggaatttgaggccagcctgggcaacacagtgagactctcccatctgtttaccaaaaataaataaataaataaataaagaagcagtgtaacccagaaaagggaaaggaactttgcactgctggagaaaaacaaataggaaaatgctgttatcagaacaggaaccaaggctttctgacgaagaagaaaccttggactctgggatgac

SEQ ID NO: 60742 - DNA, 520 bp, Homo Sapiens
  misc_feature (20)..(20): n is a, c, g, or t
  misc_feature (503)..(503): n is a, c, g, or t
tttttttttttttttttggntttgagctttataaaaatggcatcatactgtatgaactgtcttgctttttcatcccacgttgtttctgagaggtgtttgtgatggagcacagggccacggtgcccatgcattcctcaatcatttctccagtcttctgaggatgggcttctgggttgtttgcagccttttgcttgtcccagtctcctagtttctccactccatccgggagcatcacgtttgcaacaggcagggcaggtggtgcatcagatgtccaggacacagtcatttgacacccaagaaaggagggcctggggcctgcatcaggccatggctgagtgggactttgccaggctgtctccgcacccagcgacaggactgtgcgtgctgctgcttcttttgtttcctccacttctgttccctcatccagagagggcggaagagctggaaacagaggctttgtcagggaataaggaagcccacctgtgtggtcccaaatgtcgcangggcaacgctcacacca

SEQ ID NO: 60743 - DNA, 502 bp, Homo Sapiens
actctgtctctctttttttttttttttaaccctctggtgactcataggacatctctctctctttttttaacagccaaatactctttttttgttttgctgcctgtcactcaatataagaatgagagtctgattaatcattagagtctgataaacaaagactctagtttatccagggcattcctgatacaggcttttaaaaatagggagttccttcaatgtattctctgtggttttataactacatgagaactacttgtaccagttccccacaaaaagagaaatatatgtgcattatagtagacctttatttgagtaccacaaggtgcctggcatgtagtacattatctcagagtccatctaaaaatcaaatgggggtacttattatactatttaatggaaaagaaaaataaagctcagaaagaaaagggaaggtgcctaaattcccatacttggagtagatagcagagatggtattaaaacccaggcctatctgatgttatat

SEQ ID NO: 60744 - DNA, 468 bp, Homo Sapiens
tgaggcatacacatctctttatttacaaaatgcggtgaagagaaaatatctagatatttgggtgtaattattccaaacatagaaaacacacaatagaatcaagtgaagggaaagctactgtaacagcttagatactttttaaggagaactgatagtaaatctgggaatgggaaaaaaacacagagctagaatttgtttagcactccgtgcaaaaggcaaaagctgataaaactggagtggacggaggctccgaatgtggccctccgctgctctctctcctgcagtctcatccccggccttagccctgacctctcctccgaagcccctggtgaaggccgcgatggcaaccacctgcaggacggcctccaggccgtgaagggccaggagcgtggcgctgagggcccagtccgcccacaacactagggcctgccaaagcaggaagtgggcagagaggagggcggtgccagc

SEQ ID NO: 60745 - DNA, 685 bp, Homo Sapiens
tgaatttaggtgacactatagaagagctatgacgtcgcatgcacgcgtacgtaagcttggatcctctagagcggccgcctactactactaaattcgcggccgcgtcgacttttttttttttttttttggtagggacagagtctcactatgtttcctaggctggtctcaaactcctggactcaagcaatcctcctgcctcggcctcccaaagtgctgggattacacatataaaccaccatgcccagccaccacagaacttttaataaaagagggaaatcagtactacaggaaaataacacagctgtaactgcaagcatgactgacatttaggtttgggcaacacagccatcaggatcccagcaggaaacagatagcacccccaaactgggtaatttaaggagagtttaagaaagggactatttacaaggtgtgaagggtgtggcacagtcaaaagatagtgcaacctcctgaagctgctatcatctacaggcttggaaagacaaagagggccccatgatatgagccatgccctctgggagagccaacatgacatgatcttgcaggaggaaaccaggaaaataaacacagcaactctactctcctcctgccggtgctatccattgtccaaacccatctagaaaccagtctcaggctcctgagactgagggcagggaaagcaatgaca

SEQ ID NO: 60746 - DNA, 503 bp, Homo Sapiens
tttttttcagcaaatgtacaaaattttttattaaagaattattcacaacagcttaaattggaagttttgcagttatccatcaagagtaaaataaacacatcatagcatatatatacatacatggagcattatcaagcaagaaggataaatggtatacccaagagagctttgatgactctcctaaatatatttctgagtaacagaagccatccagaaaagaatatatattgtttaattctattataaaagttcaaaaataggttaaaaaaagtctatgttattagcaatcagaataataattacttgcagatagagcagatggtaatttaagggaattttattgtgaaatatgtacaatcactttgttaaaattaattaactatatactatttgtgtatttcaataaaaatgcttaataaactatctcatcgttgttatttacatttattaaatagcatttaggcatgggtgaaaaggtttaacttgactggcctgaattgctc

SEQ ID NO: 60747 - DNA, 571 bp, Homo Sapiens
gcatatacatacaggtttatttaaatgattggatctacacttttggaggctatttgaagtatcttatcaaaataaaacgcattttaagcaagaagttaaaaaagcttttcagacccgaaggccatttaatacagtaaatcttacttgggtagtttagcaaacattttttaaaacccacatccaacagattggttagtattagatacacagatttggtttcaaagctgaaatacccctggtggaataaatcttctcatgaaattcagttatattatgccacaaaacagggacacttatctattgacaacttaaatattaactcagtgggctacctggtgatataaataggaaaaaaacagtggtcatggattaggagtgagaagactatgacaccagcctaccttggactgggaccgcaaaggatgttaaaatctatcctagaatttaaaacaggagaaatgtcaaatattccagtctccattcggctcaagccatcgcccaaggaatacacccccaccccagccccacatgaggtttactaaccagctgctacagatgttactatgtcact

SEQ ID NO: 60748 - DNA, 488 bp, Homo Sapiens
taaggtgaagtttcactttgtcacccaggctggagtgcaatggtgcgaaaatggctcactgcaaccttggcctcctggactcaagcgatcctcccacctcagcccccaagtagctgagactacataagcatgccaccatgtccagctaatttttgtattttttggtaaagatggggttttgccatgttgcacaggcctgtacttctaattctataaggattttttgctttactataaaacactaaagacattaagcatttgcacttaattgggtacttcgggaaagaagtgtgtaggttggcattaaaggtacttcttacactgcatgttctgtaaggacagcaaaatacatctatataggttcactgttaaattctcgaggactaatggatccgcatgtgaaaagtaaaaagttcctcttcaaagtttccctttttgttaaagaataaataacaagtgttagaaataacagtttcttttagaaatta

SEQ ID NO: 60749 - DNA, 435 bp, Homo Sapiens
tttttttttacgaaggaataagtaactcgatgagtgaataaatagctagcccatgtcagtttttccaggttttagggactcaatcccatttacaaatttttgttgatatatgttatccacttttaaaattttcttaaatcacatccttttatatagaaaatgtgttttatgccccattatttttgccaaatccttaatttttaatattttgaggtcacattcaaaagaaaatattgtgaaagagatgcaatctttaaatcataattataagcaaattgggagaatacaaattttccacttggggataaaatacaggtaattcattttcaatctgttcatttccagtccactaataaattgttgcccctatctataccttgttcaaggatgggttttctggcatattttgacattaaatttcctctacaattctct

SEQ ID NO: 60750 - DNA, 453 bp, Homo Sapiens
ctgcaagtatatatttcctttttactcaaaaaaatgtatccaacttttgtttaatcagtcatcactcataaatcactaagatataatgaaaactggtatttactaggtggatttttaatttagactattggcaataaagtccttctgtttttatagttaggatgttggaaagaatcagatattttaaagatgatgaaaccaaaggcatcagttctgattttcaaacttttgagtttttttgcagtgaaaactgaaaagtcaaatgatgttttataaagccataaaccaaataaaacagacaagagtggagctgttagggttaaatttcaatgagaagctctaagctgttcagcatatccatatccttagtggcagcttcttaaacatgcctaagaaacctataggcccgatagagcagctgagacactgacctaactcaaatcctcttttttg

SEQ ID NO: 60751 - DNA, 469 bp, Homo Sapiens
  misc_feature (379)..(379): n is a, c, g, or t
actgtgataaaacatacacagtttacaagaatatgaaatgctttactaattcgtgtgtcatccatgctaatcatctctctattgttccaattttagtacaggtgcttttgaagtgggcactcttaattttttgaacattttctaggtttctgataccatactcattctgtgtcttacctatcacaaccccagaatcagccatttctccaaattccttttagtggagagtggtatttagaaaccaggatctggacaccatttctctttttgttattgttgtttgccttgctttaatgatagctctttttattaatttttccattattataaaagatggccaaatacatacatttctatggaaaatgaatcaagtcttatntattttacagttaaaatttcattattcctattttaactgataaaccagtttaattttcaagatgtattaaagtctcccacaattgtattc

SEQ ID NO: 60752 - DNA, 759 bp, Homo Sapiens
  misc_feature (414)..(414): n is a, c, g, or t
gattctaggctcccctgtgacagccgcggcaggaagcaggcgggcgctccccggccacaggcctgtgttctcggaagggagaaagcaggacatttccccacgtaactcccagctctgggcctagagtgcgtgcatggcgaagtccccggagaactctaccctggaggagattctggggcagtatcaacggagtctccggggtgagttgctccaaacctctgtccctagccccgaggtgcccagggcctagtgggcgggagcagaccaggtgcgtttcctaacacctgggttctgccccgtccacgctacagaggagcaagatggatgttgctgtggtcttgaggaggatgaaatagttgatttagtttttacagttaagcaacgatgtttcctcagattcccgtagttacctcnaaatcaactccttgatcttaacttggcatctttctcaaccggcgacagcagaaactctggatagctctatgccattttgttcagttcccatacgttgctatttaatccaagtacaagtctgattcacagttgtttacacattttaaatagcaacaggaacaactaaaaaaacatgttgtgggccgccctgggccaaagaatttttaccaccacccggtggggcgcggcccatagggtgcggacagggcaaacgtccacaggaaaccggccgcgacaggctggtttcccccgaaaacgcggggccgggttgacaccgggctgggcatggcctcacgtcggccattc

SEQ ID NO: 60753 - DNA, 372 bp, Homo Sapiens
ctttcaggtttggacttcttaaccatctttttgtttttctttttcgaactgccatagtcactatcgtcatcatcttccattaggaaatcttcatcgctgccggaatctttctcctggaatggtgcctcatcttcttctttgggagaaggagtcttttcctttgatgcctttgaagctgtggggcgacccactttccctttgcctttcactggacttggcgtcactgtagcctttagtctgggtttgggcatttccttttctttttttccaggttgggacttctaaaccatctttgtgtttttcttttgcaaactgccataagcactatcgacatcatcttccattaggaaatcttcatcgctgccggaatct

SEQ ID NO: 60754 - DNA, 503 bp, Homo Sapiens
tttttttagagaccggggtcttgctaccttgccaaggctgttctcaagctcctggcctcaagtgatccttctgccttggcagttttcaaagtgctgggattacaggcacgagctactgtgcctggccaaaatgaggaagacctttattcaagaaacacaaccaggaatttaaatacaggcaaacctctcaaaacactgctttgcccatagcaagctctcaataataatcattattgtcactacaaatgaagaagaaaacaatggcatattaagaaatagtgctctggttaattatctatttaaaaagttagaatcctaatgccatactgtattcaaaaataaattctatgagaattaaagacataaatgagcaatgtactttaagtgtgctttaattcaatatcatgattaggaaagatacatgaaggtaggaagtagattttttttttaaggcgaagaatggaaaaaaggaaagaaatctaagggaagaagaggtaggaaga

SEQ ID NO: 60755 - DNA, 634 bp, Homo Sapiens
  misc_feature (554)..(554): n is a, c, g, or t
ttgaatttaggtgacactatagaagagctatgacgtcgcatgcacgcgtacgtaagcttggatcctctagagcggccgcctactactactaaattcgcggccgcgtcgacttttttttttttttttttttggatcacagtgtttagcagcctgctatatggtaaatgtcagtaaatgttccacaaactgaatggaattgagctctggaatctagaccatcttttccatacccatcactcctgtcttagttgaagtccttatttcccatttgaagcaatgcaaaggatttcctaactctaatctctcttttcttcacaccatcctttaaacagccgacagaatggtcatcctaaagcacatatatcctatcttacatatcctagattcggaacctctctgggcttctcaccatataagaagaaagtctaacctccttagcaaggtgcataggtcttcaatgggctccacctcacttctctatatatacctatactcttgctacactaaacttctttcttactgttgctggaacaagttcaacgctttcaaacctncctgactttgcatatgcagttcattctgtcaggaatgcccttccctcttatgccctggatattcttattcatttcatatg

SEQ ID NO: 60756 - DNA, 436 bp, Homo Sapiens
tttttttttttttttccctggggaagtgcttttattagcagtaaggctgatcgtacaaaaaattctcagagcttcataggacaaggtagtacaagtatggatgatacaggactgaggaacgggggacggctcaaaagaaatcaacatcgtctggggcatccaggtcccgatattccacaatggcccttggatctccacgaaccatcctgtgaggtgagaggtacaggatgagagctgagggctcccaaaagggagtctgcaggcggcaacaaagcttgggcgtctgccctcctcacctgttgcgaggtttcccaggataacctccctggcctcggaaggcatcatagttccctcgaccagcaccatacggggcatgggggtatggagggcctcctgtggggactgcagggcggacagcaccagctatgacagagat

SEQ ID NO: 60757 - DNA, 459 bp, Homo Sapiens
gctttgacctgacgaatttattgaagagagctctgtccttctcccttctaccgagaagaggcggcttgcagggctggcacctgtccacacctgtcactgggcctttccctgggctaggctgagtgggagcagatgccctcatcctatgtgcagggcctgtgcaggagccatcacaccaccttgttgatgatgacacctagttcttcaatctcacactggacttcatcccccttctgcaacagagcaggccatgacagtgtcagcccttccgtcagacacacatacacaagcctgtacttctcaagtctgaggcaagcctgccaggcctttggggcccttgctctttgcttttcgctaacctaccttgagaaagacaggaggtttcctgaatacaccgacacctgggggggtcccagttaggatgacatccctgggtaaaaggtaacaaactggatcaag

SEQ ID NO: 60758 - DNA, 539 bp, Homo Sapiens
  misc_feature (528)..(528): n is a, c, g, or t
ttgcctgaaatcacaagaatttgctttttaacaatgtccttttactttcttctcaagttgacactgtataaaaatcaatcaagattttcctctttagtacagtctggggccctgcctgttttaaagggccaagcagagatttaagacactccctgcccatcaccctgacttctcagaagagacaggcagaaggaggtttctccatcgctgagcgctcagatgcccactggcccatcttctccctctggagacaacctggtcatgataaccagttatttccaactcctgtaaggcaggctcctctcctctccaccagcctcgctatgaaacactatatgaaacacgcatatctagaaacactcctgagacatctttcaggccatcaggctcaggcatggtcataccttgtcccactacccccaagttataaatcatctcgtgggcacagaggggtctacaccctgctggatcaggctctcgggggagacagcgtgtggagtccagcattcgcagtgagggaggcaccanatgggccagtg

SEQ ID NO: 60759 - DNA, 502 bp, Homo Sapiens
ttttctgagtcaatctattttattgaccaaaagattcctgtggaaacaggaggtgagtgccctaagccctcactccttagcactctgcgtgctgatgtagtcctggagaagcgcctgcgcctccatccgccggctcatcttggtggccttgccctgaaaacggcctttcttccctgctcctttgccttccaggacctcagccaccctgggccccagggtctccacagacgcaggtggccctgccagtaagaagagtccaccacctttctcatcgcccacagttaagaacaggagggtctcctgtgtaatatgaccacacctccccagtctggactgttcctgaggctatgggcaatgtgcacagccaggtctctgagcagattcaggttattcttctgcaggatcttggtggagttctggagctttttcactgcttccacatgatcctctgctccacacttaagcagagcagtcagtgctttttcagttccatgacttctct

SEQ ID NO: 60760 - DNA, 477 bp, Homo Sapiens
  misc_feature (390)..(390): n is a, c, g, or t
  misc_feature (398)..(398): n is a, c, g, or t
  misc_feature (407)..(407): n is a, c, g, or t
  misc_feature (425)..(425): n is a, c, g, or t
  misc_feature (437)..(437): n is a, c, g, or t
  misc_feature (443)..(443): n is a, c, g, or t
  misc_feature (451)..(451): n is a, c, g, or t
  misc_feature (469)..(469): n is a, c, g, or t
cctttttcttttacaaagttaaataccaaaataacattgagtcatttttaatacttagtgttgctggctagactacctattatcaccacaattacatttgctatgaggtttggatgtgggaaaccataatgaaacgtgccgctggcatggagggagtggtaggagacacagaacaggggtgggcaagctatcaaatgctcctgggtgtgaggaggcctcaggggcagccagggcacggggctacttcttgggccacgaggcttctgggcaagtctgggggtgggtacgcaaggaatttctccctgttcttatctgcctaggagggtcaaagggaaggtgaaatccctcttttttaaaaactggggtctttttgactgcccttccatgggngctccccnttaaaaggncaaaatttacaggccgtnggctcacgcccnttaatncccggcantttggggggggccaggtnggagggtt

SEQ ID NO: 60761 - DNA, 280 bp, Homo Sapiens
ttttttttttttttttaaagaaagaaacacacgcgtaattacgcatctccccgcaatccctccagtattcccccaggccgcttctcccgaatgtctgctctccgggtgcggaagaaaatgtcacgggggaacttctcaacccagaaaaggcgaatcggagtagaaatatacgattatcgtggggcgggagacggaaagctcgcccatcttacctgctaagatttctttctacgtctttggtagctttagcttccaattctctgaaacaaacctcgtgccg

SEQ ID NO: 60762 - DNA, 403 bp, Homo Sapiens
  misc_feature (340)..(340): n is a, c, g, or t
taagggataatggtaaaaatttgtgttatttattcagcaatcatttaatgagaccctattgcccataaagagcatttgccagttctatgaatgatgcaaacagcgaacacaatacaagtcaatattgggtgttcaaagagttacacaaatcagaagccatgggagttgaaaaacagatcacttctacaggggataaagttgatggcatttaatcaatttttatggtttacaaaccaaatatttcaggggtcagctagggaaagaagagacattaaataggccaggaaactattctttagagctctagaaaagttatgtaacccagagccacttctctagntgggtcactcacttaacccaagtgagccaaaaaccctaaagcagggagccagccaagtcagga

SEQ ID NO: 60763 - DNA, 525 bp, Homo Sapiens
cattcaccagccatgtgaggacctatacgaaacaccagagatctggtgatgaataagagaagaaatggtttctgcctttgcattacctatagcatccaaagtctaatctgaatcacttaagaatttcagaataccctaaaagtacaaaatttcaatttagaatacaatgaaactcaaaatatactccatgaccttactacaaataaaaaagcacctgtttaatattttctcaaaagtgacataaacatctcccaataaatcatggttttgtgagtttcagttttatgggcttgccagtggttcctcctctgagttagtagttcagcttataacagtacatttgatgttctcttgctttagtctaagtcactgtgaattgaagtcattcaaatgttgaatgggagagatgattcaccttccagtagttttcaaaggttatctgttgctgtttctttcagtaaatgaccaaattatgatcaattacctaacataatagtttcattaaaaataaaaaccataaagcgt

SEQ ID NO: 60764 - DNA, 516 bp, Homo Sapiens
ttttttttttttttcttgattctgtctttatgaaactttgctttaacccaacattgtttaaatcccgacctggtttctcgtgagcttgaagccagggtgcccacactctgcaaaagaagaaaaatgccagtatgagtccttgaggctcagtgttgttgtgcagtccgtggacaggacaatgtcctcatttcaaggtttcatttttggaggaaaaaaaattcctcaggatgcaggatgccctgcatcccataatgggtatgcccccattgaaaccagctctgggagggtgaccaaactaaaaaggaaacagttccaagcagaaggacacatattaccagcagagtcattattactcacagcaattcaggcccagggtctatgtggtgcagggtttctgaaagccggcctatacctgggaaggagggagagaaccagaggcctggatgctgggtggaggttctgtgatttactttgttacaaatttaagaataaaacctgctggatcaggagcttttc

SEQ ID NO: 60765 - DNA, 456 bp, Homo Sapiens
gttttttgttttgttttttttttttttttttagagacagggtctcactctgtcacccaggctggatgcagtggtgtgatcatagctcactgcagccttgaactactgggctcaagagacccttgcacctcagccaatacacagtaatatgttaggctgcaggataatcaaataaaaatttaataggttgtaaatctttaaattcacatcctgttaaatcaggaagcctcttttagatcaaacagtgatgtttctaacatctgtttacttaccattttgaacatgtgcattaaatatttgcttcaagtgttctattgacctaacaaaaaaacgtgcttccttacatacagggagaaaaaaacgagaaagaaaaagaggtatcatttaataggttttaccattatcaatggagacttcttacataaatttctgcataaaaccacctaagaatgttgca

SEQ ID NO: 60766 - DNA, 604 bp, Homo Sapiens
  misc_feature (489)..(489): n is a, c, g, or t
tttattgaacagttttattctgttttagaataaaaactttgctttaatattgtaaggggtactgcaggtataccatgctgccagttattgctggggcacaaaacgccccagtcagtgattcggagggctgggaaaacgcataaactcataatttcagagcaagtagaactagtatttacagttttctttcttgaaattggcccctgccaccccgatgacccccacgccctctccttggagctgaaggagcacctggagctacttgtctcttgttatcatttctgagttgctcattttctggccttgaaactttgtgtacttcagctcgcctgtgctcctgattctctcctgccttttggctggcagatggcaaaggcctggttgatacaggactccttctcccaacagctgctggagcaggtaagtgggctgaagcggtctgcactgcttgttccatggttgggctttttctcaaaaggtctaactganggcttgagcgaccttgagataactgtgtttttagagatcttgtatcctgtgtaaaagcagaaccaaccgcactactctggggtaaggtaccactgtttgatggatctgtccaaag

SEQ ID NO: 60767 - DNA, 403 bp, Homo Sapiens
ttttttttttttttttagggagataattcacaaccataaaattcaccctttcaaagtatacaattcagtggttcctaatacattcaaacagttatacaactatcaccactattccaattccagaacattctcatcatcgcccaaagaaaccacatacctaatagcagtcactccccatcctccctttctcagcccctggcaaccactcccttaagtgaagagtgacaactttcctgggcattgtgctttcagtagtatgtggctttacatgtttccattagaatttttaacaccaaattcaagcagtgagctttgtaactattctgagattatgaaatatccttttatatacaactatttttgtctcaaacatgtttctttatacataaaaaatagatatttc

SEQ ID NO: 60768 - DNA, 421 bp, Homo Sapiens
atcattcatataccaagcattatattttacattcagtagactatcaaatgtcctttaatttcacagacaacaatatgatgcatactgtgtaagagcacacaatagttttgcagtacaattttaaactgtatacaaattggaatatagatgttaaacgctggtgtactgacagtatttttgaattttagataaactgcatacaaaatttacaatgcaaatattagccaatctgaaaacgtcccataatataaaaatgatactttgagatgcaaattttactaaactatataaacatttaaaataatcattaaaaactcaacattagaatttataaagatcagctataaaaatatattggcagtcacttttcttaataaggtaccactcactacattacaaaatagtctctaacataaaattg

SEQ ID NO: 60769 - DNA, 379 bp, Homo Sapiens
tttgataacaattgtggttttattgtgtccaaccaatgcatcaataaatgaacgtgaagcccaagcctgtgtgtgtcctaattccactcacccagccccgggcacctgccccactcacctctggctttgagaaggggcgtgtgtcggtggttgcctggctgcagtgtctcacctaggctaggtgtgcaccttagaagcacaaagcgggcacagttgtgggtaataagcttactctgcaggccgctgggtgtgtgcccaccctcctgagccccgaaagaggacctgtcaaccaagagtatttgcacttcccagaggtgagagggagcaaagtggctggggcgtggcctggcggggagctccctgggctgactgggaaaga

SEQ ID NO: 60770 - DNA, 140167 bp, Homo Sapiens
aagctttggcgccaaatcgggaacacttcaggatccattgagatgatctttgcagagctcacactggtgcagccagagggaggatcctgatttagtagtttctacttcaggtgaggacacgagacacaggtcaagcatccagtgtggcaacgcagttagtttatgtgtgaagtgagtgctggcaggtgctcaggcatgaagcccagctactgagggagggattccactgctatgcagcccagactgcccccatggccaagggcagccagcaggttataattttgaggctttttacaatggcagatttttgaatcacttatttttttctctcttaaaacaatgcatcaagttgaggggctttttgctcattgccacagccttgagaaactcctgttgccgattagttttattttggggcttctctttgctcagagttatctagccctgcaggtggatttgatgagctttactccagggttgaaaggagactagtatttgtgccttatcatttgttaaagcccacctaatgtgggagccgctcagtagccaatcaatatcctggggaaaaaaagccttgtaattggagtctgaagacctagatctaagccctaagctctacgaagtattagctatgtcattaaggcaagtgattaaacctctctgaaactcagtttcctcatatgtcgaaatggtccttggttatatgaacagagagattgccccaaactagcagcagttttaagagagatacccatgagtggagggaggagggatagcattaggagatatacctaatgtaaatgatgagttaatgggcgcagcacaccaacatggcacatgtatacatatgtaacaaacctgcacattgtgcatacgtaccctggaatgtaaagtataataaaaatgaataaattaataaaaattttaaaaagagagattttcgctatctggctaataataaatgggacatgagcagcagctttaagccctcattgtcatttttggaagagaagttgtccaaactttaatagcttttccaacaggtatacaacagcttatctcccttaattatttaagaaaatattttgcaactaactttcctggaggggttggtaaaaattacgctatatgacatgataaatctcataggagtgtccttgatttatttggtcaccgtgccagacattaagctagatgctgaggacactggcactgtcttcaaagactttacagccttgaaagggagagaggcaactacatataaaactgcaatgaagtataataaaactgtgatagactcttccatagggtgccaagagaggcaaacagataatacatacctcctgttgaatgttcacgatcccacctccgaagtagctttgcaaaaaattgaacttgaatttcacaagccagaagaagtggctcatgcctataatcctagctactcaggaggctgaggtgagagggtcgcttgaggccagaagttcaagaccaccctgggcaacatagcaagacttcctctccctggcccctctctaaaagaattttaaaagtcagctaggcatgaatccactccagcctgggcaacagagtgaaatactgcctgtaaagaaaaaataaagcaagaacaagtaactggggcctcacaaatttggatgaagaggaaaacagctgtgagatttaaatgtaaaaataagccacaatcacacagctatatagttgaagaaggagtattttaataatctttggacaactgttgagtatccttcttcgacattacaacaaaatttaagtgattttcttaaaaattagttgtaatatgggatatgaaaccatacgaatgaatattttatacactttgaactgcgttggctatctttactttttaaaatttgtgtacacttatggatactttttaaaatttgtatacatttatgagtacaagtataattttgttatatattgcatagtgatgaagtcaaggcatttggtgtacacatcactgaagtaatgtacatggtacccattaagtaatttctcatcatccacctccttcccatgcccctcaccctttagatcctccactaacattccactctctacttccaagtgcacacattattcagctccctcttataagttagaatatgcagtacttgtctttctgtgtctgcgttgcttcacttaagaaaatggcctctggttgcatccacattgctgcaaaagacatgatttcattctcttttatgtttatataccacattttctttatccaatagtctactggtggacacttaggttgattctatatctttgctattgtgaatagtgctgcaataaatatacaagtgcaggtgcctttttaatataatgatttattttcctttaggtaggtacccagtagtaggatcgttagatagtatggttgttctatttttagttccttgagaaatcttcataccattttccattgaggttgtactaatttacatttcatcaacagtgtataaatgttcccatttctctgcatccttgcattgggctatctttaaaataaaaacatgaaagtactaaaaaaacaaataaatactttgataaatttagggaagaacattccaaacatgacaattaaaatggaacccttttaaatatgaggaaacactttaaacaagagacaaataaaatatcagaaaaaaaattgcagcatatgtggcaaaacagttgacattctctgtacaataaaccattacaaattaatgcagaagaaaatacacattcaaatagaaacacagataaaggatatgactgggcaactgaccaaagaaagaattaaaatggcaaataaacattgaaaatttttcaaattgaataatattctatgaaatacaagttgaaactatgagctaccactttttactcagaataaacaacaggtgaaaaggaatgacaatagtgtgacggtgtggatgtggaaaagtaagaactgtcatatactcttttggggactatattagtttcctattgccactgtgacaatttacccacaacttcatgacttaaagcaacacaaatttattatcttacagttccgaagtcagaagtctaaaatggataagccaggctgtttcttctggaggctccagaggagaatccatttccttaccttctccagcatttagagtcggctctgattcttggctcctgacccctcctttatcactccaacctgtttccctctgactctgaccctcctgcctcccttttttaagaacccttgtgactacactgggcccacccagatagtatgggatagtctccccatctcaaaatccctaacgtaatcatattttcaaagttccttttataacataaggtaacatattcacaggttctggggattcagatgtggacatctttggagaagggggtttattattcagcctgtcatgggagtaaactggtataaactttctggaggaaaatttgacaatatgtatcaacatccttataaggtacatatctttgatccacttattcaacttcagggaatttattctatcagtcaaacaagtgcacaaagaataggacttgtctgcagcattgttttaatagaaaaaacttggaaatgttctaaataaaaagaaaaaaaatttttttttgagccaaggtcttgctctgtcacccatgctggagtgcagttacatgatcatggcttgctgcagctttgatctcctgagttcaagcaattctccttgcctcagcctccagagtagctgaaactgcaggtgagcaccatcatgtccagttgttttaattttttgtagagacggggtctcactatgttgctagtgactaggctggtctcgaactcctaggctcaagtaatctgcccaccttggcctcccaaagtgctgggattacagatgtgagccactgtactcagcccaaagcaaaattttggttaaatatattatacttcattaaaataatagaatatcatatagccattactaatgattttccatatttgttgatatggaaactctccattgttaaatgaaagttccaggtagcaaaagagtttacgtagtatgattccattctgataaatatcaaaatttaaatctaaatatatattaatttaaatctaattaattaatttaaatctaaatatcagaatttaaatctaaatgtagatttgtgtagatttgtgcatatatatatatatattgcataataaataagcaaggctatgcacaaaacttccagtgcaaaatattgctgagtgaaatattgctgagtgacttttcctttctcttgtggaaattgtgagaattgactaggaatatgtgagaagatgaaggtttagccgagttcacaggccatgaatctgcagtgaagagcaagcgaaagcaagatcctggaagatactggcaagtggccggatcacagaatccaggttagaaaggggggaaaaaaaggtcaagagaggtctgacaaatcaggagaaaatgaatggaataacgaaatggaagaatctttctaaagaacataatctcaaattccctgctgctcactttttgtaaaaattaagaaatattcaccaaaaaaaaaaaagtcaggagaatatgaagccactcattttacttctagaagtttttcttacagaaaatcaatcaaggagagagaattgtgtattaatttaattgtttggcctttagaatcatgttccttagagggcatcggtgcgacggcttcaccattctgcacatccacctgagttttaaaacacggtttctactaaacatctggtatcttgtatacaggggatgaatgtggtcttgtttccttctttagctgctggaaaccttagagcaaaaaataaggccacttttgtaactgtgtctgactcagcagcataacttttccgttgtcttccatgtgctatcctgtttttatttttcctttcccttgattgctctctatacatacatttttgagaagttgtttttctttatttttcaaactaattcattcaatactctcctccaggtagagtttataattgtttgtagttgagaaaattggactagaatgaagccttgtggaatccaagaagaattcgttattctttagctgctttcatctccaactgtgttaggcatcctcctaagatggtccccaagatggcagacccctggaatcatctgtacaatttcctctcttttcacaggtaagggattttataaacataataagatttctttcctgtaattgggttacattgaataacaaaggtgaagggattacacagatgtaatgaaggtccctactcacttggctctgagttaatcaaaagggagattatcctaagtgggcctgacctaatcaggtgagctcttgataagagggtgctggccttccctgagagattcaaagcagcacaaatgctctcctgttggatttgtagaaacataatgctatgctgtgaaaagggccacttagggctgcagtcctccagctataagaactgaattctgctgttggggctcagaaaacaatatcccagaatgaaacctcaaacgcagcctggaaagaaaaagttcttctctgacctcctacccttctgtctctcagtcccattctcccctgaggctatccatagaaaccagaactccttttccccaaaggcagccataaacctaaaaatgttactctaactttccctctgccctgtctacgtaaaaactggccataaagaaattatctgacttaccttgtttaactgtggatgataagacccccattccagagagggttctgccctatacccagaaggaaggaatactgcacagagaagccaagaagaatctagacagacaggccttactgagtttcccattcagtttattagcatttgattgtaccttttttgtccaatcccatttcgacacggctgtccataatttgctgaacctaggcataaaaatggaaaattgcccccattctgaaggctcccgtgtttacttacatgttaaataaatttgtatgccttttcttctgtaaataggcttttatgagttgatttttcagcgaaccttcaaggggctaaggggaacattacccttggccactatactgccaacaacctatgagcctggaagaggatcccaagtctcagatgaaaccaggacctcagccaacaccttgatttcagcctcatgagatcctaagcagagggtacagtaaagccacatatggtgcctaaccaaaaaaactatgagataataaagatgtgttttggaagctgctaaactggtgttgatttgttacatagcaattaaaaactaatatacaaacactacggtatttgttttcttcattaattaaacataacgtatcctcacttctgtatccatcagtaaggcaaggttctgtgataaagacctgcctgcattgtacgtctgtatggttcctttccctatcccaaatcttagatgcatattttgattgatgatgattgtccttgatctaagagatgatgtgatatcctgctaccccattcttcaaccccctcagacactgggatcattgtagaatgattcataacattccctgggaccccaacacatggtgttctaacgtttctcagtctacaatacagtagtccctaaatcacatgacaacttttcctattgtagaaaaagtgcacgcagaggcgatgtggtggctgatctgcggcagcagatgaggtcctgtattctgctcctgccccacactgaccagatgcccatttagacaaggtttcccctgcttccactcatagacacagttatctctcagactcaaggtggcctccaagtccttagcatccacttcttgtagaagcagtgccttcccctttgcaggccagtgactttttttagattctcaaacacaaagtgactgatcattcaccttttccttggcctgattgactataggaataccagaatggtggtggagaggggtaaggagttggtgtaatgtttcacacctcaaaggtattcaccaacactaggtcacaagctctatctctctctctttctcacacacacacacacacacacacacacacattctctggaaggtcatctcatcacagatttacagccctgtaatcacccttgaatgaacctcttcgggaggtacttgggaaagcaaggagagaagacagcttgctcattctgtcacatgcattattggatttgggcaattattttaatccccatagtagaaacttgctcatatttccatattggtacaaactcttcagtctacttaagtggatatccaaggaactatttaatttccaatttaatagtattatggggaaaaaagacaataacaaaacaaatttgagtcaaataaatggtctcatatgaatggcatctgcaataccttcaacaactaggcagaagatatatgatgctatcatagttttcttttaaaaaatcaccaaagcagtttcatctttaacaccctacctaagatttctaaatgatagcctatcaaattatatccccattaggtatataatagctcctttcttaccttagataaatatattcttgtttcacaagtttttttaaaaggctttgcttgaaattaaaatctgaccaacaaactagagcagagataattcctcagtgtcaataggcttccttggaaacttacccacatataaccaatgcagcttcactcgtgtatagaatatactgacagagaaaaagaaaatacagatgacattacaatcataaacaccctatttcctgtttttaaaaaaacatgtcttcagaagtgctttttttacaaaaatttattttaagttctgggatacacgtgcagaatgtgcagatttgttccataggtatacatgtgccatggtggtttgctgcacccatcaacctgtcatctaggttttaagccacgcatagattaggtgtttgtcctaatgctctccctcccctttcccccaacccccgacaggccccagtgtgtgatgttctcctccctgtgttcatatgttctcattgttcaactcccacttctgagtgagaacatgtggtgtttggttttctgtttctgtgttagtttgctgagaatgatggcttccagcttcatccatgtcccttcaaaggacatgaactcatccttttttatggctgcatagtattccatggtgtgcatgtgccacattttcgttatccaatctgtcattgacgggcatttgggttggttccaggtctttgctattgtaaatagtgctgcaataaaaatacatgcacatgtgtctttatagtagagtaatttatattcctttgggtatataccaagtaatgggattgctgggtcaaatggtatttctggttctatatccttggggaatcgccacactgtcttccacaatggttgaactaatttacactcccaccaacagtgtaaaagtgttcctatttctccacagcctcgctagcagctgttgtttcctgactttttaataatcaccattctaactggcatgagatggtatctcattgtggttttgatttgcatttctctaatgaccagtgatgatgagcttttttcatttgtttgttggccacataaatgtcttcttttgagaagtgcctgttcatatccttcacccaatttttgatgggatttctcatttgttctttttttcctgtaaatttgtttaagttccttgtagattctggatattagacctttatcagttgggtagactgcaaaaattttctcccattctgtaggttgcctgttcactttaatgatagtttcttttgctgtgcagaagctctttagtttatttagatcccatttgttaattttggcttttgtcacaattgctttttgtgttttagtcatgaagtctttccccatgcctatgtcctaaatggtattgcctaggttttcttctagggtttttatggttttgggttttacaattaattctttaatccatcctgagttaatttttgtataaggtgtaaggaaggggtccaggttcagttttctgcatatgactagccagttttccaaacaccatttattaaataaggaatactttccccattgcttgtttttgtcaggttcgccgaagattggatggttgtagatgtgtggtgttatttctgaggtctctgttctgttccattgttctatatatctgtgttggtaccagtaccatgctgttttggctactgtagccttgtagtatagcatgaggtcaggtagcatgatgcctccagctttgttatttttgcttaggattgtcttggctaaactgactctttttcggctccatatgaaatttaaagtagcttttttctaattctgcaaagaaagtcgatggtagcttgatgggaatagcattgaatctataaattactttgagcagtatggccattttcatgatattgattctttctatccatgaatatggaatttttttccatttgtttgtgtgctctcttatttccttgagcagtgatttgtagttctccttgaaaaggtcactcatgtcccttgtaagttgtattcctacatattatattctctttgtagcaattttgacgtgagttcactcaaaatttggctctctgcttgtctactattggtgtataggaatgcttgtcatttttgcacattgattttttatcctgagactttgctaaagttgcttatcagcttaaggagttttggggctgagacaatagggttttctaaatatactatcatgtcatctgcaaagagagacaatttgacttcctgtcttcctgtttgaatacgctttatttctttctcttgcctgattgccctggccagaacttccaatattatgttgaataagagtggtgagagagggcatccttgtcttctgctggttttcaaagggaatgcttccagcttttgcccattcagtatgatataggctgtgggtttgtcataaatagctcttattattttgagatatgttccatcgatacttagtttattgagagtttttagcatgaagggatgttgaatttcatcaaaggccttttctgcatctatgagataatcttgtggtttttgtcattggttctgtttatgtgatgcattatgtttactgattagcatatgttgaaccagccttgcatctcagggatgaagccgacttgatcgtggtggataagctttttgatgtgctgctcgattcagtttgccagtattttactgaggattttcacatcaatgttcatcagggatattggcctgaaattttctttttttgttgcatctctgccaggttttggtatcaggatgacgctggcctcataaaatgagttagggaggaatctctctttttctattgtttggaatagtttcagaaggaatggtacaagctcctcttagtacctctggtagaatttggctatgaatccgtctggtactgggcttttttgttgttgttggtggtggtggtggaggtggtaggctattaattactgcctcaatttcagaacttgttactgatctattcaaagattcaacttcttcctgatttagtctttggaggttgtgtgtgtccaggaatttatctatttcctctagattttctagtttatttgcacataggtgtttatagtattctctgatggtagtttgtatttctgtggcatcagtggtgatatcccctttatcattttttattgtgtatatttgattcttctctcttttcttctttattagtctagctagcagtctaactattttgttaatcttttcaaaaccccagctcctggattcattgattttttagaagggtttttgtgtctctatctccttcagttctgctctgatcttagttatttcttgtactctgctagcttttgaatttgtttgctcttgcttctctagttcttttaattgtgatgttacggtgtcaatttcagttctttccagctttctgatgtgggcatttagtgctatatatttcccccttaacactggtttagctgtgtcccagagattctggtacattgtctctttgttctcattagtttcagaaaacttctttatttctgtcttaattttgttatttacccagtagtcattcaggagcaagttgtttcaatttccatgtagttgtgcagttttgactgagtttcttaatcctgagttctaatttgattgcactgtggtctgagagactgttatgatttccattcttttgcatttgctaaggagtgttttacttccaattatgtggtcaattttataaagtgctatgtggcactaagaaaaatgtatattgtgttgatttggggtggagagttctgtagatgtctattaggtccacttggtccagagctgagtttgagtcctgaatatccttgttaatttttcttcattaattaattgatctgttcattgatctaatattgacagtggggtgttaaagtcccccattacattacaactgtgtgggagtataagtctctttgtaggcctctaagaacttgttttatgaaactaggtgctcctgtattgggtgcatatatatttaggatagttagctcttcttgttgcattgatccctttaccattatgtaatgccctgaaagtgctttttaaaaaaaaaaaaaaaaaaaaaaaaaaacaaacaaaaaccaggtaaataaggacgtatacacatataaacactaaagcattagcgcaagacttcttaatgtgtgacctttaatttatgtctttctatctagcggaatgagctccaaccttgatagctgaggactaaagcaagaaccaggacagagggaaaaaaaagattttgtgtagcacatagaaggttgtgagagtttctcccaatagaaaagagttcctgctggaattgggatctatcctttcagagtgatcagtattttctgagtctaggataagagctggaattttcctggaggtagatcttccttttgttctagaaggaaccactctgtgagccagtttagtcatagatctataaggctgtttgttgtctgggggaaagtctcatggaaagccccaaaccaataaaatgatattaatgcagatgtttcagagtgacatgttgaacacattttttagtgaagttccttggcatgcaatttttggcaggactaagcctttgggaaaccagaaccaccatgaagctgcttacacattgggccctcctccaggacacctggctaagggcagagaaatcagctagtgctctgcttaccaatccatgagttgctagccttcccagagaaagggcatctttttataatttttacataagctaaggtttctgagagacattatacataccgctaggctatacaagaagaatctgggatctgatctgatctttactgctcactagacaaagactatggaaagagaataaactgggattggtttagaagtacctgaactgtttgattttgttcagtagagagttaaccctgaataacccagacttaaggaaatatatagtcaactgttgagagtgtcttatctaagcagtgggtgagagagaaggagtgggcagaccatatgctatagtggagagtgggagttcccctaaatgaatggatgttcctactgcagcggatcatcctggaataggaaaggaaacatatctaggactgcgaaaggaggctctaggtttgtgaaaaactgaacccagatttcaggtaaggagacaccagcaaagatccatacaagatggcagcaatttgaagatcaaggagagagaaggtcaccatgggatgaacctgggaatggcacaaatagtggacttaaaaatagtcatagatgctgggcgcggtggctcacgcttgtaatcccagcactttgggaggccgaggcgggcggatcacgaggtcaggagatcgagaccatcctggctaacagggtgaaaccccgtctctactaaaaaaaaaatacaaaaaaattagccgggcgtgatggtgggcgcctgtagtcctagctactcgggaggctgaggcaggagaatggcgtgaacccgggaggcggagcttgcagtgagccgagattgcgccactgcactcccgcctgggccacagagcgagactccatctcaaaaaaaaaaaaaaaaaaaaaaaaatagtcatagatattttttgcctacattacaatccattcagtaatctccaagccttcaatgaagttttcttaaaaaccccgactttcatagctatgttttggagaaaaaaaaaagatgtcgggaaacatatgtgcagtgccattgtaagggagaagccactgcaacctgaagaagccagcatctgagagtggagaagcagtttggacccaggtgactggctaaagtggcaaatgcagggaaacattcgcggaatagaagaattaattgaggactctcagaaatactcggtgagggcccactccagtggctcacacctgtaatcccagcactttaggaggccaaggtgggtgaattgcttgagctcagggcaacacagcaaaatcctatctctacaaaaaatacaaaaattaggcacgatagctcacatctgtagtctcagctacttgggaagctgaggtgggagaatcactcaagcctgggagatggaggttgcagtgagccaagactgtgctactatactccaggttgggtgacagagcaagatcctgtgagaaagaaaagggaagggaagggaagggaaaggaaagggaaagggaaagggaaagggaaagggaagggaaagggaagggaagggaagggaaaggaaaggaaaggaagaaagaagggaagggaagggaagagggagggagggaggaaggaaagagggagggaaggaaggaatcaggaaggaagaaagaagggagggagagagggagggaggaggaagggagggaggaaggaaggaaggaaagaaggaaggaaggaacaagggagggaaggaaggaaggaacaaggaagggagggaggaaggaaggaaggagaaaaggagataattgatatgtttaaatataaaaaaatacttcgcaagaggaaccagataacctggactaaaaacaattgttcaagtaggaacttgaattaaattaattggtattaaaggaaatattgatcctggaaggagggctaagtcatggggacatgtgagatactgaggaagaatgaatggctagaagggaaaggaatgtggtattgctgactctgaagtaccacagaaaattttctcttagcccttaaaaggaaaagctgaaagttccagtcttataaagggaaaaacacattgctagttgtaatctcattttcatttcctctctgttatgactgaaatattgattaattataaatactgatgcagaagaatcaatattcagattcaataattaactatttaaaagttaaagtatattcttctaaaacacatgcaaagaccaaaaaaattcaggttttgtacccttaccttttcctttttctttcttactttatttttttattttttatttttttgaggtagggtcttgctctgtcacccagactggagtgcagtggtgagatcacaccctacttcagtcttgacctcctgagctgaaagtgatcctcccacctcagcctcccaagtagttgggaccacaggtgtacaccaccatgcccagctaatttatttttactgttggagagataaagtcttgctatgttgctcaggctggtctcaaactcctggactcaagcaatcttacagcctcggcttcccaaagtgctgggagtacaggcatgagccaccacacctggcctgtactcttttctttatcactcttttggtattgactaggtatctacccattttcctgtcttccggtcatctcaactcagatgcctacaaaaagccaaaactgcctacagttttaaaaataaaattaaaattctacttcagaaaatgctgcactattttattttaaataaaattgcatgttacttcatgatgattagttctaacccaatcagcaaaagtcttcttaaaataataaaatctgaagaaaacaagatgtaaacgcaagaatacttattagaattattaatacataattttcctggaatgctaataatctaaagtaatctaaggaaatgtttatttcatcaacttgtgacttaatctaattacgttgattgaaactgttaaaactgtgccaataaaagaaatatttgtaatgaaatcatgtatttactatttccattgtaactgaacaatgcacagaaaatttccctccaaaacaccactgccaagcactatgggaaccacttgtgtctatttacctacaacatccacgatacaacatccatctacaacatccatttaacataaatcatggatttcagaaaagctaatgtttttaataaatgagaattgattgttaaataagacaacagtaaagccaccgaaaggtatatgcaaattagtccattaagagtatttattgttattttatgtgagcacacagaactagagctaaagttaaagatgtgagtagggcatatatcatttcttcttcacaaagctgacactctatcctgacattaaacaagtaaatgtaacaagttacacaaaagtgtatgagaagcccagatgtgtatagtatggaaagaggcatcagtgaagtgtgggacaacctcaagtgccctgatatatgtgtgaccgaagtccttgaatgagaagggaagaaatatttaaggatataatgtcagattttttccaaatttgctgaaattataaaaacgcatattcaagacattcaacaaatcataagcacaagaaacatgaagaaaactacaccaaggtatactataaccaaattttcagagaaacaatgataaaacaataaatggaaaaactttaaaacaaccaggaggaatggggtgaggcattatatacagagataaagatgatagcaagttgctagccagaaatgactcacgtgagcagacagtggagcaatatctttaaagttctggagggtaaaagaaaagccctgtcaactaggtataattttatatccagtgaagctatcttccaaaaatgaaggcaaatcacattttcatatatacaaaaggtggaataatttatcaccaagatatctgcactataagaaacgtcaaaagtttttcaggtgaaggaaaaattataccagaagtctggacctatatgaaagaatgaagagtcctagaaataataaatatttgtataataacaatattttttcttattaattaaatttatttgaaagataagtgattgtatgaagaaaataataacaatatattgttggggtttataaaatacagagaaataaaaagtgcaaaaacaacagcagaaaaaaaagcaaggggagaaatcgaagtacacagttgtattgttcttatactttacatgacgtggtataacatcactttcaggtagactgtgataagttagagttgtgtatcataaagcctaaggcaactactaaaaacacaataaggatatgtaggtaatgagctaacaaattagataaaatgcaaccattaatttgaaaattaattcaaaataagacagaaaaaaagagagaaaagagaaaaaagagcacatggtacaaataataaaagcaagatggcagatttacacacaaccacatcaactaccacatcaaatttaaacggtataaacatcccaattaaaaggcagggatactttttcctatacggcaaattagacgcttttagcctgcctcaggcataaagattaactctgtgacctttaattcaagaaggaaaatgagaatccaccagaattgtaaaggaaactccagatcctgggaaggcaaatgtgggcaaacagcccctgtgatggcatctggctaataagtgagtgaagccccaccacacaaaagaggcagacagcctccctctgtgactcacctttccaatggggatttgagtaaccaaggccaaaggagagcactttgtttctcccaagccctggagctaacttgggatgaagatggagatgttgtgagggaaagacactgggaaaacctgaagccattttatcagacctgggaacaagagcaggacgccatgttttatcctggtgcatacaatgtcagccattatttggcaatccggcaggatggcctcacaggtattttggtctcaggccagagattggagtgcctgctctgaagtggggtaggggcctccacagccagaactgtgaaaatcacctcagcagaaggcattagaactgtactctccactgtggcaggcctggggcaggagagctgctacagctgcagtttctcctggacaataagacttgcagctacagccagcttggtaacatggaaccagtctccatgtgctattgttgggtgccccagcctgctcttctgagattacagtacagtggagtcctctctgatccacacccaggcaaatctccaggtattcagaccaccctctcacctggatcagccacctgaacccctccagccttcctgtgcatagattgtgctgcagtgaagccctctccactccacgtgtaggcagatctccagatatgtggagcaactgcttgcatggactagcagtctcagtctcccacccttcctgtgcagggatcctgtgtgggttatgggggaatgggaggagggggagttctacttcacacccaggcagatctcctggcatttggagcactcactcacctggaacagcagcttcactccctgcattcttcctgtgcatagaccatagtgcaactgggccatctcgactctacacccaggcagaccttcaggcatccaaagcacctgcttgcctagactggcaggctgagccactccacccttcctgtgcaattatctgggtgcataggggccctctttgtttcaagcccaggcagatctctaggcatcaggagcacccaatcttctggattaggactttagcccaccccatccccatgcagagaacttggggccaaggagatttctcagcttcctgcctaaacacacttctgggcacttggtggctgcccactggattccccattggccctggtacttgtccctgccatcaagggacttgtaaatggacctgccaggtccagccttacacatcttgccccccaccccacagcgttaagggaacttggaccactgttcactctaagaatcagcctactgcctaaggcaacagagagcttctctgtaaacaaagatcaggtatataaccagatcattggccataggcagcgcttacaaaaagcaccatctactggcttgtgggttgaactgcacagcccaatataaaatctgccaacagaagtgcctagggatataaaagcaaagtcaaaagaccctacccagcactctctgcagtcacaccccagggagtaagggaaagggaaagaagaaagaaacagtaatatcacaggagaagaaggaaagagaaaaaatcctacctggaggaaaatagttacaaaaattataactacagcatctccagatgagaaggaaccagtgcaagaattctagcacaacgaaaaatctgaatgtaataacaccactaaaggatcacactaacggctccagcaattgtccgtaatgaatatggaaactaagaaatgacagaggaagaattcaaagcatgaattgcaaagaagctgaaggagatctgagctaaggttgaaaatcaacacaaagtaactcctaaagcaattcgggaaatgcaggaagagataaacatcttcaaaagaaatcaatcataacttctggaatttaaaaactcacttaaggaatttcaaaatacaattgaacgatttctcaatggactgaaccaagcagaagaatttcagagcttaaaggctagtcttttgaactaactcagtcagacaaaaataaagaaaaataatttttgaaaatgaagagtctttgaaaaatatgagataatttaaagtaactaaacctataaattatcaccattcctgaaaaaaacggaggaaaagaaaacaacctggaaaatatatttgagggaataattcaatattgttttcctagtcttgctagagaagcaaatatccagatataagaaatctacagaacacttgtgagatactatgcaaaatgaacatcaccaaggtgtattgtaaccagaatgtccaaggtcaacaccaaagaaaaaatcttaaaggcagctagagaaagaggtcagatcacatacaaagggactaacagcggatgtctcaacagaaacctcataagccaggggtgattcgctgcctatttttatcattcttaaagaaaagaaatttcggccgggcgcggtggctcacgcttgtaatcccagcactttgggaggccgaggcgggcggatcacgaggtcaggagatacagaccacggtgaaaccctgtctctactgaaaatacaaaaaattagccgggcgtggtggcgggcgcctgtagtcccagctactcggagaggctgaggcaggagaatggcgtgaacccgggaggcggagcttgcagtgagccgagatcgtgccactgcactccagcctgggcgacagagactctgtctcaaaaaaaaaaaaaaaagaaaagaaaagaaatttcaaccaaaaataaatttcatatactgccaaatcaagcttcataagtgaacaagaaataaaatattttccaaagaagcaagagctaaggaaatttattgacactagatcacctttacaagagatccttaaaagagttctaaacatggaaacaaaagagcaatatctgctaccacagaagcacacttaagtatatagcctacaaacccttaaaaaacccatgcaataaaaactaccaaggaaccagctaacaacttcatgataggatcaaaactgcacatctcaatattaaccttgactgtaaatggtctaaatgccctcacttaaaaggcacagagtggcaatttgaaaaaaaaaatacatctactgtcttcaagagatccatctcacatttaataacattcataggctcaaagtaaagtgttggagaaagagctactgtgcaaatagaacacaaaaaacagtaagaccaatcctagataaaacagactttaaatcaacaacagtaaaaaagaacaaagaagggcattacataatgataagggcttcaattcaacaagatggctcatgtatcctaaacacatatacacccaacactggagcactcaaattcataaaacaagtacttttagatctatgaaaagacagacagccataaaacaatagtagaggacttcaacacaccattgccagcattagacagatcattaaggcagaaaactaacagaaattctgcagttcaattgaccaactggacctaagagacactgacagaatatttcacccatcaaccacagaatatccactctttttgtctgcacacagaacatactgcaggatcatccacatcctcagtcataaagcaagtgtcaataaatttttttaaaattgaaatcatacccatcatattcatgaaccacagtggaatgaaaatcgaaatcaataccatgaagctcccttgaagccatacaattacatggaaattaaacaacttgctcctgaaaaaattttaggtaaacaaaaaaattaaggcagaaataaaaaacattctttgaaatgaattaaaacagagacaaaacataccataatctctgggatacaccaaaagcagtgttaagaggaaagtttatagcactaaatgcctacctcaaaaagttagaacaatctgaaattaacagtctaacatctcacttagaggaactagaaaaacaagaacaaactaactccaaagcaagtagaagaaaataaataactaaaaatagatcagaactgcataaaactgagacacaaaagcccccaaaaaatcaacaaaaccaaaagatgtttctttgaaagaataaacaaaatcaacctaccgctatttagattaacaaagaaaacaaaaggtgatccaagcacaattagaaatgacaaaggtgacattacaactgatcgcacagaaataaaaagatttccagagactattatgaacacatctttgcacacattttactgtagaaaatttatgtttctatagtattggaaattctggccagggaaatcaggcaagataaacatataaagggtattcaaataggaagagaggaagtgaaattgtcactgtttgcagatgacatgattgtatatttagaaaacgccattgtctcagcccaaaaactccttaagctgatgagcaacatcagcaaagtctcaggatacaaaatcaatgtgcaaaaatcacaagcacttctatacacgaataataaacagagagccaaatcatgagtgaactcccattcacaattgatacaaagagaataaaatacctatgggacagaacagaggcctcagaaataacgccacacatctacaaccatctgatctttgacaaacctgacaaaaacaagcaatgcggaaaggattccccatttaataaatggagctaggaaagctggctaccatatgcagaaaactgaaactggaccccttccttacaccttatacaaaaattagctcaagatagatgaaagacttaaacataagaccaaaaaccataaccctagaagaaaacccagacaataacattcaggacataggcatgagcaaagacttcatgaaaaaatgccaaaagcaattgcaacaaaagccacaattgacaaaagggatctaattaaactaaagagcttctgcacagcaaaagaaactatcattagagtgaacaggcaacctacagaatgggagaaaatttttgcaatctatccatctggcaaaagtttaacatccagattctacaaggaacttaaacaaatttacaagaaaaaaacaaacgaccccatcaaaaagtgggcaaaggatatgaacagacatttctcaaaaaaagacatttatgcgtccaacaaacaaatgaaaaaagttcatcatcactggtcattagagaaatgcaaatcaaaaccacaatgagataccatcttatgccagttagaaaggcaatcattaaaaagtcaggaatcaaaagatgctagtgaggctgtggagaaataggaaggattttacactgctggtgggagtgtgaatcagttcaaccattgtggaagacagtgtggcaattccctaaggatctagaaccagaaataccatttgacccagcaatcccattattgtttatatacccaaaggattacaaatcattctactataaagacacatgcacacatacgtttattgtagcactattcacaatagcaaagacttggaaccaacccaaatgcccatcaatgatagacaggaaaaagaaaatgtggcacatacacaccatggaatactatgcagccataaaaaaggaagagttcatgtcctttgcagggacatggatgaagctggaaaccatcattctcagcaaactaacacagaaacagaaaaccaaacaccacatgttctcactcaaaagtgggagttgaacaatgagaacacatggacagagggaggggaacatcacacaccagggcctgtcatggggtaggggggacaagggaagggataacattaggacaaatacctaatgcatgcatggcttaaaacctagatgacgggttaatgggtgcagcaaaccaccatgacacatgtatacctatggaacaaacctgtgcattctgcacatgtatcccagaacttaaagtataataaaaataaataaataatccattttataacttctagaaataaatcataactcatatagcatgtgagaatacagtatcaaaatatcacatgtatcccataaatatgtacaattattatgtatcagtaaaaaagaaccccttctagtttagaagatatccctgtgtcttatcatttagggtcgcatatactttcttttttataacattcattcatcttaattttttggttgttatatatttcttaaagagtgttccattagcccagaaactattgtttattcactattgtatttttcatgccaaataagtcaaaataaagattcaataagcatgaaaaaaaagaaaatttatgtttctaggataaattcctagaaacacataatctcccaagattgatttagaaagaaattgaaaccctgaacaaaccaatattaagtcctaaacttgaatcagttatttttaaaaaaaaaaaacctaccaaccaataaaaacctccagaccagatggattcacagctgaattttaccagacatacaaaaaagaactggtaccaatactactataactgttcaaataaatcaaggagaagggactcctccctaactcactcaatgaagccagcatcaccctgataccaaaacctggtaaagaaacaatgagaaaagaaaactacaagccaatattcctgataaacataaacacaaaaatcctcaacaaaatactagcaaaccaaattcaacagcacatcaaaaagttaatcacaatgatcaagtaggcttcattcccgcgaggctaggttggtttgatatgagcaaatcaatgtgattccccacataaccagaattttttgaaaaaggtataatcatccaatagacatggaaaaagcttttgatacaatccaacatcccttcatattcaaaaaccctcaagactaggcattgaaggaacatgccccaaaataataagagccatctatgacaaacccacagcctacatactgagtgggcaaaagctggaagcattcccttgagaattggaacaaggcaaggatgtctactcttaccactcctgtttaacatagtagtagaaggccttgccagagcaatcaggaaagataaaaaaacaaaaaagggcattcaaataggaaaatacatcaacgtatctctttttgctgatgatatgattctatacctagaaaatcctaaagactccacccaaaggctcctggaactaataagggacttcagtaaagtttcaggatacaaaatcatgtataaaaatcagtagcatttctgtacaccaataatgtttcagctgagagccaaatgaagaatgcaatcacatttacaatagcatcaaaaaactaaactacaaaagaaaaataaaatatttgtgtcattttattacctagaaatacaccaaaccatcaaaccaagaaggtaaaaatctctacaaagagaatgaccaagcactaccaaaagagatcatagatgacacaaacaaatggaaaagcatcccatgttcatggataggaagaatcaatactgttaaaatggtcataccccccaaagcaatctacagattcaacattattcctatcaagctatcaatgtcatttttcacagaactagaaaagattcttctaaaattcatatgaaaccaaaaaaaaaagcccaaagcctaaactaaaagaacaaagacagaggcatcacattacccagcttcaaactatacaaggccacagtaaccacaatattctggcactggcacaagaacagacaaatagaccactggaatagaatatagaactcggaaataaagctgcacacctatagccatctgatcttcaacgaagttgacaaaaacaagcaatgaggaaaggactccctagttgataaatggtgctgggatagctggtgagccatatgctgaagaatgaaactgaacccctatctttcaccatatacagaaattaattcaagatggattaaagatttaaatgtaagactccaatctttaagaatcctaggggaaaatctaggaaacactattatggacattggccttgggaaagaatttatgaccaagtcctcaaaagcaattgcaacaaaaacaaaaatttacaagtggggcctaattaaactaaaaagcttctgcacagcaaaggaaactatcaatagaggtaacagacagcctacagaatgggagaaagtactcacaaactatgcatcccacaaaagtctaacatctagaacctacatggaattaaaacaattaagcaagctagaaacaaataattccactaaaaaaaaggcaaaaaaaaaagacacgaacagatacttctgaaatgaagacatgcaagtaaccaaaaacatatgaaaacaatgctccacatcactaatcatcagagaaatgcaaaccatgagataccatctcacaccagtcagaatggttattatttagaaaatcaaaaggcaacagatgctggtaaggctggggagaaaagagagggcttatatattgttgggggactgtaaactagttcagccactgtggaaagtagtttggagatttctcaaagaacttaaagtagaattaccctgacccagcaatcctattactggatatatacccaaaagaaaacaaattattctaccacaaagacacatgcattttatgttcatcacagcactatttgcaatagcaaagacatgaaatcaacctaggtgctcatcgacagtggcttgcatatagaaaatatggtacatatacatcatggaatactatgcagccacaaaaaataatgaaatcatgtcctttgcaacaacatagatgcagctggaggccattatcttaagcaaattaatgcaataacagaaaaccaaatacccatgttctcagatataagtgagagttgaacatttgatactcttggacataaaaatggcaacaatagacactgcaaactaatgaaagggggagggtggcaggtttgaaaaactatcaggtagtatgctttgtactgagtgatgggattaataataccccaaacctcagcatcacggaatacacccatgtaataaaactacacatgtactcccaaatctaaaataaaatttgaaaaataaaataaaaaattaaaaatgagaggtggagccaagatggccgaataggaacagctccagtctacagctcccagcgtgagcgacacagaagatgggtgatttctgcatttccatctgaggtaccaggttcatctcactagggagtgccagacagtgggtgcaggacagtgggtgcagcgcaccgtgcatgagctgaaacagagtgaggcaatgcctcactcgggaagtgcaaggggtcagggagttccctttcctagtcaaagaaaggggtgacaagacggcacctggaaaatcaggtcactcccaccctaatactgtgcttttccaataggcttaacaaatggcacaccaggagattatatcccgcacatggctcagagggtcctacgcccacagagtctccctgattgctagcacagcagtctgagatcaaactgcaaggcagcagcgaggctgggggaggggcacctgccattgcccaggcgtgcttaggtaaacaaagcggggggaagctcaaactgggtggagcccagcacagctcaaggaggcctgcctgcctctgtaggctccacctctgggggcagggcacagacaaacaaaaagacagcagtaacctctacagacttaaatgtctctgtctgacagctctgaggagagtagtggttctcccagcacgaagctggagatctgagaacgggcagactgcctcctgaagtgggtccctgacccccgagctgcctaactgggaggcaccccccagtaggggcagactgacacctcacacggccaggtacccctctgagacaaaacttcctgatagcagcatttgcggttcatgaaaatctgctgttctacagccatcgctgttttgcagccactgctgctgatacccaggcaaatagggtctggagtggacctctagcaaactccaacagacctgcagctgagggtcctgactgttagaaggaaaactaacaaacagaaaggacatctacaccaaaaacccatctgtacatcaccatcatcagagacaaaaactagataaaaccacaaagatggggaaaaaacagagcagaaaaactggaaactccaaaaatcagagcacctctcctactccaaaggaatgcagttcctcaccagcaatggaacaaagctggatggagagtgactttgattagttgagagaagaaggcttcagacgatcaaactactccaagctacaggaggaaattcaaaccaatggcaaaaaagttaaaaactttgaaaaaaaattagacaaatgaataactagaataaccaatgcagagaagtgcttaaaggagctgatggagctgaaagccaaggctcgagaactacgtgaagaatgcagaggcctcaggagccgatgcgatcaactggaagaaagggtatcagtgatggaagatgaaatgaatgaaatgaagcgagaagggaagtttagagaaaaaagaataaaaagaaatgaacaaagtctccaagaaatatggggctatgtgaaaagaccaaatctacgtctgattggtgtacctgaaagtgatggggagaatggaaccaaggtggaaaacactctgcaggatattatccaggagaacttccccaatctagcaaggcaggccaacattcagattcaggaaatacagagaacgccacaaagatactcctcaagaagagcaactccaagacacataattgtcagattcaccaaagttgaaatgaaggaaaaaatgttaagggcagccagagagaaaggttgtgttacccacaaatggaagcccatcagactaacagctgatctctcggcagaaactctacaagccagaagagagtggaggccaatattcaacattcttaaagaaaagaattttcaatccagaatttcatatccacccaaactaagcttcataaatgaaggagaaataaaatactttacagacaagcaaatgctgagagattttgtcaacaccaggcctgccctaaaagagctcctgaaggaagcactaaacatggaaaggaacaaccagtaccagccactgcaaaaacatgtcaaattgtaaaggccatcaaggctaggaagaaactgcatcaactaacgagcaaaatagccagctaacatcataatgacaggatcaaattcacacataacaatattaactttaaatgtaaatgggctaaatgctccaactaaaagacatagactggggaattggataaagagtcaagacccatcagtgtgttgtattcaggaaacccatctcacatgcagagacacacatgggctcaaaatacagggatggaggaagatctaccaagcaaatggaaaacaaaaaaaggcaggggttgcaatcctagtttctgataaaacagactttaaactaacaaagatcaaaagagacaaagaggccattacataatggtaaagggatcaattcaacaagaagggctaactatcctaaatatatatgcacccaaaacaggagcacccagattcataaagcaagtcctgagtgacctacaaagagacttagactcccacacattaataatggtagactttaacaccccactgtcaacattagacagatcaacgagacagaaagttaacaaggatacccaggaattgaactcagctctgcaccaagcagacctaatagacatctacagaactctccatcccaaatcaatagaatatacatttttttcagcaccacaccacacctattccaaaattgaccacatagttggaattaaagcactcttcagcaaatgtaaaagaacagaaattataacaaactgtctctcagaccacagtgcaatcaaactagaactcaggattaagaaactcactcaaaaccacgcaactacatggaaactgaacaacctgctcctgaatgactactgggtacataatgaaatgaaggcagaaataaagatgttctttgaaaccaacgagaacaaagacacaacataccagaatatctgggacacgttcaaagcagtgtgtagagggaaatttatagcactaaatgcccacaagagacagcaggaaatatccaaaattgacaccctaacatcacaattaaaagaactagaaaagcaagagcaaacacattcaaaagctagcagaaggcaagaaataactaaaatcagagcagaactgaaggaaatagagacacaaaaaaccgttcaaaaaattaatgaatccaggagctggtttcttgaaaagatcaacaaaattgatagaccgctagcaagactaataaagaagaaaagagagaagaatcaaatagacacaataaaaaatgataaagcagatatcacaccaatcccacagaaatacaaactaccgtcagagaatactacaaacacctctatgcaaataaactagaaaatctagaagaaatggataaattcctcgacacatacaccctcccaagactaaaccaggaagaagttgaatctctgaatagaccaataacaggctctgaaattgaagcaataatcaatagtttaccaaccaaaaagagtccaggaccagacggattcacagccgaattctaccagaggtacaaggaggagctggtaccattccttctgaaactattccaatcaatagaaaaagagggaatcctccctaactcattctatgaggccagcatcatcctcatagcaaagcctggcagagacacaacaaaaaaacagaattttagaccaatatccttgatgaaccttgatgcaaaaatcctcaataaaatactggcaaaccaaatccagcagcacatcaaaaagcttattcaccatgatcaagtgggcttcatccctgggatgcaaggctggttcaacatacgcaaatcaataaatgtaatccagcatataacagaaccaaagacaaaaaccacatgattatctcaatagatgcagaaaaggcctttgacaaaattcaacaactcttcatgctaaaaactctcaataaattaggtattgatgggacatatctcaaaataataagagctatttatgacaaacccacagccaatatcatactgaatgggcaaaaactggaagcattccctttgaaaactggcacaagacaaggatgccctctctcaccactcctattcaacatagtgttggaagttctggccagggcaatcaggcaggagaaggaaataaagggtattcaattaggaaaagagggagtcaaattgtccctgtttgcagatgacatgattgtatatctagaaaaccccatcgtctcaggccaaaatctcctcaagctgataagcaacttcagcaaattctcaggatacaaaatcaatgtacaaaaatcacaagcattcttatacaccaataacagacaaacagagagccaaatcatgagtgaactcccattcacaattgcttcaaagagaataaaatacctaggaatccaacttacaagggatgtgaaggacctcttcaaggagaactacaaaccactgctcaaggaaataaaagaggatacaaacaaatggaaaaacatcccatgctcatgggttggaagaatcaatatcgtgaaaatggtcatactgtccaaggtaatttatagattcaatgacactcccatcaagctaccaatgactttcttcacagaattggaaaaaactactttaaagttcatatggaaccaaaaaagagcccacatcaccaggtcaatcctaagccaaaagaaaaaagccagaggtatcatgctacctgacttcaaactatactacaaggctacagtaaccaaaacagcatggtactggtaccaaaacagagatatagatcaatggaacagaacagagcccacagaaataatgccgcatatctacaactacctgatctttgacaaacctgagaaaaacaagcaacggggaaaggattccctatttaataaatggtgctgggaaaactggctagccatatgtagaaagctgaaactggatcccttccttataccttatacaaaaattaattcaagatggattaaagactgaaatgttagacctaaaaccataaaaaccctagaagaaaacctaggcaataccattcaggacacaggcatgggcaaggacttcatgtctaaaacaccaaaagcaatggcaacaaaagccaaaattgacaaatgggatctaattcaactaaagagcttctgcacagcaaaagaaactaccatcagagtgaacaggcaacctacagaatgggagaaaattttcacaacttactaatctgacaaagggctaatatccagaagctacaatgaactcaaacaaatttacaagaaaaaaacaaacaaccctgtcaaaaagtgggcaaaggatatgaacagacacttctcaaaagaagacatttatgcagccaaaaaacacatgaaaaaatgctcgtcatcactggccatcagagaaatgcaaatcaaaaccacagtgagataccatctcacaccagttagaatggcaatcattaaaaagtcaggaaacaacaggtgctggagaggatgtgtagaaataggaacacttttacactgttggtgggactgtaatatagttcaaccattgtggaagtcagtgtggcgattcctcagggatctagaactagaaataccatttgacccagccatcccattactgcatatatactcaaaggactataaatcatgctgctataaagacacatgcacacttatgtttattgaggcactattcacaatagcaaagacttggaaccaacccaaatgtccaacaacgatagactggattaagaaaatgtggcacatatacaccatggaatactatgcagccataaaaaatgatgagttcatgtcctttgtagggacatgcatgaaatttaaaatcatcattctcagcaaactattgcaaggacaaaaaaccaaacaccgcatgttctcactcataggtgggaattgaacaatgaggacacatggacacaggaaggggaacatcacactccagggaaagttgtggggtggggggaggggggagggatggcattaggagatatacctaatgctaaatgacgagttaatgggtgtagcacatcaacatggcacatgtatacatatgtaacaaacctgcacattgtgcacatgtaccctaaaacttaaagtatcataataataataataattaaaaatgaaaggcagagatttcagattggattaaaacagaaaaatgcaagtatatgctgcctaaaagaaacacgctttaaatatagagacacaaatagcttaacagtaaaaagatgggaaaagatacaccatgttaacatagtcaaaagatagctggagaggctatattaatatcaaagtagatttcagagcacagattattacctgagataaagagggtcatttcatattagttaagtggttagtttaagagaatacaatcctaaataattacacactaataatagagttccaaaatacttgaaaaaaaatcaaggatagagaaatccacaattacagctaaagattcgaacaacactacaaaccaattttatctaattgacatttgtataatactgcacctatcatcaacagaatagacgtttttttcaagtgcatacagaacatttaccaagatatattctgggccatataacaagtctcaatagattttaaattactcaaattgtatgatgtgtgttctctgtttacaacagaattaaatttctaaaataagcaacagaaacatatctggaaaatcttcaaatatctgaaagttaaataacacacttctaaataccccatgttataaacaagaaatcaaaaagaaaattagaaggtattttgaactgaatgagaatgaaaggacagcatacaaaatttgttggaggcagctgaggtagtatttagcttatgtagcttgaggtattatttagctcagtttatgaagaaataatttaaattatttttacagacatgactgtccttggagaaaattttatagaataaacaaaaatgccatgacagttgtttttcttttcttttttttttttttttaaatcttcaggggggtaaattttaagacctccagtggatgtctgaaacctcagatggtaccgaactatatatactacatgtacgctacctttttccagtgtaaacatacctaagataaaatttaatttataaattagtcacagtaagagattaacaacagctaatgttaaaatagaacaattaagtaaaataagggttacttgaactgtgatactactgaaataccacaacagttgatcttgtaaatgagatggttactaagtgactaataagtaaggagcgaatacatttggacaaaggaatgattcaacttctgagcagaatggagtgggatggcaagagattttatcacactactcagaacagcgcacacttcaaaattcataaactctttatttctgtaattttccatttttgaaccacagttgaccttaggtaactgaaaccatacaaagtgaagaataaggggggactacggtatagctactatgtgagtttagcaaggttgcaagatacaagaccaatgtaccaaagtcaattgcatttctatacactagtgatgaacactattaaagtgaaattcttaaaaaataatgccgttccccttagcatgaagagaatatttagagataactatgacaagtaaaagatctgtactctgaaaactataaaatagtactgatcaaaaaataaagatgtaaataaatggagagatattccctgttcatgaataggaagattgaatattgttaaggtttcagttcttcccaaattgaactataaaattaatgcaatgccaagcaaagtcttagcgagcttgttttgtagaaatcaacaagctaattctaaaattcatatgaaaatacaaaggactttgaatagccaaaacaactttgaaaaagaatagcaaagtcaaaaactttaactatttgatttccagatttattataagtctatagtaatcaaggcaatgtggtattagcatcaaaatagatttaaaaaatcaatgaaacagaataaaaagtccagaaatagacccacacatgtaatcaattgatttttgacaaagttgcaaaggcaatccagtggagaaatgataatctattcagcaaggagtgctggcacaactgactaaccacatgcaaaaaaagtcttcaaatgaacttttaattattccttgcaccatatacaaaaattacttcaaaatggatgataaactgtaaaacctaaaagtatataactttttaaaaactggagaaaatttttgtgatttgggctatacaaagatttctagggtataacagcaaaaacacagtgcataaaataagaaattgattagttagttgatggtcactaactatccctgccagtattcatagattaatcgctagaagtagatgaatattgacaaattatcctccagaaatgtgtcatcactaacagagtatgagtgtctatttcactgtcatattttctatattggataatataattcaacagatatttgccaatataaaaggccctttatcaggtaccttattgtttctttagtttgtctttattattataaaagtaataaagtgattttgtaaaaataataaaaagtgattctatgtgtatgtttattacccactggtgtttcttcttttgtcaaatgtcatttcatgccaaagattaaaatgacaatggcgagctccaacacaacggttgaccttccagaggtaggagatgaaatagcagagagtttcatgaactagacctccaggctttccctgtctatatttactccatgcagtaagctaaggacacttcattaatttctgcaataaaaaccttttaggctattttgggcaaatactctgattttctgccctgtctctgctgacactccaaggtgtcatccaggtatacagcaggtagaaggccttattgatctcaggaagagggaatggtggaaattgggtatttactcagccccttgaactgccctctgtccactttggtatgcacaatgatgtccctcccttggctgcttgcttctcccagtgcctgtagctgatgcaccattggctttgggcttgatttgggatggtggtcctctctgtgactttgtccccattatagctacaggcccctgcattgtggttttgattcctatttggttgctggctgaggcagtccaccctgcagtctggacttgctgtcacttcattgtactgccatagcccaccctggtctacttctgagttatgctttcaaccaacttccatgtcccaattccatattccatgtctcacaggaaccaagacagatcagagttaggaatcttttctctcactaactgtgcttatagacaccattactctgatgcagcttgagaagcattcactgttaggggtcgcagatgttacctggaacaaagtctgctctcaccatatccctgaaaatacctaacatattctcaagttgtggaaagtcagtggcagggagaactcataacccagctatttagccacacatcttccctacctacatcccccttcctcttcccacaatctccgagaccaggaaaaaagcacactttcaaacttctcaagattaaagctctatgatccattctgatatgtcaaaggaggagctctatcacatagaaatttctctttctctcaacaaagcccagtttttaaaatcattatctaaagatgcgagaaaagtcatctggtttgagactcaatgctgattggtgattttcttatttattaattaatacattcaagaaatatttcttgtgaaaattacttctcaggtgtggaaatgcaatggcatacaaggaaaaaaaaggtcttgacctcatagagtttaaattctagtacagaagacatacaatgtaataatcaaatccagtttgtaagttttatgaaaataaagcagggtaaagtgacagagaaaaatagaataagagaggatataggtgttattttcaaaaagtaatccaacaaatttctctgtgaaataaaatctaacctgccacctgtatgaggtgaaggaaggatccaagaacaagactagagagtttccaggcacagggaccaaaggctttggggtgggaacctgcttgaagagtccaaggactggcaggaggttagaacagagctagaacagagagtgagaaagtagagatggttacagataaagtccaagagacaggtaggggccagatcatgttgaactttgtaggttagctgtttcaacgtgtcgtctggggaaccagagggatccctgatatcctcaggggttccataaggtcctccttttcccaaatacttttttctaccaggttgaattttcttcatatagttcaatcaaaacaatatattgcaacagattgaatgcagaagaaaatatgaaaatccagctgtcttttattaaaccaaatattcaagagatttgcaaaaatgtaaaacaatgtcattctcctcactgtattatttttgtttttgaaaatatatattttttcacgccaggtgcagtggctcacacctgtaatcacggcattttgggaggccaagacaggcagatcacttgagcccaggagtttgagagcagcctggtcaacatggcaaaacccacctccacaaaaaaaattgtttaattaactgggtgtggtggtgcacacctatagtcccagctactcaggaggctgaggtgggaggatcacctgagcccaggaggcagaggttgcagtgagccatgatcatgccactgcagtctagattgggcaacagcacccatatatatatgggtgctcaaatatatatatatttgagacagggtctcactctattgcccaatatataaaaaatatgtcatttacattaacatataataggtttttattgttgttttaaaaatatttaacaaataaatatgtttacatattcttagttataattttaaataaattacatatttacagatatagcccacgtaaacaaaagctctttggagcccttcctcaataatttttcagagtgaaagggattctgagattaaaatgtttgagaatcatttttataaaacataagattttattcaaaggataatacgatccatctggaagtcttgaacagagtgctgatagactctattgcttttagaatatccatctggccgggcgcggtggctcacgcctgtaatcccagcactttgggaggccgaggcgggcggatcacgaggtcaggagatcgagaccatcccggctaaaacggtgaaaccccgtctctactaaaaatacaaaaaattagccgggcgtagtggcgggcgcctgtagtcccagctacttgggaggctgaggcaggagaatggcgtgaacccgggaggcggagcttgcagtgagccgagatcccgccagtgcactccagcctgggcgacagagcgagactccgtctcaaaaaaaaaaaaaaaaaaaaaaaaagaaagaaaaaaaaaagaatatccatctgactgctgagtgggaaattcactgcagagaaggaagagatgatgcaagaaaatggtagaggttgttgcattagtccaggcaagagatgactgtggcttggcctcagatgatataagtggagatggttagaagtcacatagaataaatattttaaaggtagagccaatagaatgtgttgattaaatgaatgtggggtatgaggagaaaaggggccaaggttgactccagggattctggtctaagcccctggttagatagtggcacaatctactgagaaggaggaaagaggtttcttttttttttttttttttttaaacacagaatctcgctctgtcacccaggctggagtgcagtggcgcgatctcagctcactgcatgctccaccttcccaggttcacgccattctccctcctcagcctcccgagtagctgggactacaggcgcccgccaccacgcccggttaatttttttgtatttttagtagagacgaggtttcaccgtgttagccaggatggtctccatctcctgacctcgggatccgcctgcctcggcctcccaaagttctgggattacaggcgtgagccaccgcacccggccagaaagtggtttctaaggtactaccagctctctctctccctggagcaagaagccttatgaatctatcttgcactttaaaagaatgcaaggaaaaaagagataaattaaaaggtattaatttaatatttccaaaatgttacccctgttacatttcatatagtttcatcttaactatctaaaacaagtgcatagaaaaatactggaaggaaatatcaaaatgttaacagtggtcttcactaattaaaggtttgccagaggattttattttctcttgcataggttgcttctatatctcacaaactcttacagtgagtgtttattactgtaatttttctcagaagtaaaattattttaggaaaaaccattcaaagctcagatgcactatgtggtgtctatgaacttgaagatacctccatttgaagagatgttctcccttgagaagatgagtcggtggaaagtgccctatattatgcatcaagcataatttccatcttggttcatctgggatatttgtacctttacaaataattaatttttaattaatttttatacctttaaaaataatcacagataattattttctgccacaatagtttcttcaattttttaattaaaagtcaatccaccttagactcgactctttggggtgataaaaaagagttcttgaataaggattctgaaagtccctaatacagccctcaaagaagtaaactaagtttaaagttattttcttgtttcttatgtctccatgcttgcagagtaaatttaatgccaggttttggagaaatctatcttagaataaaaacacagttatcagtgaagctacacatgtgacacttaaataaacagggaacagatagaaggaagttctcactgatgctggtgaactggatgtcctagtgagcgtgccacgtcaccagagttgataagcaactgactgaaaaccttggtctgggaagctgctgtggtcagagatcaaagtgagaagggaaagggaaatgccttttccacacctaataagattcatttttcttgttttccttcaccaactccacaagactgtcaaggtaattttttggtttgctactaagctaaaaaaggactcaaccattttaaagttagtaagacatgggaaataattacctttcaagactccataagagtcttcagagtcagggaacattgaccacctgcttgattataaaaaatagtctttgttcaccaaggtagccctatagcttcctagtgtctacagcatttacacatctactttctccttcacagcctctacctctggaatagagattcttctggaatattccagaggttgtaaggggtgtgactgttgccccatggggaaaataggggctgcttggtaagtttctaggcagttttttttttttttcataagtggacccattctgaggtctgtcctttcccctctctgaaaggaccagaacctgttgttctgggtttaattaagaaaagaagacatgcactcatggcgttcttgatctaaggcatccactcacccacaggaagagtctttggcaagacggtctcccgaggtgtcttctagagctatagttccatgttcaataagggagaaattacttaaactcatctcacaacttgattacattctcacaataatctagataatgaatacatgggagtagtaaatgaaagttcactttctactaaaatttcagaaagaaaataagtaagtctgttctctagaaaggaaaaagttttctcatttatgtaaaatgaatgagattagtcatcatggaggtaaatctagagattgtaaatctttacctggagaactttgacaacagtcaaaactctaatcaaaagaatggtgtgatttctaggaggcaggattacaacgtaagggaaaatctagccaattttacttaccctgtctgaaccaaattgggtggccaatgtgaagcatagaaaagagaaacccaagattcataaaatggtaatatttgtcaaactacagcctatgaggaatttggatgaatgaagatagattattaagatgtgtgtgttcagttaggataggagtaactcacagagcctcacctcctaataaatatccttccaatttttccataggctttttcattcatcatagtagtcacaaagtgactctgtaattactaattcagtttctcagctacttcagtattaatagaaggtatttcagatacaaacacaatctggtcattaaaaataaaaatctcttacacctctaaacctagcatgttgggaagccaaggcaggacaattgcttgaagccaggagtttgagacaaacctgggcaacgtagtgagatcatgtctttgcaaaaacaaatataaaacttagctgagcatggtagcatgcacctatagtcctaggtactccaaaggtttcagtaggaagatcacttgagtccaggagtttgatggtgcagtaagttatgatttcaccaatgtactccagtctgagtgacacaaccagacttatctctaaaaataaataaataaataaataaatatcttactttcaataaatataaatcctctactggtattatgtggataacaacacatactttcaataggttgtgatgaagatcaaaatagagaacatatttaatacatctgacatatgcctgacccataataaatatttggtaattctcctacctttttgcctctctttgcttttattcaaattacaacaaataaaagatacagagtaatattatccagctgatatggagaacctgctctctaacactgactacctctgtccttgggcaagtcattgatctctggccatcggattcctaagataaagcaaggatttggactagatgatatctgatttcttttctatctctaatattaaaagagactgagtatttaagattggtccttggggtgtcattttgattccattaagcctgagattcaattattctgctcaattgatctttcttaataataaacaaaatcaaacaacttagacaacattcaggttaacaaggcagcaaattagcaacacataacagaccttctcttaacttcccattaaaacacctacgaggatatacaaaaagataaaaactggcaccagtattgtaaactgaaaataagagaagaagatatgtcaaagttcagagggactttccactaatcgcatcattaatggatagggattgagaaatataatcttggatggcacaaacactaccctttgaaccagaacagcaacaaccccaaagcaagaggaagaccttggctctcccccactggccgaggtcaacttcaggacaaggggttgccctgaccggaaaaataggtgccatcccccactgaaatagagttatcatctgagcaagccaacatcataacctctcttttttccccatcagcagttctatttctgtatccatttagagtctacaattcccagtgaggtactaatcttgaagtagaataacagttggttaacagtgtagtgagtactaagtaggggttgggacaaggtgaatactgaaaactgagtgtggtgagcgttaggaagcagggaggaagagtgttatctttcatgtactgatatttcatacgaattgcattttaatcattgtcaaaaattgcaactctttcagcagatgtatgctgtgcccatactgtatcatatacaggacctttaaccctccttggctagagctaggaaggaaaaattgtcagtccctgagtgggcaatgagagagtcaaagaccacatcactcaccctgtctattggtaacccaatactggatctttgaaattattctgcaacatttagggaatgagatatttatactgaaggctcaagggagagcttattttttaaaattatcactatgaagacaaatagagcaatgctttatttatgaaacaatttcttcaaagtttttactagctaaatattctcaggctcttttagtgtttggtggccatttcccggttgattccactcacatgggatgttttgatcatagcttttcacaaaaatttgccaagataccgtattaactagtgtaactatatcacccttaatggttctgtcaactggcatatagcagatataattcgtcaactttgcagcagaatgcattcttaatttgaaagtaaaaaccaagtggaaatccttgttgtgttcaataatgcattagacacagtatagactgttaccagaaggatttggttctgctttctcttcaataagtcatgttaaaagaatgactgcaatattccaaactgttatattattgcaatcaaactgatgctggagaggtttcgaatctggatatttccttataaaataacaacctgaataaatgaaaagcaattcataactttcccatttttcactttaccattaggatagcagatagccatattttaggtcctttatttttcctcctaaactgatgtatataatttaacataaataatattttagaaatatgttaataattaagaaatttctcccttttcatatttttagtggtttccctacaggaatttagaggcggcagagggggaaggagtggtggtggtcatagctaacacttgtagtgacacttaccatgtgtcacatattatgctcagcattttacttacattctcttgcacaatcttgatgatcattctaggaaatagatatgtaattacctttattctacaaatagggggtgaaaatatcaggcatctggaaagcgttgtttcagaaagaaaatctgcaagagtggaaaggtattggctcatagaatgttgtaagaaattaaattttatgtataaccaagagagtttctaccttaattaaatttaacaagtatttattgtatgcccacaaggcaattttctaggcaattagggacaaaacaatgaacaaaacatataacaccatcatgtgacttactttcttcagtctataaatgaacaaatgaacaggtgatggtttccatgaaaaaaaaacatgataaaagatttgacagtgatggtaaatgatcaaggatacagagggtgtgaaaacaatgcctaaggatgatctctctgaggagagatctgcttttaggtagagaactcagtgaagaacagaagtgagatgtgaaaaactggggaaaagagttccagacagaataaacagcagttgcaaagatccttggatgaaaacaaagttggtaagttcaagaaagagaaagagggcaatgaggctggattaaaatcagcaaggggaagagtgaagaaagtgtagagatgtagtcatctttgtaagccatcgctttgtaagggctttgagttgtggtaaatgctttgggtttcattaaaaaataaagaaggtgggaagcttgagaggtgttccaaatctttgttcagctctcttcctggacacctagccaggccacacttcacagcatacgttgcagctcagtgtggtcatatgactgagagccagcctgtggagtgtgagtggaagtgaggtgcactacttccaggattgaacaataaaaattatccacccacgcatctctgtgtcattcctcctttcttgccttcagggatagaacggtggatgacagccttcaaatccatatgttgaagatggcagagccaccatcacctggaaacctaatgaccacattgagaaaagcctggccaacaaccagttcactcaccaaaaactcttacgtgagagagaattaacttccattttgtcgaggcataacacacgtgggtctatgtattatcacaacctagtctaccataacttccccagtatccattctgcccttttgctattgcaatagaacccttaattttcagcttagcacttgagtacacggaataaagattgtatttctaagcgtcccttgcagttaagtgtggtagcacaactaattttgggctaaaatggtatgaagtggaagtgatatacatatatatatattcccaaaggggcatagcctcctcttttccacttcccactggcctgaaagcagatgtggtgatgtcgagtcaccttgaaccatatggacaagttttatactctatgcataacagaaaaataagatgaagtagcttgggtccctgaactgtggaggcatcattaacctcacgatcttattaagcctgcagctatttggagtacaaaaattaattcaagatggattaaagactgaaatgttagacgtaaaaccataaaaaccctagaagaaaacctaggcaataccattcaggacataggcatgggcaaggacttcgtgactaaaacaccaaaagcaatggcaacaaaagccaaaatagacaaataggatctaattaaactaaagagcttctgcacagcaaaagaaactaccatcaaagtgaataggcaacctacagaatgggagaaaatttttacaatctacccatctgacaaagggctaatatccagaatctacaaagaacttaaacaaatttacaagaaaaaatcaaacaaccccatcaaaaagtgggcgaaggatatgaacagacacttctcaaaagaagacatttatgcagccaaaaggcacatgaaaaaaatgctcatcatcactgggcatcagagaaatgcaaatcaaaaccacaatgagataccatctcacaccagttagaatggcgattattaaaaagtcaggaaacaataggtgctggagaggatgtggagaaataggaatgcttttacgctgttggtgggactgtaaactcgttcaaccactatggaagacagtgtggtgattcctcaaggatctagtactggaaataccatttaacccagccatcctattactgggcatatacccaaaggattataaatcatgctgctataaaaacagatgcatacgtatgtttatagtggcactattcacaatagcaaaggcttgcaaccaacccaaatgtccatcaatggtagactggattaagaaaatgtggcacatatacaccatggaatagtatgcagccataaaaaaggatgagttcatgtcctttgtagggatatgaatgaagctagaaaccatcattctgagcaaactatcacaaggacagaaaaccaaacaccacatgttctcactcataggtgggagttgaacgatgagaacacttgggcacagagtggggaacatcacataccgggccctgtcgtggggtggggggaagggggagagacagtattaggagatatacctaatgtaaatgatgagttaacgggtgcagcacaccaacatggcacatgtatacatatgtaacaaacctgcatgttgtgcacacataccctagaacttaaagtataataataataataatttttaaaaaaacagaaaaaatatagaaaagaaaaaaaaagaaaaagaaaatggagtagcttgggtctctgacctgtggaggcatcattaacctcgctatcttgttaaacctacagctatttggagtttcattttcaatagttacctatatgctgaataatctagaagtcatcaggaggctttaagtaggtgaaacataattcaacacagactggtttatatgttacaactctggctgctgggtggaaaataagctgtgggggagggcagagtaaaatcagggaaagcagttaaaatgctattgcagtaatctaggtgacagatgatggagcaagctaaggaggaaagaagtagtaggattcagagtttttggaaggtggtgccaatggtatctaatataggcttgaggtaaggtgattgtcagaaagagaagagaaaatgactctggtttctgacttaagcaattgggcaaacaggccactaactgagatggagaacattgggaaagaagcaagtttgaggaagaaaatcaaactttttttaaaatttttagctagttattcaaatggagatagcaagtgacattctatggaatctagaaacttccagcttggagtttaggaaagatgttaggctagaaacaaaactttgggaaaatcattaataaatttataatacaatgtactagcataatatcaaagggctccatttatggcaagaatccagatacaatagaggcaatatcatgttggattgacccaacataacattgcatatttttctaattggcaacaaaatatgacttaatacttacatgatattcttgtttatttataattggcatgtagaacaataattggtatccagttctgggtccttcaggatgacatgatattaagagacaggacagatattattggcataatacacaagaagaccttggtgaattatcttctacttgtgtttttaatcacgttaactatagaagcattcctgtctatgttgtactatttgtctttcaagggactgggaaaggcttcatcactgggcactatgcttgctgaagaatagaaggaaatggcatttgcacttccaaagtcacaggataaaagagatgcctcccactgtcatcttctaccctctttgtgggtacttattctctgggtaattattgtctaattttcctgtttgatattagcctcacccttagcacctaggaaggaattgaatgaatactttcctgaggctctaagactcacataaagcccacatgcataatgggattaactatctagactgaatgacttttcccagttaatgtaagtactatttacaagagtcagcttaatatttttgaaatgggaagccttccttgcctcttgcacctgctggtggctccaggcgttctttgactgtggctgcataactccaatctctgcctctgcctttacccctctattcttttctgtgtctcttttaaggatacttgtcattgaatataagacccacctagacaatccaggatggtctcatcttgagatccttaattaattacatctaaaaagactatttttccaaataagggcatgttcagtttccagagattagaatgtggacatatattttggggagtcaccattaaacccactgcagtctcaagtcttgtcaatcattagaaccacctagataacttgataaagtacagattctcaggtcccatccttagccattcgaattccatagaccgggtttgtatgcatgtttgtgttttattgtagataagaactaaatctaggtttaaaaaagaaaatcactaggtgattctgatggttattgtcccctattctttcaagatcttaattttggaaaatgtcattgttatctgttacatcatcaatgcagtgaaagacaatagcatatcaagaatggcaagatggtatgggggaaattgtgggcttggaaatcaaccaaggctgaacctgaaatttggcgatatcttgtgttattacttaaattctgtgagcatcagttttctcacctgtagaatggaagtctttacattatagtgttattgtgaagattaatgagataacgtatgtaaaaccccagcacgtgctcagtgatcaattaaatggaaactattattagcaaaaggtggatctggcagcctatgttaatccatgtagctataatacaatcatccaaactgactcattaatcatatgtcatgatttgcttaattttgatatataaaaagaatagtatttataaattttggaattatgaacaggttctataaaacaatgagagagtgtaatggaaaatattacctctttaattattatagtgatgatttttcaacttccatatagtttccaaaaccctaggtaaatgaaaaatctctaatgttcaattgattaagtggcttcacccaaacttctcctatggactatattctgtctccccaaaattcatatattgaacgtcacaagggtgggatgccaatctaataagacagtggctttataagaaaacaaagagagagagagatcttaagcaatctttctctgccatgtgaggacacagtgagaaggcagccatctgcaaaccaaaaagagacccctcaatgttgaacttccagcttccagaactatgagaaatatacatcatttaagccactctgtttgtggtattttgttatggcagccctagcagatgaatacacccccccatctagcctatatccctttttagcatgattcttagaaaatatgtcctcattgttgtcatgaacatttcccaggcctgctacttctccttaattctaatagatggggtaaaggaaagttatgtgttacatgggagacaacagagagtgtttcctattaatttgtaagaaaccaagctcatcaagcacaaactatcatcagtatagacttctttaatgggattatcagacccatagtttctcttaattcaggatggatatttttccttgagtaattttttttcctctttctgtgagtaaattctctggccatctaggtaaatttattgctcatacttctgttcaaaaagctttgatattcaccgttgctttcagaatggccggaggacccatcaattcataactgcaaagacctccaattccttaactcctactcctctttgtgtaaacttttgatccaaactgtatgctgatgtcctactgaccagcattgttctttcactttctcacatttttccatctcattccttctacctcacatgccctgctagcacagtcaactatatccaatctaaacaacaggtcctacttcacctcctaccagctccaagaaggctttgctgaccactccaggaaatgactcagtccatgctagctttatccttgttgtgtcacattactctcaggactttgcacaggataaatgttcataaatattaatacttcttggtctaaatatatttctctatgtaaagagcccttgaacttctaaggcacttcttgtctgtatcagcaatttgaaacgaatcacgaaccttctgaggacagcccatatgtatgtttgtgttatttacattttctattgtgatttcactttctgcttctagtgtgagctacattgggagcttcttgaggactacatcccatgaatgagatttggaactaggaaagactacaggttccaacctagacttccctgctgctaaaattacactgtttagtaagtcacttcacaaccaattttatgagtaaatggaaatgataatccctgtccttcagggcatggtggctcacacctgtagtgccaactacttgagacctgggtaggaagatctcttgagctcaggagtttgagtccagcctggacaacatagtgagatgccatctctaaaacaaaacaaaaccataataagtacctcataggatttatatgaggatagaatgatgtattgtaaagtatctagcacagcatctgcctcatggtaaattgtcaatatgtgggagctttattcttatgtcccagtactcccaacacttttgtaggttaaatatttttaattgttaatttcaatatatatttctatataaagataaaatgggggaagggatgccatatttaaatgtttttgtaaggcctcttctaactcaagatgtcctgatgctataaactttaaagtgtatcagaacgcatagcacagaaggcagcacagtgttgaacaataatgctctttaaagtagctgctgcatttcccacatttctttcattgttcagaaaatggctcaataagcccactagatgatttggaattcattcaggtcttgtgagcccattgtttgcaattctctaactgtcattttacagtcacattggacccaaaggatagagtctgaaaatttattgaatgatggaattttccagttacagagcagaatcctaataattcagagacatctcactcctgtagaggtcccagaaaaaggttaacgtgaacacaattgcctgtcaaaatcttccaattataaactagttactagttaccttttcctgcagttgtgtacacaaattaatatttaatttggatgatcttcacccaaaaatgaaggttataggaatctgtgctgttgatttaaattagaatattatactccttttgtttttcctttccctatattgattccatgcctgagcagttaaaacctttgtggaacagagacatgacatggtgtcactgttggcagcacagaaagacacaaaggtagagagatttcaggaacagcaaaatccctgtttcttccaaatatagcctttcctggtttttacttagcctgaagtttctacttctggaattatatttgtggaaataatagtttttatgcactagttttttagaatagcatgtacacacatacaaaggcacacagcaaaaaaatgtaaaaaacatgtggaggtatagaaggtctacaaagcagtcctgaaaaggggaaggaagtaaaagttttaaattctgtttgactctgttgctgagaatataaattagtacaaccactacagagaacagtttggtttggaaacagttttagtttcctaaaaaaactaaaaatagagctaccatacactccagcaattccactgctgggtatatatgcaaaagaaaggaaaccagtatatcaaagaggtatcttcattatcatgtttgttatagcactgttcagaatagccaagatttggaagtaacttaagtgtccactgacagacaaatggataaagaaaatgtggtacatatacacaatggagtactgtttagccataaaaaagaaggagattcaggtatctgcaacatcatggatggaactggaggtcatcatgttaagtgaaataagccaggcacagcaagacaaacattgtatagagtcacttatttatgggatctagaaattgaaacaatttaactcatggacatagagagtagaaagatggttaccagaggctgggaagtgtagtgagaggttgaggagacatggggatggttaatgggtacagaaaattagaatgaatgaataaggactagtattttatagcacaaggtgactacagtcaataataatttaattgtacatttaaaaataactaagagtatagttggatttgtttgtaacacaaaggataaatgcttgaggggatgtatacctgatttccatgatgtgattatcatgcacagcatgcgtatattaaaatatctcatgtacctcacaagtatgtacatctgctactacatatccacaaaaatgaaaattagaaattattatttttaattctgcttgaaaattttgtcctgtgagaaaacattttaaatggttcattttcaaggcatgatcaaagtactggcagccagcctgtggatgtaacaaaccacatggctcatgcacctagaaggtcacaataaactgacagaatgtagaggaggagtcagcccataaaagggaagaaagtttcgttattgggaaatcaaaatttaagcgggaaaggggaccggggtatgggcttataaggggataatgaaactaaggttatgtctgggaagattgtaaccccatagtactcaactgatgaggaactggaagagggatttgcgtgctgggagataaattacctgctataactgccctgggtgtgcctgcctacctgacaccctatctggaaagactgccattaaaagtctcacttccgctattctttgtgtctctgagtccattctttgggtttggatggatgaatgtgtgtttctcacagtctggtgcagccctgagtaaaaaccaagatcttttatgccttaaatgtttttaaaaaaatgaaaaagcataaatctatgttttggtgtgttcatagtgtgcagtcattcttaggagcaactgtgaatttacaaaacctctccattctctcccctttcactcctacacctactatctgttcagccctgcgtctcttagaattttttaaactatattctctctcatctcctagcttctactttctttcattttccttcagggctaaactgtgataaaagatggatcctctgctctgcttagcaaccccgaaagctctctgatgctgcaggagacagtctcagctcctttgagtggccttctggccccttgtacaaagtcctcacaaactcatcaccttctcttctccccaagcacactgcattccaaccacaccctttgtcttcccattccctaaacaggtctcaaacattgaatcatgctacaaacatcttcaagccttttcacatgccctctggatgtcctcctccttttctgcctagtaaaagcatccaaatccttcctggcctcacccagtaccacacagattctacaggcagaatcaggttatatcctagactctcatgatttcagaggcttaagctcttcctcccacaaagttatcccatcatgggattatgcaacacaaattatgactgaagcaagaggcaaacagaagcccaagtcccacctggctcaggtttctctgcaccccacccagtccagctgagcatgaccacctctgttcacaaggtgctcctacacaccaccatcatcggtgttggtcttctaagtttctcaaaagaacccaaggctagaaggccagactcaaatttagaattctcagacttcttgaagatccacccaggaattttaagaacctaccatcacctgacttttcctccataccggctctgcccagtactgtgagcatagatacaaggatatcttagccggcatgtccaaactcaagccacaccaccaccaccattacgtcctccaagcaccatctcttggaaaatgagactatctggacaaaaaattccctggccatggatacttagaatatggtagaaaggaggccacaggatgtaggtggccacatctctgtggtcccaagactccttgcattatggagagaagtgtagccacctgcacccgggtcttctgacaaaaggagggggcagaaatgggagtcggggaagttaggatagcatctacggacaggggcttctcttgtcctgatttaagacgatcaggcagtggtgtgtcttcaaataaaaacaaagacaagtctcactctgtgaactgtttgtctctctagaacactggatctcaaccaggggtgatttgttctctatgggatacttggcaacgcctggagatattttgagttgtcgtgatttgagaagattgggagttgctactgtcatccagttggtagagaccaaggatgctgctaaaactcctacagcacataagacagttccatcacaacaataatataatattagtttggtacattacttctaatggcgaaaaccacaattatctttgcaccaacctaataataataatggaaaacattttctaaaagttaatttgtaaattggttatatataatattgttgtcaaacagatcttaaagcaatggttcatgtcacttaactgcacaaaagatttaatcacacacacacgcacacatgtgcatgcatgcatgcacacacccagcttatgaactaaagttcaactttctaagcttgacattcaatatgactcttgatctggagcctaccctgtttatcaatttaatctttctctatgatctccttatgtaacccaaagcctgtgtctatgctactatcagacttaaatattttagactgccatatggctatctcccatattttccctatcaatttttggcatactcaaccccattcctgatagtgaattaagtcttcagctggaccttctaatgtaaaatgttcaaattcagaaactaactacacttaaaacagaattacccactagaatacatcaaggctgtaccactaagataataataactagctcttgggattggaaggataagacaacgataccatgtataaatcactgtgaagatgttaccattatgatgtccctacctcataatagcactcaatgaaatgtctgtgtctctcctataattaaaaaggcattccaagtaggaaaatagcttttgcaaataaattaaagtaaggctatttacagtaaaataataataataataataataataataatgtagcacaatagaagcttatttctcactcacataaaatccaaaacagatgttcctgcttggtggcaggagtggaagttaggctgtgtggatgaaggaagactgcttcatagcttcacgcagagccgtaggctggaagtctccatcaccttccacatgtggcttccatgatcatcctgtgtgtcaacatccagtgggcagatgggaaaagagaaagcacagggtatgtgccaccacttcttaaccacttggccaagacatggtacacatcatctcagctcatattccaccggcaagaactagtcccacctggatgcaagggagggtaggactggaaaatgagggccctggctgggcagagcttctcagcaacaacgctacactatggaaaggacattagctatctttaccacagcaaagcacaagggtataggagatgaagcaaagacagagagcagtgggcaggcttgcctggctagaatatgaattggagcttcgtggcagatgagaacggttaggtaaggaaagacagccagataacaggagactcatgactctatcattatgaatgttttctatttgagagacagctgtgaatccgaccttgaagaagagttatttgataaataatgatgtttaaaacagacactgtagccacaaagcaatttttgtttcattacgaaatgaatctggtttttattcaggcatatcttccttatgtggaaattcataactttaaaaacgaatcattgcatcactaagaactcttttcacagcattctcttaccccttccaagtacccttttcaatcaatgtgctttctccttccttcaattgcttctatgggcttgcagaatctgctgctgtgtttgttcctttgctgttctcctttaattgctgtctctgctgtgtctggttctcctcctttcttttggcccagactatttatttctaaaacccatcagcattctgtgagggttaggattcatttcagagaaactcaagggaattacctctgggtgatttttcagcccaggtatttggtgcagttaaaatgtcatttatttctctagacttgcatgatgttgtgcaaaacatgaaattaatcttaactacacaacattcaactcttgaaatttcaagacctttattaaaatgttgaaatagaattttcctttaaatatgttaatagaagagacttgttgctttccctatgtgataactttcttcaactcccacatcatctttcattacccaaagaaacacacctttgattttataacggaagtcaatggaaaaaaaacttgctatatagaaatacacatttacagtaaagttttttatgctgatattcactcagtaatagaatgtatacccatataatctattgttctagctttccatagatgtcaaaaatgttgtcagcctgatgctagaatatcactgctattagtgtgccatctagtggctgatgttgtgatattttccattctttgttgaggtagaagaggctttaagtgacatatggaaagtccagtgagattccttctttgatacaatgcagggatgacacagttgtataaagccaatggccaaatgttgagtcatctgatgatgtgtagaggatcgtttgtaagttcttacttagccaatataattaagaaatgaagctattacaagaacaattaaatatatttgttagctcgctgtatcatgatgcacaaaccatatgtgcattaaccatataccaagaaccagaatacaataaaatgcatttgaccctaaatttaaattagatttaattttactcttgttattcagatggtactttaggatcttataggtctaggctttgaatactaattctcattgtgtagtatacaaaaatgtatgtttgagctttctggttgcttggatttaaaactaaaagtggttttgtatttataaaggatcaaacctatcatgcatagtgtgagtggcagcatatccatcattttagttgattctttgtagtattataaccataatcgcatgatcttatatattgctttattccaatattaaagattgagagataatgataatgattttatcttttagttatagaattgccttcaaatgccttgttttataatcatctcaaagtcaaacaagagattcctttaatcgttacatcatttttcataggcaagtaatgagggactgaatggttttgctgttgaagacagaaggacaaaaaagtaaaatcatattctccaaacatatacagatagtattgaaaagaagtgtaagaattagttattgtatgtttgcccttggaaataacagttattattctgttattatttttaaacatctattttatttattattattaaaggagcagttatcactaatgcaatcatttcagaaaaattttctttaaagcaaacacaggaaaacagaaacaaaaaccacctccatttaattgagttcttagtatgtgccacgtgatttaaatactttacatacttttcttacttagtcctcacacaacctgataaagtttcattttataaaggaagaaaccaggctgagtcattgaataacttattttaagccacattgacagtaaagggcagcttctggataaaacctaagtgtgtccaattttgaagccgtgcttataaatgtgacaaaaaatactttataaccatgtcaggaaaacatgcattgtacctactactctacaaagtctagccaagagcagaactgacatgcattgtcttatttgccataggcaaatcaacaggaaagcgaagtataaacagttaactcagactagtatattacccagggttttatactggttaatctgccattattccagaggcaagactacaaatcacttggataacatgatcctgcaatgtcaaggtaggtaaataacttgtgagagtttttaaatgatgccatcaccactgcagaagagtatatttactccttctgctttccttaaaatggctagcattaggctctttattcagaaatttttatattataacataccttatcttatatcattatcttctcccaacaatctattaggccaacgtgctagatcagtgatgttactttaaggccctctcaatctttttgttgcaaacagaccactgtgccacgtaaagattaaagtgtaaagactgagacttcaagaataaattttaatgctgtgatcatataatatataaattttgccaaactactttttgagctgcatgctaattaaatacaatgcttaacaaccactgatatacacacacacacacacacacacacacacacacacacatagaactacttttacatagctaaaccaagaaatgggaaagcttgttagcttgtttctagattcctggattcataattcaagggcattgtgatagatctcctttgttgttcttcctatatccacccctccctccccaagccaatggaaccttaagttcgttcaggtggctgctgacatctttccctctgtcgagtatttatggatgggtttaaaccaatcgtgattcatcccagggccagggataaattatgattggtctaaaccagccttagtaatcttagtaatcttgtaactttgtctgggaatgaagtgacaaattttggtcaatgagatgaaagcagaagtttttgaatgagcctccagggcttgtctttctgattaacacagataacatagaaaagaacttttgtctttctgattaacattgataaacttacagaagacagcctttgcctttctcttctcttctgcctgcaatgaagacatagtccctggaggcacagcagacatttgtgaccataagatgacaagcctgaggacaaaagtcaacttttattttttgagacggagtctcatcctgtggcccaggctggaatacagtggcatgatctcggctcactgcaaccacatccccggttcaagggattctcatgtcttagcttccctagtagctgggaatacaggcatgcaccaccatgcccagctaatttttgtaattttaatagagacggggtatcaccatgttggccaggctgatctcgaactcctgacctcaggcgatctgcccacctgcacttcccaaagtgccaggattacaggcgtgagccatctcacctggacaaaagtcaattttctaaggatgatgcaacaggatgataggtctctgacagcatcgctgcgttcattgaatagctgtatcaggacgtttcttacctttggattccttgcaatgtgacaaaaagttttatttatataagctattgtttgtaggggtttctgttacttgcagcctcatgtattaggttgaaccatatgatatgttgtaaacaaaaatagttgaagcttagcagatttctatgattcaaccaattttatgaattgatgctgaattcaagaccctttcacttctccagcaatcaaaacctctccttttcctctctcctgccacctgataccacacaaaatagatctttatatatatatatttctgacatttaatcaatgatgtgctggtaaactagtttgttaggaggaaaagccctgatttgtactgtatttatggtataactactcccactatgtctcattttaagcttccagcttgaggtcactgaaaaaggagttggaaagaaatgctcgcaatcagctcttctgagctgctactacagccagctccagcatgccactgcccacgcattggccaaagctctgttacagtgtatgatggtcagagctaatgttagaaagtaatttattatccttactattattctctttgtagcattgagacaaagatacaagaaaaatataatatatccaataattatatgatatatatgctaagtacatattatgtacacataaaataattataaaatacaataattatatcatataattaggatatggggaaattgacaagataaatgtagatctttgccctctgattcatttagatctagtaaaaaaaactaaagaaaatgtgtcagagtagccaccaaggagacataaaatagtatgaatttttaccaacaaaataacttataattttgatataattataattctacattatggctttattataatttataagaatatataattttaccaacaaattaattaatatgaatttttaccaactagctcttctattgcctaacttttatcagttatctctaatgggtaagaaagaaaaccaagatatccttcactggttattcattttttgaaaaagctgtattctgttgcagttaaagaagatgaagcatttgacttccatttgggacagtgacctttataaaataccgccctccctcccccaaaccctcagcccccaaactcattttctctagctgttgaatgccaaaaatccatttagttttcaaacattgccttttttctattagttttaggtagctggtccaagaaatgattgagattcttcccagtttaaacttaagatgcttgaatgtactgccagtaccaaatgaaggtctctgcattcttcatcaccctgtgcccagtctccgtcttttatcatcttcttttaacaatcttagtaatcccaaataaagtgaaatggaacatattaatagttactcttggggaattttttttggactggagttgatatataactgtggctggattatcaacatggactatcctgtctggagagacaactcaatattaataatgcagattcgagcattcaatgatcctatactttgtcaagccagaaaactgtgaaccaacctagatctgtcctctcactcaacctccaagtctaatcagtcaatagaaaaaataacaaatatatactgagcacttactgtatggcaagcagagagttaaatgctcttcacctattattttatataatctccacaatcatccactgtgttgtgttactacacccattttatagatgacaaaactgagatacaaataagctaagcaactcatccaaagtcatggcactgcggtagagcctgcaaaatttgaaccccagcagcctatcttcagggcataccatgtttactatgttagcagaattataatagattctcctgcttaattacttctcaaataagtttgtcccttcctcaatatacctactgacttaacagtagttagaatcatcgtgagaccttgcctggatttactgtgatagtctcctaactgaactccttgtctctggtcttttccccactctaatgcatcctctacctagatgacagagtgcttttgccaaactatagacctgattaagctcctcactgtagccttcaggataaagctgaaacgtcatctcttaataaccctgactctgtgcgtagtggaccctgccttcctttgtccccatttccctgcacatctcgacagggcagccctactaaacagcctgaattttcccaaacatatcatcttctcacagcaacagcttccttcggacataccttgctttctgcccaaaatgtgctgactccgtttttttcttctatgtggctaatttctagcagtcctgcaaatccctagtgaaggagcatctctcagccctctactattgatcacagtatgctggccatggtcctcatcatagctgtcctcaaagagctctcagttcaggaggcagacaagtaaaccaataatccaaacaagtgggcaacagctgttatcaagccacagatcttaatattctataaagcgtaatcttatagcattcacaaagaaaaacatcattatttaaattgttatgttttagacatgaaaaacactttgactagtcaaaaagttttaggcaggccaggcgcagtggctcatgcctgtaaacccagcactttgggaggcagaggcaggtggatcacctgaggtcaggagtttgagaccagcctagccaacatggtgaaaccccgcctctactaaaactacagaaattagccgggcatggtgtcacacacctgtagttccagctatttgggaggctgaggcaggagaatcacttgaacccaggaggcagaggcaaagattacagtgaactgacaccatgccgctgcactccagcgtgggcaacagagtgaaactctgtcaaacaacagcaacaacaacaaagtcttaggccttggctgctctgtctatggagtagccatccttttgtttctttacttctctaataaacttgctcttactttacctatggactcgccccaaattctttcttgcatgagctccaagaagcctctcttggggtctggatcaggaccgctttccagtaacatcttcctggcaaaccacagagggactatacggaagagacccaaacccaaaggaaaattatctgctcagcaccacttgcctgactttgcgtaagtggtagagtacattttatcctgggtaaaggacggaacaaggctagagacccaacttaggacatttagagttcttcctaagatttagggggttagggacctcccttggtaaagtccctgttggttaaaaatggatttggcactacaggatattaactgctattccctttggaaaaagttttagctatgatgcgtgtttctagatgtatctgtgctattctcttcatttggagtatggtaaaatattcttacagcagacataattttaaggaaaatgtatttccctcagcacttgtaactttttgtttatttatttattggatgttcttgctttaatttctttaaaaagcaaaaggtacgaaaatagccataaaaacgatatcaaagggcactttattttttgaaatgaactaagtgctacatgttactctacttcatgagttattgagatttaatcctggacgtgaagtagggtgtggagagtgattgactgtagtagaagaagcaatacacttcatgggttggcagtgctggaataagattatctacaattaaatgagaagtaagatagtccaaactggaaacagtgtgtgaggttaatctgcattcctaggttagactctgacagattatgaggctcccccacttaatgcccctcacacttctctctctcaatactcattttgatatttaatcttttgtgcagccaatcaattgattagtaatttgcttgtgtacattaaaggccaggagaaagaagttgcactataccaaaaccatgtcccactttaaaaggtacctagatatagattgtccaaaacatttttacttaaagtatgctcaggaagtgttgagtaagagacaatataattgaccaacgtatgggcattctttggaagccaaggagagaagaaagcagacggtaacaaacggataagaaccataagctttcccctactatagaaagtcagaaatacagggaggctgaggcaggagaattgcttgaaccctagaagcggagtttgcagtgagccgagatcttgccactggactccatcctgggtgacagagtgagactccatctcaaaaaaaaaaaaaagaaagaaagaaagtcagaaatgcaaatatttatgaagtaatgtagaagttgcagttttcagaaaatgtttagtcttaaaaccttttgcaagactgcaaccttgtacatgttttggctggatattagctactggtacttgaaatctagtctcatcttcctttgtatgccctctgtattttaaagactagacatctaaaaaccacattttttaaagtcacttggagcaaaggttttaaatgtgatttgggttctgctaataatacgcagttggcccttcatatccatgggttctgaatctgtggattcagccgattgcagacctaaaataggaaaaataaaatttctccaagtccaaaaggcaaaacttgaaattgccacatgccatgtactagactaaatccatgtcaagaaagtaatgtttagatattgcattaggtattataagtaatctagatatgacttgaagtatatgagaggatgtgtgttggttatatgtaaatattatgacattttatatgaagggcttgagcattcatggatactggcatccatgaggagtcctggaaccaattgccatgaatagcaagggacaattgtgtgttcgtatatatctagaaagtagaattgtgaggaagtccagctttgtagctatgaacgctgacaagcaagtttgccaaaacataagtgcctgtggtagctggactccaggttctcatgtctagttttcagcttcatgagtgtgagcagctgtgatggcaatagcaagagcggcaatggtggttaaacctgaaacccatagttcgatggtagtcccataacctttcaatgattttgtaagtgtttaattgtctacattaaattccctcctaattgaaaaatctaaatagatttatatttcatgccctgaatgctaatatgacatccaaacagcaacttgaagaagcccaatttattgaaaaaaaaaacaacctataattcaacatctgtgactaatcaagatatgactaactctgccatacctccagtattcaaggtcaggagacagagtccaaaactggcattaagggttactgcaggtctatttatgcttttgatacttccatatacatcctgtggtttgaagtgtgtgaggcagaaactgcattgaatagggtatgggagaaatctatgtttatggaaagaatgacctctgaattaatgaaggaccattataggaaactgtgttttttacggtcattggtattctcctcttctcccttcatcatcttatctgctagatcttccttttccagacctctaaatgttgaagtattccagggtccataccttggatatctctctgcacctatactcactctttcagtaattgaatctggttatatggctgtaaatgacatccttatgatgacgactataagtcctcaaagtccgacacattctacttcaccacatggttagtttcttcatggatgaagttgggaagaggattgtaggaaaaatcatattaacttcagaaatggggcagatagctgggcatggtggttcacacctgtaatcccaatactttgggagtctgaggcaggtggatttcttgagctcaggagttcaagaccagtctgggcaacatggtgaaacctgtctctacaaaacatatgagagttagctgggtgtggtggcacatgcctgtagtgtcagctgctcaggaagctgaggtaggaggatcacctgagcctgggaggtcaaggctgcggtaagcatgattgtaccactgctgcactccagcctgggtgacagagtgagaccctgtctctaacaacaaaaaagaaaataaagaaaaaaaaatgaagctgatagaatagaatgtagtcatcagattagaggtcagatgagagagagtcctgctagttttaccattatgtacttgcataatacatattcagttaggttaaaacactgaactgaatcaacgagaggacgaagtaatagtttggatctatgtctctgcccaaatctcatgtcaaattttaatccccaattggaggtggggccttgtaggaggtaactggatcatggggacagtttctcatgaatggtttagcaccctccccgttggtgccattcttgtgatagagttctcatgagatctggttgtttaaaagtgtgtggcacctccccactctctctattcctcctgttccagccatgtaagacgtgcctgcttccccttcaccttctgccatgattgtaagtttcccaaggcctcaccagaagcagaagcctgtatagcctgcagaaccatgagccaattaaacctcttttctttataaattactcagtctcaagtatttctttatagcagtgagagaacggactaatacacaaaagttatgcatgtgcaaaactgaagtcagtattttgctttctgcttactgtctctttcataacattctttagtatgtacaaaatactgggttcaggagtccattgtattctggctggcggccccataacgttgaattatggcatcttacctatctgccaattttctatgcttgattttctctacctttgaccatcattatacttatcaaaattgtgtctattccttcagagaactgtttttgtttaaatatcctgaaggaaagcaatcctaaaacatagtcactctaaagaatgaaacattcttaatagtttgatgtatcatttctctcagaatttatattttttacagggaacactgctttgtgctttgattttgtgtaggcatcataattgtggaaggcctctaagaaccaaaactgtctacctgatagtctgaacagtgagaactgaaaacacatctacatctatattagcaagacttcgcaattcctctgacttcaccaacataactttattttttcaggagtcttctgcccaggcatatggcttgaatgttcactacaggaacttcccaaaagactcatcctctcttcagtggaaaacgtcaaccaacagcttgcacgtaagattctttgaatccctcgccttagccatcagtcttggactattgtatcctgatccttacccaatcctgaaccccatttttaaagacccacctgaaatcacactttcattttccaataagttggggtttcttccccccactcggaaacaatcccaaagtttgtgaggtggtgcccacccttaccaaggtaagtaataaactatggtttgtcttgtcagtgggttatgttggggtcagtggttaagctctttggggaaccagcttttgacagctccaaaatcttgcattcagaagtctgtaactattgaaaggagaagtctgtacctgtgaaccaaaaacatgtgagacaggtctcaatcaatttagaaagtttattttgccaaggctaaggacacacttgtgacacaaccttgggaggtccaggtgacaggtgcccaaggtggttggggtacagcttggttttatagattttagggagacatgagacatcaatcaatatgtgtaagatgtacattggctcagtctggaaaggcgggataacttgtatagggggcttccagatcatacgtagataggagacaaatggttgcattcttttgagtctttgatcagcctttcactgaatacacaatctgcatgtgagactcgggtagaggaatagttacttaagccttagtctggctcaatgaatctgtattttataggtgaaggaggtatatagcttttaaaaatctttgtagttatcttacttagaaataaaatgggaggcaggtttgcctgatgaagtttccagcttgacttttctttttggcttagtgattggggtcctgagatttattttcctttcacaaccttaaaatcatcagacactgcataaatgtgaaggcctaggctgatttttttttgaactggatattatgaaagatacaaaggttgaggctataaacttcaaagctgccaggatagactaaaacttcataaccaatccacaagatgccagcattccatcagtgctcaaaaatccaagaacgcacatgggtcattacagtgttcatgttatttgaaaggaaatgcaaatatggtaacatttcatttggaaaaagaaaaagaatatatatgaactaccacaagttttccaatatctgtctttaaactcctaagagctaatatgtaacaaatttaaagagagaatatttggtgagagaaggtgggggttttcctattcagcttaatggtaatttttagaatttcctattcaagaagccactagatggccctaaagcccacctttatcaaaacacacacacagagagctggcaagacgaagaagaaaaaaatttagccatttgctcataagttaaaactgaaaaaagataattcatacaaagacataaggtctatcctgtgtttacttaaggttttaagaaaatcaagttttgctacaaaacttggagcatttttctttctgggaacatataagtacatatcataataaccaacttctctacaacatgcatgatttttgatggtgctaatatactagtggttagattttccaagattgatcgaattattagagcttctaagcagaaattacatagtaaagaaatccaatacataagaaatagtgaacttgagtgagattacaactcagctgagttgtttgatcagcataagaaacagtactacacagcctctttcacaaccatgtgctgacatagtgcacagagtgttcctggctcccgtggcctcccgtatcctaccctggcacttccattcctcactggttcctgcgtttctgtctgccgctctgcagggacaaggactgtggctctcttgtgcaaggttacctctccatcacctattgtaactggtcattggagcatttctggcatgccagtgccaactatagtgtgcttaaaacatatccaccaaagttttacaccgtacttagaagtgttccatgttatttgtatttagagctataaatcagttgatttattcaaatcagaaatacaaatgagataaagggacaaagttccacaattctgctgattcaaagtaaaaataaggtattagtccaggtagagtggaaagcacaaattcatcagcagtaacaagtggaagccaggcgtgtccatgagaacagtggaagtctcctgggaattaggagacatcttggagaagacagtgggtttttccacagggcataaaatgggtattcaagccaatctgattaaaatcttcagaggcaaaagaccctagcagacccaaagttattatataagcattttaaaatagaaactgcatagagaagtggcagctgaaatacaaatgacaaaaagcctttgggtaaattggctcaggagctttgtgatgctaaagaaaatggaatcagccacaggcaacagagaaggcagatggggaaagacacagtcctgaggaataacctttgcaagcacatctgcgacgtgacacagccactgaacattccctgaatacagccgataagatcaagagcgagcatttcttaatcagtcattgctctagagtcttcaacacaaatgcctagatttttctggtaaaagaaaagctcattccatgagtgagcagcaagttaataaggagagaaaaattatcctgcccttttctctgttttgtttttcctatcactccttctcctattaaggttaattttatgtttgagaagagcatgtgttttcattatcaggaaaaaaatgtctgtttttaaaatgtattagcatattttatttgtttttgtcataatgcacccagaaataaaagaaaccacaaaagtccatgtgatgactcatgagtttttatttctcttgggtatacctggtttccttacaggagcgtcacccttctcctgactgaaccagacacctggggaaatctttccatagcactggtttctgatttgcaagttcactcatcacaatttatcaaatgaagtgggttcactcatctaacttctactgaatgcctagtatatgctgtagatatagaaataaataagcccaaagtcctacctacaaaaaagtcatgactactaaaaaagaaataaaactgtgattataagatactgtggtaaatgttgcaattaaggttcacatcgtgtaaagctttgggctgcatgctatatttatttctcaggaatccattccaaggcaagaaaacccaaccaatactcagctaaacaaaaagacatttatttgtctcagacaacacaaaagccagggaggtaggcagtccagggctgggaaaatagctccctaatgtatcagggacccaggctcgtctgtctttaccactccttcaccaccatccttggcttggaggcatttgtcttcatatttgctgccttgtggttgtaaggtggctgctacattttgaaacatcacatctgttcatgttccaggcagggagaagggggaagaacaaagggcaaaatgagtcatgttagcccattttttgcttttttatcaggaaaacaaaaaatttcccagagaccccagcacatagacattgttttatcttatccgtcagagctgtgtcacaaagccaccctggccagaaggtggctagcgaaaagcgggcatgggataggaattaggctggcggacccacagcgtgagacactaatgtaccccacatgctcctgttgctatcttctacccatttgaacaactactgtcctctctattctgcatgctggctaggagagcctaggcaacaaacagtccacaggtatgcctatggttactgctatttcaacagagttcactggagtaagatgatgagggaggaagttcatctttttgaggatttaccccctgtttacattcagtctttccatgttgaactagaaattcaaagaggaggcatcatgtctccttaaatatatatatctttcccctctttggagatcaggatctgttttagactgtggggaattcagtagccccaactctgttttcaggtgaggtaactgaaacctccctgcttcagcagtgcgattcccactacctgtttacaagagaactgaatatcccctcccctagggatcctctgctggaactccgattaccccataagttgctgttaaatcagtgaatggcattcattaggcacatatcatgtgacaagcagtgtatcatattcctctaattcttcaaaaacaactttatgagagaggtactaacgtcatctatttaaccatgaggaagtcaaagcacacagaagttaagtcatttgtccaaggttacatggctaatatgcagtgaggcagggattcaaacccaggcagttggcttcttatggagaactgggcaagggatcttagtactaaatcagctaacctcatctagtggaaatgtcattctcagagttcttcaggctgcagacaccaggcttctgtaactagctctaggtcagtttggaaaggtgcatggtaaacaccaataatttaggaatataaggcagcttaagattttaattcattcattcttcaataaatatttattgaacccctgaaacgtgctaggtttcactccatggcctggggattcaactatgggcaagagagcatggtcccttacctgaaagtttactgtttctagggaagacaaggaattaagtaaaatttgatgagtaatatactgagaaaaattcaaggtactatacaagtgtattatagaagacattcgtattttgggggtggaggtggggagtttgtcggggagtgcttttttttttttttttttttttttttaggcagagtctcactctgttacccaggctggagtgcagtggtgcaatcttggctcactgcagcctccatctactgggttcaagcgattctcttgcctcagcctctcaagtagctgggattacaagtgcgcaccaccatgcctagttaatttttgtatttttagtagagatggggtttcaccatgttggccaggctggtctcgaactcctgaccccaagtcatctgcccgcttcagcctcccaaactgctgggattacaggcataagccaccacgccaggccatcagggagtacttctaagaggaagtaacatttgagttctctgatatgttgcagttagccagacaaagatcctgactggaaagattctgactggaaagaagaggtatgggtgtttgtgtagttctagagcggggaaaacctagtttgttgaagaactggaatgaattgcaaaaccccctgaagtaaaagatacctgaagaggtgggcagaagtggagtcatgaagagctctgtgaccttctaagccaacttaaagtcaagtattttgtttatggatttaattttttttacagttataatcacaatgtccccagtaaagaaaccataatatagctcatgttgtttttgttcttaattagcttgttaacttcatggtacattgaccacttaaaaatgagatttattcttctcattaactttaaaatgtttggaaatgaattgcttaatatcagaaaacatttcttatgctttttgagagaggaaaataggtgagcgtctatttattatctggtgatgtctatgtgctggagtcttggttctccctatttcatgattcctgataaaagacttatgcctccgttcttgtagcccattcagagaccaggtttaggcgtgagtgccaccaaacaaattagagtttttgccagagtatggaattccaagtcttattttcaggcccctaggcatctgtgccaattgtgtgagttgcactaacgactagtaagtgagtggtcattgctctgctaaatcttggatatacaaatttagggggtctcaacacatgaacaggatggggaacaggcagagaggcaaagctgtgtttgtgaggaaccaagagaggcaaggcttgattcctgagttgtttggatatatgctgtccagaaagtggggtgaatatagtaccccatcctgaggagattggagctctgtgcagccaagagaaatggccccataacaggtagccagaagctcagggctctctattcacagccagaatagaggctgtcacaatcctggggaaatttgttgatttctttattcattcatccaataaatatgccatagagacagggcagtaaaacacacaatgacaacaacaaaacagacagaaaactctgccttcatgaaacttatactctagtgatgcagatagaatccagtaatatgtagtgaaaaaaaaaattcatgaccacactgggtttactccaagaatgcaattttgtattttggtcttatgtgaaaaaatcagtcaaagaatgaaagagaataattacatgtcacttcaatagttgcacaaaaaaaattagtaaaattcaatacccaagcatgatttgaaaaaacaaacactcttagcaaactcgaactataagggaattttcttaacctaattaaggatatttacaaaagaacctttgatgaatatcatgcttaatagtaaaatgttgaaagctttctttttaggatttataacaagacaagcattgtcttttattactacttttattcaatgtgcaaaattgaaggacaccgaaggccctggccagtgcagtatgaaagaaaaataaataaatgacaaagttattggaaataaagaaataaaacatcattattcacaaatatgattatatctgtggaaaactgtgtgaaaataaataaaatttaaaagctcttggaaccctgaaaatattttaggctttgagagatatgtgactgtgatctgaatcacatgtagttacaacctctattctcagattatagattaacctgctttcttgtttttcttgttctgtgcaatgactagagagaattaaacaatgccaaagacaaaacctcctgccttcttcattaatgacccttgttatagattaacttccccatttttgtcttgatttgctagataagatgacagaaaactcatgactattactccctctggaaaaaaaaaaaagaaagaaagaaaaaaaaaagttaaatgtacccttcccagaataaacacagcctataaccaatcaaattgctgtaactatgcaccaaccttatatggaaaaatgttgtaatcctcctaaaaactccctgtctctgcctacataaatgaaaccttaagttccttacttcggcatacttactctagtcctctgcagttggtgtttccaggtaggctatcttcaaatgttgctcttgaatcaactatccttaaattagattcttaacattttattattttaggctgacagttgaaaagaacctacagccaaatcaaaagaattcataagtgagtttagcaaagttactagaaacaatatttaaaaatttatttgaatttttctatacaagcaataaaaaaaacaaaaagatgttatttataacagcttcaaaaatatcaaataactaaaaataagtctagcaaaagatatgcaaggccaccatgccaaaaactataagacactattaagataaaaaaaataagacctaaatactctaactgatagaaaagactaattcatggattgcagaaatcaaattgtaaaggataattcttcccagatggatctagatatccaatgtaaacacctttgattatttttttttaaatgaaacttgacaagtgagtctacatttaactagaaattccaagggtcaatagctaagaaatgttttacacgagtaacagtggattctgattatcaagactataatgcttcggtagtaatacattggcacaagttaagagattggatgaggattataaggatagacaagttaaccaatgaaatagaaagagagccaaaaacagacttaaccacacatgggtgcttgatttatgagaaaggtggtatcatagaccagtggggagaaagggatcttgttgataaataatattgggacaattgaatatccatattaagaaaaaatttgacccctgcctgacacaataaatagatattaattttaaatttttaggcataaatatgaaagaaaaaagcaaaaaatattaagatgatacagtaagagaatagtttcatgattttagagtaagaaaagaattaaaataggacataagaaacgctaactataaaggaaccaagccacatacgtacattgaaattattaacttctgtttgccaaaagacacctttaaaaacgaaaagggaagagcagagtggaagaaaatatttacaacacaaacaaaagttaaaagtctcttacctcaaatatataaataacttctacaaattaataagaaaagattaacaattcagtagaacaatgagtcagagcaaatcacaagaggctattcaaatggccaataaatcctatgatgttaaaattcctcagaaacaatcaaaaagtgaaaaacaaactggacccagaagagcagaagcctgtggttgaaaggaaaacagagcagggagaaggaagatcaggacagtattgagagggtataccagcactgggttaaaacaatctgggtgacgttcagtaaagctccattatttttaactgggatttttggggccagccactgaagtgggaaggtttatccctttcctgtgggtctttggattttcattaaatctttccctattcccttaaacaaattttgcccttctgtcatctagtccacttcctctctgttggtggctaaatgggatcatcctggaggaaacttaaggctatttcatttcccattttaagtgccttttggggctgaacagagatctgcagttgatttgttagctggcagaagtgtggacagtgaaaattgcaaattgattttttcttgaagggtcagctattggctcacattttcaggtaatcagttatgatgctatcaaataaagccacttgcaatagtggccatctaataataacaaatgtagattaccccacacattatttaactctctaaaacactagcttgtggctgcaggtacaaaactccagtgagaaaatcttgcaaaaacatttggtgcaaaatcaatgataaaatctttcacagcattttaagagtaactgtaagaagaaagcaattgtagttattcatttaatcgtttttctaaatagagtctacacatgagctgaactcttcatttggaatgaaataatccttttgaaaattttactctgcattagattttatcccaagtggcccaagaagcactatctaatatgactaacaaccacacatctataactagtacaactccaactataactttgtaggacctattgaagtggttgacttatgcttattaaaatattaaataagaatgaaaccagtcattctttggaagattccaaataatgttgtagaaacttctattcatttatatattccaagatatcttccataaagtggataagatttttaaaaagatgtaaaaggaccaattttgagtgtggcccaaccagactcaattctggaaatcaattcttacacattatcaattattcatattaatatatcattatatatatataactttttacactgatttatttattttatttgacactataaaataaagcaacctaaaataaagtcagtattgccttggagaaatattctgttaatctttccattctgaaaatgaatgccataggagaatgacgaacaacagaaaatttattagcgtaatgaaagaaaatttaaagtactcccctaaatgcatagaagtagactatgccctgaaactgtttttgagtagaaactttctgaatattgagttacaatggtgcatttgatctaacaaaaaagatgaaaatataaagaattaattgtctcaattccagagaatattgtatatagttgtgtatatagttgtgaaaaaactggacagcacttttttcatattagttcacattcacaaagttcataacaatacaatatgactcatagttgttcattactaggaccttgaactacaaagaaacccgcagaatattccttggcagctctggcttcatggatatatgactttgcattcatacacgaatcttaagcttggaaaatcagctgagcgcagtggctcacacctgtaattctagtactttgagaggcagaggtgggcaaatcacctgaggtccggagttcaagaccagcctggccaacatggtgaaaccccatctctacaaaaaatacaaaaattagccaggcatgatggtgtgcgcctataatcatagctattcaggaggctgaggtgggagaatcacttgaacctgggaggtggaagttgcagtgagccaagattgtgccactgcactccagcctgagcaacagagcaagaccctgtcaagaaagaaagagagagagagagagagagaaagagaaagaaagaaagaaagagaaagaaagaaagaaagaaagaaagaaagaaagaaagaaagaaagaaaagaaagaaagaaagaaagaaagaaagaaaaaaagaaagaaaagagaccctgcagtacgaaaactgaactgtgatttatccatatgttatgcccctctatttcataaatattaagaaaaatcattttgactgtgattaaatgtatatatactgagccaaatatttttctttcaactattttcccttccttcccccttcttccttggattttttttctccttaacattgactatggtctatatatatgtgtgtgtaggtctagtactgagctctctatgatgttccatttacctttccttgtgccatatacaatgtcttaattactatagctttataataaagtttgatatttgatcatacaagttcccatcttgttctttagaactgtcttggttatttttggtcctttgctagtctatataaattttaaaatcaacttgtgatgttgggattctaggagtgttaatcaattcatgaaaattaatgtcaatacaatattaaatctgactatccatgaatatggtatatctcttcatttgtttaggttttatttaatgtcgtttaataaagctttataatttttaccagatatgggcttacacatctcccactagattttttttctcttggataaaatatttatttttattgtaatttaaaatagtataaatatttttaaagttttttactttttaaatatttgtttacagttcatttttgaggtaaatatacatacagtaaaatagacaaatacaagtgcacaatttgttgaattttgacaaatgcaaacaaacgtagaggtaagaatgttttacatagtataatctttttaataacatttttagctgatcattgctggtgtataaaaatgcaatttcctttttattttgtagacaattatactacccataaataatgaccagtttgttttgtttcattctaactcctaattccttttattttacttttttattcacattactataccatctaggccatttagtagagtgttaaacaaatgtagtaataataaacatctttacctattttatattaaacttaaaatttttcaccattaagtataatattgctgtagttttttgataatatttacacgtttaagaaatttttcttccattattagtttgcttaagattttctaaaccataaacggatattaaattttatctaatacaatgtgtctacttagctcattatatagctttcattctttaatatgttaatggtgcagcggggtgcggtggctcacgcctgtaaccccagcactttgggaggctgaggtgagtggatcacaaggtcaggaattcaagaccagcctggccaacatggtgaaactcaatctctactaaaaatacaaaaattagctgggcgcagtggcaggtgcctgtaatcccagctacttgggaggctgagacaggtgaatcacttgaacccaggaggcagagtttgctgtgagcccagatcgtgccactgcactctagtctgggagacagagtgggactccatctgaaaaaaaaaaaaaaaaaaagaaatatgttaatggggcatgagttggttagccaactgcacagtttgaggtggcatagtccacgcaagactgtcctcacttttgacagcaattgcaagtttaggggcttcctaaaaccaccttcaggttacctaatccacaaggactcctggaactcactaaaagttgttataatccaggttagagtgtattacaggaaggatacagattaaagtcagtcaaggaggggcacctagagcagagtccaggaaaagtatcaaacatgtagcttctgtttttctttctccatggagtcctggacacattacttttcaaatatcaaagtataacaatgtgcacaaaatattgctaatgaggaaagctcagcagagccaggtgttcagactttttattgaggctccatgatgtagacatgggcgattgccaatgtggctgatttcaatcttcagcctccaccctctccagacatgacccaaatcccccacgctaaatcacatttctggtctttctggtgtagccattctccatcttaaatcatatttttagacaatctggtgacccaaggctcacagccaaacaaagacactcctatcaaccatgatattccatcaatttacccatcacctctcagaagccaaggacaaagaccagacttcttttcggacaaagttgaattctttactatgtgtggggtgaataacataatttaactttctaatattaaatcaactttgtattcctgaaatgaattcaacttgataataaaatatttacttttttatacattatataatttggctttataagattttgtttaggatttttatatctatgttcatgaataagactggtctgtaagttttctactttatgctgtccttgcctagttttgctatcaagattatgctaaccttataaaataagtttggggatgtttcctcctcttctataacctaaaagagtttttgtaaaattgaaattattatttattaaatatttggttgaacttgtcctttagtaattggtagtacatattaaggaaatacgcacatcaatggacatgttcaggaaaaatgagtgttgaattttatctctttttttttttacatattttaagattaccttataatttttttctttacaatgttaatgtcatatattcataggtcttaaatgttgaaccatttactatctttttgttttgtgtgttgctggacttgatttgcaaatatttttatgaaataatatttataagtataattgacctactatttttatcttgcattactcttattttattatcaaaattatactaaatgtataaataaactaaataatttttttctttttttctatagtagttcgtataaaataaagattgtttcttaaagatttagtactgccataaccaattactacaaactaggtggcttaaaatgctagtaatttattctctcacacatctggaggccagacttccaaaatcaaggtgtcagcagggttaggttagttccttctggaagctttaagggaaaaacattccatgcttctctactagtttctagtgttgctggcatgtcttggagttttttggcttgtggtagcgtagttccaatatctgcctccagtttcccatcaccttctttcctgtgtgtccctctatgtcatctcttcttacaaggacaacagttattggatttaaaattcaacctaaatccaggatgatttcatcttaagatccttaacaaattatatctacaaagaccttactggcaaaaacatgacattttaaagtttgggtgcacgttactttgtatgggatactattcaatcccttccaattgcctgaaatacaaaaatatgccaggtataattccaaaatataaaagaaaaacagtcttgctaagtgagacttttgaattacttgatactttgtcttggatctgaggaaatgaagtatatttgaggtataattgctttaaaaagtactccagtggataaaagtaggtgagtagagaagaaagagtgttaacagccattagtggtggcttctggaaaggacaattactgatcagaccatctgttaattctaccagacagtttaatgtgcaaatgtaaataaaactaataacatctccatggaaaattaaaaaatgcttaaccaacattgatttgatattgagagtcttcgtctgttttgtgttgctgtaacagaatatgcaagactaggtaatttgtacaggacagaaatttatttctcacagttctggaggctggaaagtctaagattaaggtaccaataggtttggtgtctgaggagggtccagtctccactgccaagatgatgccttgaatgctgcatcctccagaggggagaaactctcttctttacatgacaggagagcagaagagagagaacccactcttgaaagttattttggtagttgcatcaatcattcataaaggtagagtcctcacagcctaaacatctctcattaagccccacctctcaacacgattgcattggggattaagattccagtacattaatttggaggggccaaaacattcaaactaaaatattgaatttctgctagaactaataactgtgttagatgaataatagaaagtagatcagtaccaataagcatttcactcaagtcagccccaacccctttcagctgcaaataatttagagtgatttattggcatgatttaactttaatcagaaattgagaagtgagtagctatattgtaatatttaataatatatttaaagatataattataccaacctcctagattattgtctcttgttactatgtttctctggaagcatttttcttggatttcgtaaaaggttctctagaagaggaagtagtctagagaacaaactgaaaacaatttgcaattgtttaaaagcaacatttcacaaattctagttataagaacttccaacaaaaatcactgtcagaaaaaaatatatgggcatcctctggggcctctatgggatggagattgttggaatccttttcatctctaagattctgtgaagtctctgagttatgaaagagtgagctgagaatctcagcattcccaggtgaagggaactaaggcaggtgatttagcaatgtggagggtcatgcttcaagatcttgttggaaacccatatcccaaggaaaaaggtggcccaggtaacaataacacagaacaaaataatagaaagataccagttttgcaggcaggtagatcagtctttgaatcctagctcctccatctctgtgtctctgttctgtcatataccttaattaaaattcaaatgagataacatatgcaaagtacctgaacattaggtgcacaaaaaatggtaggtggtattaactgtgactaggaaagagaaacaaaattgctgcataaatggcaaaaattttggtcatcaattaaaactacttacagagaatgtatatacttttaagatttatgataatttttctcatcataaagaggactgtatcagcctaaaattatcataatatggtagttattttgcacatgtcaacatggcaacacccctagttgtgtgctgttcatgaaaatacatgctgttcatgctgcttctgagaaatagagttattataggtctttccctctccatttcacttctcaaacaaaagaatatttcatacatttgtatatgtgtttttttgtttttgtttgtttgtttgtttgttttgagacagggtctccttctgtcgccccagctggagtgcagtggtgtaatgacagctcactgcagcttcgacctcccaggctcaagcgatcctcccacttcagcctcccaattagctgggaccataggcacatgccaacatgttcagttttttactttatgtaggaacgaggtctcactatgttgcccaagctggtctcaaacttttgggctcaagtgatcctcctgccttggcttcccaaaatgctgggattaaaatcataagccactgcacctggccacatttttatgttaaagaaaatattctttctttctttgaaagaaatgcctaggaaaagtgtagtgtcattacttttaaaaattataatgttttcattcatattgagttatttagctttcttgctgcaagactttattgaaacaatatgatattggtgcctgatttttcaaatagttctgttgctttacatactttaaaaatataaaaatagcataacatttggtgagttgaactttaagggtagttttcttaaatttcataaattcatactattgggagacaattttccatgggtctctcaacatttcagcacacctggcagaagcactgattgccttttgtttacagcgtatcctttcaaggatgtttgtatagagaacaagcttgacagatagatagtgtttccctctggagcaaaagacaaccatgtatgctctctagtataataagtatttttctcattggagcaaaaaacaggtatgcttactgcccattataaaataggtcagagttcttctcctttaacataacccactgcttgtgcagatatcatctagccttttttctgatgccctccagaagttgagacttgaggaactgatacaaaatgctaataatctggctaccactgttgctgtgaataataaactatcctttgtctctgacccaggaatcttctgctttctaccagcatccatgagactgtggcagaataactagcttgcagatagggtacaaatatcagatgcgttgaagttcttgacaaatatctgaaacatttatttgatgaccgtattagtctgtactcatgctgctgataaaggcataaccaagactgggtaatttataaaggaaagaggtttaatggtctcacatttctacatggcaggggaggtcacacaatcatggcagaaggcaaaggaggagcaaggcacatcttacgtggtggcagccaagagagcgtgtggaggggaactcccatttgtaaaaccatcagatctcatgagacttattcactaccatgagaacagtatgggggaaactgcctccatgattcacttatctccaccttgcccctgcccttgacatatggggattattacaattcaaggtgagatttgggtggggacatggccaaaccatatcaatcactaacaaaaggaactaatcactaactaatcactaacaaaggaactaatcactaacaaaaggaatcccatgactaattcacattctagcatatctagagcaaagcagcaaagggcaagtgtgaccatttgtaaagttgtgagtatgtgtatgtgtgtatgtacagccagttgtctacttttagaagccaggagactatttaacacttcctagaacctgggatttttctgaaacaaagaatcagattgatattttatatcaacttttaaaaattcaaagaaatcaaaaccatagtacacagtatatacactaatgataagattatgcctaaaaacacgtaagagacaaaaataattataagcaataaaaaattttgagtcactctaatatggaagattggctataaaatcagctcataaagtaaaaattgcatatagtaaaatacatatgttgaaaatgcctttaatcacccatagagtatactgaccatacagattttttaaaacaaataatgcatttaatttatttgtcaatggctatgaaaactttaaaaccattcacatgttctttccataggttttggaacttctgcagttggttttctgacttaattgtagcccctgtgcaagtcatagcattggtggtgcagagaagtgtctactcaagctgtattgttaatttaacaaactttaaatgtatgcatgacatgacttcattttacccttaaatattttcatcattaaacaggagaagataaaaaataagccaacatattgaattttaaaaacaaccattaaacaaacttaacaaggaacaaaaaaacaaacaaagttaaagacagatattaatgaatcagaaaaaaaattggttgaattaacgaattcaaaagcaggtttcagaagatgataaaataaaatggaaaggttttgaaagctcaccaaacaactacaatataagccctgtgaaggcacagtacctggcctataaatacacaataaatattatttaaatgaatgaatacattttaaaaatcaggaataggaagagaaagaataagagtgagatgtttagtggccaagactaaaggtggtgcacataatttctgcccatatctcaggggccacagctcagtcacttggcttccctggacaaagcctgtttctgggaagaaaatgaaatgatttggttctctgcaatgcctggatattatttcctctcttgtattagtttgttctcactctgctataaagaagtgtgagactgggtaatttataaagaaatgtatacccagtgaaactgagtaatttataaataaaagaaatttaactggctcatagttccacaggctatacaggaagcatgacaccttctgggaaggcctcagaaaactttcaatcatggcagaaggtgaaggggaagcaggcatgtcttccatggctggagcaagaggaagagagaagtcgggagatgtcacacacttttatacaacccaatctcacaagcactcactcactagcatgaaagcagcactgagggggaagcctgtgtccatgatcaaatcacctcccaccaggcctcacctccaacattgaggagtacaattgaaaatgagatttgggtgtggacacagatccaaaccatatcattccacctctggaccctccaaatctcatgtccttctcatgttgcaaaatacaatcatcccttcccaacagtcccccaaaatcttaactcattccaacattaactcaaaagttcaaagtctcatctgagacaagccttgtctcttccacctatgagcctgtaaaatcaaaagccaattaattactaccaagatacaatgggtgggtgggtgggggtgggggataggcattgggtaaatagtcccattccagaagggagaaattggacaaaagaaagaggctacagtccctatgcaagtccagaacccagcagggcagtcattaattcttaaagctccaaaatgatctcctttgactccatttttcacatccagggcacactggtgcaaggggtgggctccgagagccttaggaagctcttactctgtgggtctgcaactgtacttgtggcttttccaggttcacaatgaaagctgttggtggctctaccattctgggctctgaaggacagtggccctcttcttacagcctcactaggtggtaccccagtggtgaccctgtgtggtggctaaaacccacattttccctccacactgccctagtaaaggttcttcatgagggctccacccctgtagcaggcctctgcctggacagcaaggttttttcatacatcctctgaaacctaggtggaggctcccaagtctcaactcttgcactctgttcacctgcaggcttaacaccatatggaatccaccaaggcttacagcttgcaccttctgaagcagtggcctgagtacctaggtccctttgagccatagctggagctggagcagctaagacacagggagcagtgtctcgaggttgcacagggcagtggggtcctgggcctggccctggcccacaaaaccattcttcactcctaggcctctgggcctgtgatgagagaggatgccatgaaggtctctgaaatcccttggaagccttttcccattgtcttggctatcagcatttggctcctttttacttatgcaaatttctgcagcctgcttgaattcctcccctaaaaatggtctcttcttttctatcacatgaccaggctgcaaattttctacacgtttatgctctgcttcccttttaaatataagttccggttttgggtcatttatttgtgcatgcatatgaacatatgctgttagaagcagccaggtcacacttgaatgctttgctgcttagaaatttcttccacaaggttgcggtgagccaagattacaccattgcactccagcctgggcaacaagagtgaaactccatctcaaaaaaaaaaaaaatttctgctaccagataccccaaatcatcactctcaagttcaaagttccacagatttctagagcagggacacaatgcttcaggttctttgctaatgcataacaaaagtgacctttgttccagttcccaataagttcctcatctccatctgagacctcattagcttggactttcttgtccatatcactatcagcatttcagtcacaagtcaagcagtccctaaggagttccaaactttccctcattttctgtcttcttctgagccctctacactgttccaacctctgcccattacccagttccaaagtcgttttcagattttcaggtatttatagtaatgccccactcctcagtaccaattttctgtactagtccattctcgcactgctataaagaaatacctgagactgggtaacttataaagaaaagaagtttaattggctcacagttccacaggctgtacaggaaacattatagcttcttgggatctaaacattctaaacctgtatcagtttcccctcaggaaactttcaatcatggtagaaggtgaaggagaagcagacacatcttacatagtcagagaaggaggaagagagagaaagcagagatgccacacacttttaaacagcctgatctcaggagcattcactcactatcacgaaatcagcaccaagtgggaaatccacccccatgatccagtcacctcccaccaatccccactggggactacaattgacatgaagattggtgtgaggacacaaattcaaaccatatcagttccctttcacctctaatcgtgttccttgtctgtagctctgttaggtctttaccacttgagattgtgtgcatcttttcacagtttatctttcccaaccagatggtaaggtccatgagaagagaaatcatgtcataacctaaatttcttgttgtaaacaacacccagcatggggctctgtgtgctcaaaaactcctcactcctacagagtgcatttcaatttacagagtgtcttcacagatttgtctcattgttgatttctgaagtggaagaccaatatttctgactttatgatatacgaatgcttggatgagctgcaaaaggttgagcaaagcaaatgtttccattccatctagttcagccacatagacataacctttttcgttctctctaaaataaactcaactgagtaatactacatttttcttttattactggtggcattttatttaaatgtttgcatccatattcctaagtgagatgatatttcctttttttgtgctatattttctatgttttgtatcagagttatcttagttagaaagtaataactccaagatggcagagtcattcacaggagccccaatctctgagtcttttcttgaaggacaactgccaggagagctgcctggctcaaattggattgtgacatgagtgagaaatggagttttattatgataagtcatattatggtaagtttgtcttgttatagtagctagcattgcttttcctgactcatagattcttgtcatctcaggtcctgccatcatcctaggtgacttctgtgtccacatcaatgacctttccaaaaccttagccattcctcttaacctcattaacatttgtaccttcatttcctctgctgccatttagtcacagccctagagcttgtcgtcccctagagcttcccaatcacatctattcttcaccctcatgtggttctcctatctacttttctgttagacctttcctgccctcaattccttcccatccatcttattctcaatggccatgagctcacttattcttgggctaatctatcacttccccttaactctcattaaacgaccttctctatttcacaaagaagatgtgatcttcaggcaaagagttctctcactccctacacagtcctccaaatcttgtttgtgtccacaccaatcctcttctccattcctctcctctgaaaaaaaaagagctgttcctcctcccttcccatgtactcactgccttccttcctgctgtgtcacgcctttgctccactctttgtgccctgtctcagctagatcttcattctgtcctctactggtttctccaccctggcctttagatatgcccaaacttgaacttcacagctctgtctttattctgcatccttctgcatagtcaaggctctattttttgtttaccatcttcccatccaaacttcttgaaagggaagcctgcagtttcttatttttcatgcattcctcagctccccactgccatttgtctccctcctccacttaacgatttatgccaaggtaatctgttcctagatctagtggacatttctaggctttctctctcttgatctctgaagtatctggccctactggacactgtctctccttctcttcatttggctttagtgatactatcttctcctctggatttgctctcatctctttggtccctccttttctggctcctgctcttccaactgcttaaacattgctgtctccactgttccatcctcttctgttctcttgccacatattctctgatttatttcatacactcccatgtcttgaattcctaactaaatgcttatggccagaatctaaatctctggctcagctgtatcttctgagctccaggcatcttcatccatctttgtactaatctttcttctttgatgccctacaggctgcttaaactcaacatgaccaaaacaaaacaaaacaaactttcttctccttcaaacatcttagagaattgcatccttttctgcaccacctaagccataagttataaagtcagcctccatgctctcttctaccctcctccatctaatctactcaccgatctgatcaatcctagggtctaaataactctcaaatatatccccctctccatctccatcactacttctcaattaggcctgcataatttcttcccaattagtcttataatgccctaactcgtctgcctcttcctctttactgcagtcagaaagctcttattaaattacaaatctactcataccactccagctgctaaaatctgttcaaagaaaaattagacaaatttaatttaatagagtctaattgagcaaagaataattcacaaatcaaatagcctcctgaaacggaataggctgaaagagtctccagcactgccttgtgatagaaaaagaaaaaggaaagtgctgtacagaaacagaagtgaggtacggaaatggctggattggttacagcttggcatttcccttatttgaatataatttgaagagttggccacatttgattagccaaaacttggagattggcacaattgtaggttacagcctgtttacacattcggttaggttacagctcactaggtaggagaaacctttaggctgaagttaaaatacgcaaggagggagctttagatgaagcttaatttaacaaacccttcacaggccaaccacatagctttcagaacaaggtggaaatgatgggcatggcacatttcatactgagatctgcctgctttccaggcttcccctctgcacagcccctgcctctacccatcttcaactgtggtctggcaaaagcaaactattttcaatttcctgaatgcacttcattctctccagtttcttagcctttaaccatactattctctcagactggactgatatccccatcttcccatgccacttcactttacaaactgtttcttcagggcttaccctgggatactatatccttaggaagtcttccctagacattcagcaccaccacccttctttgttctcctacagcaccttgtgcatactttattagtgcacttatgtgattctgaaatgatttgtctcatttcaatcaattatgaagtcctaaaagctgtgcctcttcaatatctccaaaatcctgccttctcttgaacctggttttcctgctttcatttctgtcccccgcccatttcaaaattagcaacagaggggtctgtttcaaatgcaaatcgaatgtcccttccttgcttcaaacggatcctttaaggagggttgaaatcagaaccagtagatatttggaaaatgttactttaacatgtgaatacgtgaatgaggtcaaaaatggcttcatggaagtcaaatttctgtcaggtcttttaggattaataaactatcagtcaatggaaaatgctagggagtacattctttaaggatttggaacaggaattcaaagaaattaaagagtgtgtaagcagaaactcagttgtatgtaagaaaacccagttccccctgagaaagagaaaaagatgaagtcctttaaaaactatactgcctatttttctgtggctagtgagccttatctctcctcccttcccaggcattgtgaagaccctgtttctctagctgtgcagctgcgaggtcactagacagataaactcaagttgcaaaacatgtttttccttgaaaagtaagaaatgatgtaatgactgtctcaattgaataactgccattgtttctcacttctgtagtatgcttccccctgcacagatctccacccccccacacacacccccgccccacaaaatgcttaaaaagtaaactaactctttgttcagggcttagtcctttggatgttaatccgactgggccagtgcacctaaataattaatacatatcctcctgaaccccatcaatctctctgattccttaacaatcctgctacattttctttaaggaatctgagtaggctagattagaatgggttgcttagatggaagaattatgggacataacactggaaatgttgcccgaagctgcaaggagaattttgaatgcaatactgaagagttgcaccactacaagtgctttatgcaagacaaaatttagttctgcatctaatttccctacttaaaactaacacagcttaagaacgttaaataggaaatgaatgtttattaggtggcaggtcatattcagggtctcaaaagacactctatgtcagagcaatgtcagaagaatacaggagagctgttgggagggacctgaggggccagagagatataaatttaagagctacaatttgaatgtcttgatgtgaaaataactaagagggggaggagccaagatggccgaataggaacagctccggtctacagctcgcagcgtgagcgacacagaagaccagtgatttctgcatttccaactgaggtaccaggttcatctcactgggaagtgccacacagtaggtgcaggagagtgggtgcagcacactgtgcatgagccaaagcagggcgaggcatcacctcacccaggaagcgcaaggggtcagggaattccctttcctagtcaaagaaagggctgacagacagcacctggaaaattgggtcactcccaccctaataatacgcttttccaacgggcttaaaaaacggcacaccaggagattatatcccgcacctggctcagagggtcccacgcccacggagtctctctcattgctagcacagcagtccaagatcaaactgcaaggtggcagcaaggctggaggaggggcgcccgccattgccgagttagttgtttgattaggtaaacaaagcggccgggaagctcgaactgggtggagcccaccacagctcaaggaggcctgcctgcctctgtaggctccacctctgggggcagggcacagacaaatgaaaagactgcagtaaactctgcagacttaaatgtccctctctgacagctttgaagagagtattggttctcccagcacgcagcttcagatctgagaacaggcagactgcctcctcaagtgggtccctgaccccagagtagcctaacagggaggcaccccccagtaggggcggactgacacctcacacagccaggtactcctctgagacaaaacttccagaggaacgatcaggcagcagcatttgcggttcaccaatatccgttgttctgcagccaccgctgctgatacccaggcaaacagggtctggagtggacctctagcaaactccaacagacctgcagctgagggtcctgtctgttagaaggaaaactaacaaacagaaaggtcatccacaccaaaaacccatctgtacttcaccatcatcaaagaccaaaggtagataaaaccacaaagatgggaaaaaaacagagcagaaaaactggaaactctaaaaatcagagcacctctcctcctccaaagcaacgcagctcctcaccagcaacggaataaagctggacggagaatgactttgacgaattgagagaagaaggcttcagacgatcaaactacactgaactacaggaggaaattggaaccaatggcaaagaagttaaaagctttgaaaaaaaattagatgaatggataactagaataaccaatgcagagaagtccttaaaggacctgatggacctgaaaaccaaggtacgagagctacgtgatgaaagcaggagcctcagtagccgatgcaatcaactggaagaaagggtatcagtgatggaagatgaaatgaatgaaattaaatgagaagtttagagaagaaagaataaaaagaaatgaacaaagcctccaagaaatatgggactatgtgaaaagaccaaatctatgtctgattggtgtacctgaaaatgacggggagaatgcaaccaagttggaaaacactctgcaggatattatccaggagaacttccccaatctagcaaggcaggccaacattcacattcaggaaatacagagaacgccacaaaggtactccttgagaagagcaactccaagacacataattgtcagattcaccaaagttgaaatgaaggaaaaaatgttaagggcagccagagagaaaggtcaggttacccacaaagggaagcccatcagactaacagctgatctctcggcagaaactctacaaaccagaagagagtgggggccaatattcaacatgcttaaagaaaagaattttcaatccagaatttcatatccagccaaactaagcttcataagtgaaggagaaataaaatactttacagacaagcaaatgctgagagattttgtcaccaccaggcctgccctaaaagagctcctgaaggaagcactaaacatggaaaggaacaaccggtaccagtcactgcaaaaacatgccaaattgtaaagatgatcaaggctaggaagaaactgcatcaactaatgagcaaaatcaccagctaacatcataatgacaggatcaaattcacacataacaatattaactttaaatgtaaatgggctaaatgctccaattaaaagacacagactggcaaattcgataaagagtcaagacccatcagtgtgctgtattcaggaaacccatctcacatgtagagacacacataggctcaaaataaagggatggaggaagatctaccaagcaagtggaaaacaaaaaaaggcaggggttgcaatcctagtctcagataaaacagactttaaatcaacaaagatcaaaagagacaaagaaggccattacataatggtaaagggatcaattcaacaggaagagctaactatcctaaatatatatgcacccaatacaggagcacccagatcttaaagcaggtccttagtgacccacaaagagacttagactcccacacaataataatgggagactttagcaccccactgtcaacattagatagatcaatgagacagaaagttaaaaaggatacccaggaattgaactcagctctgcaccaagcggacctaatagacatctacagaaatctccaccccaaatcaacagaatatacatttttttcagcaccacaccacacctaatccaaaactgaccacatagttggaagtaaagcactcctcagcaaatgtaaaagaacagaaattgtaacaaactgtctctcagaccacagtgcaatcaaactagaactcaggattaagaaactcactcaaaaccgctccactacatggaaactgaacaacctgttcctgaatgactactgggtacataatgaaatgaaggcagaaataaagatgttctttgaaatcaacaagaacaaagacacaaagaatctctgggacacattcaaagcagtgtgtagagggaaatttatagcactaaatgcccacaagagacagcaggaaagatctaaaattgacaccctaacatcacaattagaagacctagaaaagcaagagcaaacacattcaaaagctagcagaagacgagaaataactaagatcagagcagaactgaaggaaatagagacacaaaaaacccttcaaaaattaatgaatccaggagctggttttttgaaaacatcaacaaaattgatagaccgctaccaagactaataaagaagaaaagagagaagaatcaaatagatgcaataaaaaatgataaaggagatatcaccactgatcccacagaaatacaaactaccatcagagaatactgtaaacacctctacgcaaataaactagaaaatctagaagaaatgcataaattcatcgacacatacaccctcccaagactaaaccaggaagaagttgactctctgaatagaccaataacaggctctgaaattgaggcaataatcaatagctcaccatccaaaaaaagtccagtaccagatggattcacagccgaattctaccagaggtacaaagaggagctgttaccgttccttctgaaactattccaatcaattgaaaaagagggaatcctccctaactcattctatgaggccagcatcatcctgataccaaagcctggaagagacacaaacaaaaaagagaattttagaccaatatccttgatgaacatcgatgcaaaaatcctcaataaaatactggcaaacagaatccagcagcacatcaaaaagcttatccaccatgatcaagtgggcttcatccctgggatgcaaggctggttcaacatacgcaaatcaataaatgtaatccagcatagaaagagaaccaaagacaaaaaccacatgattatctcaatagatgcagaaaaggcctttgacaaaattcaacaactcttcatgctaaaaactttcaataaattaggtattgatgggatgtatctcaaaataataagagctatctatgacaaacccacagacaatatcatactgaatgggcaaaaactggaagcattccctttgaaaactggcacaagacagggatgccctctctcaccactcctattcaacacagtgttggaagttctggccagggaaatcaggcaggagaaataaataaagggtattcaattaggaaaagaggaagtcaaattgtccgtttgcagatgacatgattgtatatctagaaaaccccatcatctcaggccaaaatctcctcaagctgataaacaacttcagcaaattctcaggatacaaaatcaatgtgcaaaaatcacaagcattctcatacaccaataacagacaaacagagagccaaatcatgagtgaactcccattcacaattgcttcaaagagaataaaatacctaggaatccaacttacaagggatgtgaaggacctcttcaaggagaactacaaaccactgctcaatgaaataaaagaggatacaaacaaatggaaaaacatcccatgctcatgggttggaagaatcaatatcgtgaaaatggccatactgcccaaggtcatttatagattcaatgccatccccatcaagctaccaatgactttcttcacagaattggaaaaaactactgtaaagttcatatggaactaaaaaagagccctcattgccaagtcaatcctaagccaaaagaacaaagctggaggcatcatgctacctgatttcaaactatactacaagactacagtaaccaaaacagcatggtactggtaccaaaacagagatacagaccaatggaacagaacagagccctcagaaataatgccccatatctacaaccatctgatctttgacaaacctgacaaaaacaagcaatggggaaaggattccctatttaataaatggtgctgggaaaactggctagccatatgtagaaagctgaaactggatcccttccttacatcttatacaaaaattaattcaagatggattaaagactgaaatgttagacataaaaccataaaaaccctagaagaaaacctaggcaataccattcaggacataggcatgggcaaggacttcatgtctaaaacaccaaaagcaatggcaacaaaagccaaaattgacaaatgggatctaattcaactaaagagcttctgcacagcaaaagaaaccaccatcagagtgaacacgcaacttacagaatgggagaaaatttctgcaacctactcatctgataaagggctaatatccagaatctacaatgaactcaaacaagtttacaagaaaaaatgaacaaccccatcaaaaagtgggcaaaggatatgaacagacacttctcaaaagaagacatttatgcagccaaaaaacacatgaaaaaatgctcatcatcactagccatcagagaaatgcaaatcaaaaccacaatgagataccatctcacaccagttagaatggcgatcattaaaaagtcaggaaacaacaggttctggagaggatgtggagaaataggaacacttttacactgttggtgggactgtaaactagttcaaccattgtggaagttggtgtggcgattcctcagggatctaggactagaaatactatttgacccagccatcccattactgggtatatacccaaaggattataaatcatactgctataaagacacatgcacacgtatgtttattgcggcactattcacaatagcaaagacttggaaccaaccgaaatgtccatcagtgatagactggattaagaaaatgtggcacatatacaccacggaatactatgcagccataaaaaaggatgagttaatgtcctttgtagggacatggatgaaactggaaaccatcattctcagcaaactatctcaaggacaaaaaaccaaacactgcatgttctcactcacagatgggaattgaacaatgagaacacatggacacaggaaggggaacatcacacactggggactgttgtggggtggggggaggggggagggatagcattaggagatatacctaatgctaaatgatgagttaatgggtgtagcacaccaacatggcacatgtatacatatgtaacaaacctgcatgttgtacacatgcaccctaaaacttaaagtataataataataaaatttaaaaaaaaaagaaaataactaagacatatactgacctagaaaaaaaaatttaaagaaaatcattacttactgtagtatttgaccaaagccagtatttgtttaaatactaatacttaaatatatattaatcctattttattttttgaaaaactttagttaaaacaaatttaatagagtttatgtgagcaaaggacaattcccaaatcaaagcagccctcaagaatcagaagggttcatacaactccacttggcaacctggcagtatttcagacagaaaaaggctgaagaaaacaaagaaggaacaaaaagcagataggttgtttcaaagttactttccttgtaaaggttaaaccagaggggacttccttattatgctgctaaaactggactgtttgggaattgggctattattgctctctcttggaaggtcagataaacaatttagtttttgcttggtggtatggaactttagcattagtgactccattttggtttggtctgttggggcctagtccagaaactcagtccaaagcaatggcttcccattattttatttaacacattgtaggggatgaaaagtatcttttcctcatccatccctaagttcacagcagaaggccctataacaaaacacagattaacaagagaagagtaaatacattatttaatatgttttttgtgacacaggggccttcagaaattaagacaaaaagaaataggtaaacttgtgtatttttacacttaggttaatgaagaggtagatagtcgtagagaggtatgattagacaaagagagtgtgatctaacggtaataaacaggggaatttggcaaggtctgtttgttcacattcttccctgtgtccctctcttcagagaggcgggcggatcacgaggtcaggagttcgagaccatcctggctaacatggtgaaaccccgtctctactaaaaatacaaaaaaaaaaaaattagccaggcgtggtggcgggcacctgtaatcccagctactggggaggctgaggcaggagaatggcatgaacccgggaggcggagcttgcagtgagccaagatcgtgccactgcactccagcctgggcaacagagctagactatgtctcaaaaaaaaaaaaaaaaaaaaaagaatgttccttccctccaggtataggaaggatgcctcttgaatgaagatattttctcaaaggagaagggttggggaaggttgagcatggcatctacttcctctgttttctcaaattccaagcctccatattttgagatggcatgttctgaagcccatggctattccaaaataatccattctcatgacaacaatctaattggtgagaataggcaacaactacaataaaattagaaaaaagggtgccataattttaaaagaaaaaatgctacaaaaattatttgtccccatcgagaaagcaataggttgtttaagactgtgctctggtgtgtagaagcttggttatcaaattcaagtgctcagaggaagatgttttattctctgtttataaaaaataaatagttctgcattaggaaaagtttctgcttaatgatatgaatcatctttaactagctaagagtgaaaccgttgatttttgacttgttaatctgcttgaagactgggaaagggtgaattactgtagtttcagttattattataactattatttttgttttctgatgaagtttcgctcttgtcccccaggctggaatgcaatggcgcaatctcggctcactgcaacctctgcctcccagattcaaacaattttcctgcctcaccctcccaagtagctgggattaccagcatgcgccaccacgcccagctaatttttgtatttttagtagagacagggtttcaccatgttggctaggctggacttgaactcctgacttcaagcgatccactcaccttggcctcccaaagtgctaggattacaggtgtgagccaccgcacctagccttctgttactatttttaaggctttaaaaaaaaatagattgataatagaaacacctggattaaattccttgacctgcaatgattgtagagctttatgttgccccattttatcagtcaacaaatttgtcttaacattaaaaaaaaaatcttgacattaatgagatacatattttgcaaacttaaagttacgtaagtatttctcagaaacagttattatcatgattcagaatgtcagttttgataatattataggatattttatgacatcttaaagtaacatttaaaagtaggtgaaacggactcatggtggattgaatatggttatctccctccctccattaacctggcatttactgaaatggcaacacttttaggagtaacacagaagggtaatctctcctggttacatgccatttaagaaatactggtgatagcaatgatttaaacttaatgttagaaattgagctgaatgaaaaaacataatgtgtttttagactgcaaatggcatgtattagtagactccaaatagtgagattctaaaaagtatactagtctgggagaggactagacttttctagactagaactaaattattttgaaactagtattttaattaaaaaaaaaaagaaagaaaagggagagaggaaaaagagagagagaaatagagagagggagagaaagagacaaaggaaggaaggaaggaagaaagagagggagggagggaagaaggaaggaaggagagatatggaaggagaagagagaaaattaaatagaacaaacaatacttggtgccaaattcagtggacatttttccatgagaataaaaacaatcataaaactataaacatgaataatacataggaacataaattttgtggctgctgtcaaaatgataatgctgctcctatttttagaaatatttttactgtatacattcagttaattttatccagctgtcagtatgcattctggaagttgccagaaagtgaatgaatgtgaacatttaaaagaatgaataaaataatcttaacatgtctgtgagtgtaaagaagagctcgtgcaccaaatggcttcactgtctactttttggcacaggtatcaaggtggtacatgtaggatatgctcttggaattgtttttccaacagaaattttagatttgtaatgaatattttcaatcttaaagggtctttctcatggccaatagtagcatccttttctgagatggctggtggggaccacagaaccagtctgctgtctgataaactaatccagacaagctcagataaggatttggctcttgagctcacactcaaaagttccccaatacaatgacaagcattcttaattcctccattacaattttttttaatggtgtggttaggttgtctgggtacccatcagcatatggcctttgcactgaccactggtaaacagaggactgtgtggccatgcaatgatcacaggctttgggatcgagggatgtggggtcaggtcccatcctggctacccactagctatgttatataacttctggcaattttcccatctgaaaatgggtctaataatgtctacttcacagggatagcttacctcttcacaattatgtaagcaaagaatttagcactgtgccaaacacagaatacagtcaccagggccgacagcagtcacttttggcagctctaacatgttgctgctcagattttcatgtactggttgttttttttttaaatgaagccaaaaattataggaactttacctaacacccaatgatatctgaatgccttcttcccacaaaagttatggttattccaaaattagaatgttaataataaatcaaaaacagtgggtcttaaccaagaaagacagccaagtgttttgaagccagacaaatcggtttctaatcttaacttcctacgtactaggcacatggccttgggtgagtaattcatgtctttcaattttctcatatgtaaaatgggcaacagtacttacttcatggtgttgtcatctagatgaaatgaaacaacgtgtatgaattctggctgtgccatttaccagctgtgtgatcttgggcaagtttctaaatctctgggtgctgcagtttgctcataggtcaggtggatttcacagtcatcctaacgcagaggttgttaggaggattacatgggttagctcagagaatgcacctaaaacaatgactggcacatggtaagtactcaataaatgttataacgctactcatttttcattgtcacttcttcttcattggttttattgttaatagccagaaattaggttgatgagataacaatggcgtagagttgaaaaaattgctttaacactttagagcataacacgccaagaggattaacctactggaagtggtatgctgcccactgctctcttggatttaatattacatggactctcaatggaaagcaaagaggagttgaggtggggcagaggagaagtagttgctctggaaacactgatggaagtgagagggccactcagctgtggtgagccacctctgagccactgaaactggcccagtgtcatctttcatagttgtcttcaccttgcatttcacagttcacaaaacacttcatatccaccatcacacacttactctccccatgctaccccttgcagtaggtggatatgctgagtggccaatccccatactgcataccccactccactcaggtttcttttttgcttggttttctctctagtgatggaggtctcccctcatatcaggaattaattaaaaaaaaaagttgccatggaagttgctgaaagtttccaagtatcgacaggagaatagttaattggcctgtcagactacacaacctcctcagaggtcatctctggctgagtaaacactgcatctctgccatttactcactaaagcagtcaaaattcctcttgacagaactggattccaaaacaacaacaacaaaaaaaacctgctccaaaggtaagagacagcttattaaatttgtgtcaagcctactgcctgataccttttaagcccagtctgatttctttcaggcccttgacacgtgctaattggcattactctgttagcagatgctgagaggagacaggcatccaggcttcctgcttctctgtactcagcatgacatcctctcataaataccaaatgggatgccttaaacgactgggaaatacatgctaaatgggtacttagatgtatttagacagcttatttatcactgaatatggcaaaactctttgtgtgctcttttggggaggtaaagaatgtcacaagcgatggagcaaagtagaaaatgtgccacatggaaatcaaccatattgtaaacagtacatgcctattatggcctttccacaccttacagtttattactatgggagctcttacagctccttcctgggctttcattcttttgacaaatatttatcattgctgggctaggttctgttctgggcactgggaatacaccaccaaacaaaacagataaaaaatgcctgtcctcgtggaacttatatagtaataaaagatgtaggatgtcgcatggagatgaatgtgatggagatgggatggggtggggtggggtggggtggggtgggatggggtgggcttgggacagagttggggaatcgactttaattaacctggtcagaggccaggctgagcaaagacctgaaggaggccaagccagtcaggccggaataggaggagtgttttagaggaggggcagaagcctgaggggcagccagcttggtgcacagagactggcagatgagagcacagggagtgtgggacagcgtggtgggaaatgcggctagagaactggctggaggtggatacaagccgacctttgtaagggctcaaccaccactgcactttagaatcccctgtggagcttttaaaccaagtgaatcagaatctcctgcggtgaagcccaggcctggggatgtttttgaaatctccacatgtgcctccagtgagtagtcagaggaaggacatgagctgccttctgctcagagggatcctgagctttaagaacagaccccaggaggggacgggtggatgcagggaggccagtcaggtgctgcaatcatccagggagggagctggtgactgggatgtgggatcaagtggtggtggtgagaagagctcagactccaggtatattttgaaggcagagccaagagaatgttcctgcagatcaggcatagggagtaaaagcagaaggtagtcaaagatgacaccaaggttttggggctgagcaattggaagaatggaattgccatttgactgaaatgagaaaagtcatgggaagaacctagaaggcatttttacatcatatacgaacactttgcatggaaatgcccatagatagtaaaatgctcagtacctggcacgtaaaggattcactaatgcttttaaaagacagtatgtgtggtgaggctgaagggcaagtatctacagctgagtatctttaaggtggtttggtagcaaataataaacaagtgttccaagcatttttccagagatacgtagaggagatgaagatgtagccaggaaaactccctataaatgtctctgcctccatctaaatctttagataatgtgggaagaggcttcattgcctggcagaaattctggcaactgcccctacattcaaggaaaagtatgagatatacttaatactggtagatgacactcccatctcccccagtgtgtggtacttaaagctgaataccctgagtgacaaatagcaggggagttagccagtcaccttgccactatatgtagaaaatacctacagagcagtgccttctctagttctttaggaaaacctcagcccttttacggggctgtatataatttcattttcaacaaccctgccaaattcctaacatgcttaatattgaccaattaaacaagaaaaaatgtaataatacatttgtcattcaaatcactatgtactatagctaattaaggtccttattacaaattatatacaatagtcaattatatgctttttcaattgaatccttacatgagtaagatttattaacacaaatagctcctgacaaacttggcccaggaacaagcactgtatttcctctgggttttggaaaaaagtcaaagttattataaacggttgcttaggggagatatttgctattttctccactgatttgaagtaggtcagattgagagctgaatgcttccctaaggttataattaagtatgaatattaaaaagctgagaacaaataaaaaaaatacaactgctttaagctttcacatcacagaccttgcattgtgttttcacctcaggcaagatactttctctgggaaaaggaatacggttgaaaaaataggctttaaaaaaactgcaatagctctacaagcctagactttgagaaagatttgtgcaaacaaaagtgctttgaagaagtatttaaccaggtagagttggggcaaaaatgcacacaaatgctgaaaaagcagcctgaactattgtgatttaattctgcaggacagtctgatgtttatccccccgcccccttgaaaatcacatctttctgcctcttcccatccaaatcattcactcttataaaactagcttagtcagatcaatatctgagctagcaatgtaaatttaatcatggtgaggcctgggtaaacattagctctaagacatttcttggtctatagagtgataactgaattaagtaggattatttcatcattacagtattaagcccacaatgttacacaagagaagctaatatttctaactcttttcagcttagcaaaatatgctataagcatttacatgagccaatttagtatgtttcctccttgaagagctatgaaataggaatacatggcagctaaattttcagtgtagagagaggaatgtctagtaatcaaactatcgaagggcctcattataagaccgttcctgggatgctggcactctggcctcctgacagccactttagttgaattcccatggacctgggaattcacagtcttgccttccatctcctgcattttcagctgtgcagattctctaaacatagtcttccttgaagcccccacttgggcattatttcttccaggaatctttccctgacttccctgtctttgggcatttctgtatcatggcactggcctcatgataaaactatatttctgcctctctttgaaacctgggagcagcttgatcatcattgatgtctgggtcaagcacaaggactggcatatattaggtattcaatactatttatggaatgcatgaatgaatgaacgaatgaatagaattaaaaagctaagacatggaaacatatcccatgtgctaggtactggataaagagatagaaggcatatcctctagaagttgaagatctgggtcaggaaggggggaatataaagagaggcagaagaatataagccggcatttcttaaggaccaaagcagtgagctgctaggactaaggcagccgcagcatggaaagacagagtagaatcctggaaacagccagcacactgaaggaaaggtagcctcaagccagacaaaaggaggcaggagggcaaaggggacatgatgagcaacgccctcttatggagctgagaagaattacagtttaatttattagatgacagacattgaaagactgggttctgaatccagacaactgggtttaaatcctgactcctttactacatgctctctgggcaaatcacgtaatattcctaagcctcagtatctccatctgtcaaatggacacgaaaataatatccccctcacagatatgagataaaatatataaagccattagcaaggagcttacatataagaaatgttattattgtttttattcacattctgtatggcatggctaggacacacacatttaaaaggcttcagcctaactgtatggaggtgagggctgtgcatatagatagaggaccagtgcaaaattttaaggtccctgactcctctagatttgattaagaatgataatgtataaccctaaaacatcagctagctgcaggtcaagatcctagctaaggtaatatttgcggcatttgtgggatggttatgtagtatttaaacctgtaccacattggcctagttggttaaaacaagatctctgagtatattcccttctcacctcctactggccattatagttacaaatagattacctcatttcttttgaatgggtttatttgtttgctctctcagttgtactgtaatctcctttaagaggagaaagtggttattatacatcatttatggctgtgtctagcaatgcccaataatcttctttgggttactactagccattcatcaccaaagtgatcaccctcaatcctagattcttgactccatgactctaagatcctgtggacactacaaaaattttctacaaatacatttgacactctgctaacctcatagggaagtttaatcaagtaagctagtgagactaccctgttaaataattttaaaattatcttgagaaatctatttttaaaattagttggaagaatctcccatggggtctgacttgtctctgccactttcctagaaatttaaaacaaattctctgatattccctcaaatagaatgtttacccatacatttgggtcattttttaatttaaaaatattgaatgtaatcacttattcatttcaatattttgatatatagtttataacgataaagcagatatttattttgcatattaggcaatttcatgtgtgaagtgcaactggactaaaaagagccaatagactggagccaatagtttataaacctcttatcttcttaggtagatttcaaattttgctacttagtaacacattgtattttatagggaaaaaaacatgttcacctttattatgatttataatcccctgaccttccatttctgttctccccagacttgctgcgagcattagttcattcaactcttacatttatagagagcttgcttctcactcatgctttacaaagtcattctattggttaaacgtctatgcgagtactgtggagagatattttttaaaataattatcatgataaaaacagcttattaactcggtcacctgggaaaatgatttatcctttcccatcttttgctttttaccatctgtaacagagtaatatttcctgtcatttaaggctgctataacaaggaatgataataaataaaaactatctcacacagtgtccctggtatttagtaggtgcttaataagttaaaaccagtataaatgccatatgcacattttacaattgacaaagtatctatttttatatactctggtccttattgtaaaagagcttccttccctggcatctatccacaagcaacaatggccgcttaagcagtcctctaaattattcaagagatagttataagactttttagttctactttttatatattaccatccaatattacttgcaagggcaaattaatcatcatctttccacactaactttcatattataataaatcatgaatcagggggctggctcttgggcagggatgaatgagagaaccatgaaaaaaatcttgtgctttctttaaaaactattcttctaatatattggagaagcaaagagtttgcttctccgtagacgaaatctgcactcaaacatccttggaatatgtcctcactttattataatctaatcaaatttgaaagctccaaagctcattgctaggaacccaatctgttgtagctgcttcaaactagaaatagttttaacaaatgaaagaatcagggatatagtcatctcaaagtaattattccatgttccccagtttagaaaaatataagtcataagttacagccaatttactctatgtttcatttagtgtccgtgaatcaaactcttctgtttttctaatatatgagaatatttttagagggctaaaattcttctttttattaataaatgtattagcaagtaaaaggaatgtattttgacatagcctcaaatacacaatttgctatggtcccatttcaggatgtgtttcatcaaaataggtagaatcagaataggtagaatcagaatggcacagtaaatttaaaaaaaaaaaaaagttgggcaggccttaccccaaacatcttgaataggaatctctggttgagaagtgtgcagggggtagctgctggaaacccttgcttgtttagctttcccctacgagtctattgagaaacctagttttgaacctactgctagatcatttggtaaactagatgacactggaaggtgacaccaagctagcagcagttatggcaaaggaaaagcaatgatgctgtaggatgcttaggctgtatcctgttttaatagtgcttcgccagaggatcccaaatcaaatatcttttcagaatttgaactggtaatgtctcttcctgttcctctgatgtttccacccccctaagtttaatctacgtcccttgtgattgttaggaaaatgtttattttaaaatataaaaaacatttttccgtgcaaataattcaagcaattaaagctaaaaaatgaatatattttagtgtctctagactgaacagtgaggactaatgcagaagttaattataaataagaaaatcttttaggtccttctttcagattctagatcttgaaagtgtctttaaaattttaactcacaactatagaatatattatcatatgtatatagggaatagtggacccagtatctttattataataaaaaatactctaagccttggaaaatttcacttttatgaactttgattgatttctccagtgagtttccacttctcgcaactatataataaaaaatactaagtggcttaaaaaaaatcagttacatagattattacttggaaagaaaattatataaaaggtctcagtgagataaattttaaaagggtaagttacttttgttcttatatttaaaatatatgtgatcaggctcctataaaaaaattggtacatccaagaacttaaaattctacatcataacattcagtttcatacttttttgatcaacagcccttcctacttttgctcaaaacacagctttgcttttcagtatttgggattttctttctgcttttgtttgtttgtttgttttggttataagtatcttagtttctatctcagctcatcctatccttttgccagaaagccattccttactcctagcactgtccatatttccctggcaaatgcaacacttactttcataggatcaaggatttgaggaatggaagaaccttagcggtcccttccgaaaaagatttaatttaggaatcctctctccaacttccttgtcagaggatggtcctagctctattaaacattcccggaatatcacattgctggagagctttcatggatcaagaggtttcccttgtgtccagactagctgtatgatcctaaacaaatcacagcatctcttgagtctgcgtttctataaagcaagaagaggtgatgatttccaaggtcatacaagtcacagaattcttcctaattattttaatggcagtaagcagaataaaatgcttgcttgtaacatctttggctctgaaggatattgtccaaagggtgaggttggtgtttaaggggcagggacagtaatttttaacaccatccaatagggacttttcaatgctaccgagcagcggatctacatactgttccctaaaaggacacctcctggctacttgttccttaacttcccgctgcccagtctgccactgaaagccccacatggcacttagggagctctcaccatgcatccctgattatcgttattactattactattctgatttgttcacagaaaaccattactaccagtcagtggttgatcttctatccttatctacttatctgcaatatttttcactgttgcccactcccattctttaaaaattatcttctttcttagccccaggacaatcaatctttgattctcctttgcaatgttttgatcacttttttatgcccatcccttaaaaaggagtcatttctttggacctccaatcttcaccagggagaatgctaaaccccagctctccttctttccctgccactgtttgaccttacacaggtcgtattctctctgggcctcatttgtccctgagaaaagagaaggagctggagtgatgatgtggaacatctcttcaagctgtacactgctatgctagtcatcttaatcccattcctgtattccttcagtatgtggtagagtttcagaaagcaagtataggtctgtgatgatgctaataccaccaagaaatcattcattccagtatggggagaaaccttaaacaccatctggtctgaaacctttgttttacagatgagggaacctaggttcagagagggtacttgattgcctcaaagcagagacaggataataaggaggtctcctgggctctcacttgttgcaaaataaatttgagtgttttctggatctggctaaagtgcacaatgatatcagagtaaaacgtcatacggaaggtataaattgatctagaacacattaaagccttcccctccccctttaaaaaaatcaactttaagaattttggagagagatttgctatcagtggtgctttatacaaaatagcataatctgataacataagacattttagatttatgtttttaaatagccaaataaaacaaaatatcaagtcacagattacatatatttacattaattcaaatgtccaaagcacagtacagtagggtctatttaatagttcacataatttaagatttacatatacacaagcacatgaaccaatattagtttgctagaacagggatttaagaagttactcagacattttggtattgacacttacatatttatggcaacaaattatgatgactttaaattttcaatgagatcttttgtacaagaatacagaatgggaagaatgtacaaaatgaaaagacaggcaaacaaatgtactttccttgcactatttctataacaccatataggatgtggcattatccagtacattttatcagtgtagtctattcattctggtctaaaacggtaattttggctgaataacccccaaatctaactttgctttaggctttataattaattgatgcttgattcttctttctacatcttttaaaaatgaaattggacactagtgtttttctttaaaataactctggtactagtaagttagcaaagtctatttttaaaggacactaatacataaagtttattttttctttcaatatcctaaataaagggacaatgggagtcatatcacctttgggcctactctgaaattaccaatagtgctaaaagctaagatattgtgatctagaacttaaactttggaaaacaaccccatctttctatggcacattgaggaactgaagtactttacctcatttcctaccaatcattttaagagaatttggttgtatttcaaagaacaaaacaacacaatttctgtcctgctgtttattttgcagaccacacacaaagttaaatatgaacagattaaattatgacatcatacaaatataggcacaaattaagtggacgccacaaaaggtgtgtcagaaaacactgaattgactgaatctgagtcagatttccccctcgtggactttaggatgccctcagctatcactgcctcgctgggaaagagcctgactttcccgttctgccctgctgcagtatccttcaggggttccaaaaacaccactcttttacctgcacctgccttccgttcatcagcggaggcatcactagcggggccaggactgagaatcgatgaatgggcattgctttggtgtagcatatttttctgtctcttggttttacacttgcaggggcatggagtcagatagaggtacaaaagtaccaaaacgatactggccacgcaagcagcaagagtggtaaaagctgtgttaaatgcctcatgagcatgggatctgcttacagtgaaattgctcacatttattgtgacgtccacagtttcatttaacaggcgttgcttattcattgcgatacaagaatacactccagcatcctcaaaacgagggctttctataaccagacttccattgtgaaacacgtaaaagttttccatctctttatccggctctagcagtctgttatctggacccacccagatgaaatccgtatttgcattacctgtcttgctgtcacagtggaccatcagtctttccccgacctgagcctcatgaataaagccaagcgcacgaaaggaaccattgatgatgctgtcagagcaattcataaagctatcctggagcagaagtacctgacgcgagtgcctggagtcagaccacaggcgacaggtgtaatcgttcttaaaatccatcactgagctaaagtgcctacgataccaaaagaccagcaaggagtacagggaacagtcacagacaaatgggtttccatgaaggtagatgcctctcagctgttttcctggcactaaatttatgtggtgcattggcatggaaggaattcggttataagaaacatctaaaaacatcagttctgccagcttgaaccttccaacatacaaatccatcggaaactgtgtgagaaaatttccacttaagtagagtttctgcaactgggagagccctccaaacgctgaaggatcgagataggatatgtgattgttgtaaagcagaagcacttccagaaccttcaactcttggaatacagcatttttcaccgtcttcagcttattggacgataagtcaagacacttcaaatttggagttgtggaaaaactgcccgtggaaatgctggtgatgttgttatgacgaagaattagggtgttcagctttgcaaacgatactggaatccactcagaatccagaagcccaattctgttataactcaggtccagtctcttaatcagtctgaaaaggttcccaggcaccttggacaggtttttgttggtgcagctgacgatgtcagtggcacagatgcaagcggtggggcacaccccagaggcaccagggcccacagtcactgtgatcatcagcaaacacagcagctccctgcagcccggtctgacgacggctccaagcagggtgggcagagtgtgtacacgtaacgacattatggtcgcctctgagtctcttcccggtgtcttttccaccggctcagcctcccaccagtgaacctggcaaacaattaataattcagagggagtaaaaagcagaaactgactaccactagttaacccataagagccataccttactttctttccaataacttttgaaatgggttttatttcacaatagggagctctgtgttgcctcttcactgttaaatgtattttttcctctttcctgggttagtcctgcttataaaaatgtacagtcacattctctccatacaacccaccgtctcacccaccatcagaaactcaattttttcctaaggtgcatcctgcgttgttgttgttgttgttgttgttttaaactccctccaacagacacaactatacgcaaacgtacgctacaaacaattaaacggaaatacttagcaaccacccatccaggaaaaaactcacggtgctggggagcctcgtgggctccggggaggctgcctacgcagtgccttccgaaggtctgcgcgtccgtctgtccgtgtctgtcactcttgcaccttccgacttcctttccctccggctcccggcgggcggcaccctctagccggctctcaactttgaggagtttcaagcagccgcggcggcagcagcagccctggacgcagcagccaagctcttcgctggctcccgggggctctcccgggttcctctcattgcaggctgaaggtaccgcctcggcgctctggccgccgtgtgcccgcgcgcggggcgccccgctcccagagccggggccgcgggagggggcgcaggcagccgggcggcagcgggcggccccgcctctccgcactcgggaggctgcaggacccggggttcccgcgcgcccggggccgggagacgggctggggcgccggtcccacccctgcgcgtcctgcctcctgcgggcagcagctcggagcctgcgggagggagcaggctgggcgcgtggtggggggcgcgcgatgcggagggggcggcggcgcagccaatccgagaggcggccggcgccccctcataccgccccgcggcctcgccgcctcctcccgctttcctcctccagctcccacccggacctctagaacggccgcgcagagcggggagggggcaggggtccacaccagaggcccagactctggtccttgagtcaagatgcccaacccactcgcctaccaattacgtcccttcgtccagctccaagccgggcggtaatggggtccaggaaggctaaaggggacacgcccagccaccgagggaggggtctcacccttggagacccacttcgcggcggccgcacaggtcacgtctctctccccacccaggccaaggaatccccggacctcttagagctttgctttggggcaagggccaaggaggctttgcctgcgccaagtgcagttgactgtctgggtttacaaaataaacccagaagcagcctgacgtctccgctcgtttctagggaggaggtcgcggggagggaagtcgggaacgtttcctctccacagggatatctgctgggaggaagtaaccgggaaatcgccacggggacacccctcacctccctgggaaagttctatccctttcctgactcaggaggcggcaacagggatggtgtccaattcaagaaggaggagggcaggaaagaaggcttggagccgaccttccggctggaatgcaaagataagagtattaacccaaataataataataatcccagagcagacctttttttcttttttctctcttctccttcccctcttctctctccctctctctctccctctctctcctttctctttcgttctctctctctcatttcctctgtctctgtccccgccacctccccgtcttttgcaagcgtgctcgtggcgcgtgcgggacagggaagtaaggggcgtgtgcgcggaggctcttcatcccttccggagatgccgcggccgaccagcgcgctttggttcagcaagcacagaaggtgcaagccgaacaaggccattcagaaatgaggtggagactatgaggctgatgagctctacgattaaaaatccatttttgtttaattccaagataagttttaacgatgggatttgagtgagtcagatcgcccatttggccattatatccggattaaaagaaataaattactgccttgacaaaagatgccaaccacagtggaatgaaaagcaaccaaattgaggaaacagttggggcaggatagataacttgtaatattacttaaaaataaaaatgatgaggacaaccaactcttcctcccctcccccgcgcaccttttcacttgagcaatcttgaatttagtgaaagttgtttcctacatggtccgtgagtcattgctgtggtcaggcagatttgttagaccaacacctaatttaaatagaattgtttgtggaataaagccgggctagcactaataaatctaggcattttcagatgaggacaacttgattcagattaatttatttcatgaaagttgaattttatcataagaacacagcctaaaatgcttcatgcaagcatttcttactgtgtacttaaaggggagaggcagaagttgagattttctagtattaggccacacttcctgggattctcaaaagcttggtctccaggacttcaattttatagagttagaatagttaatacagaggaatagaattaaaatcgctcagaggaatattttttaaatgactaataaatgaccaggtttttgcaggattttactaattaacatcgtattttaaggaaaccatgaaggcagaagaaagacctgtatttaatgcaaaaatagtctaaaaagaataagtgattcaaaaaaatggaaacaggaaggttatattattataactacaggcatattgtagaaacattatgcagagattacacagcaaaagtaaactaaatgcactcaaaatccatagacaaggctatttatccatttgaagacctgatttgggggatttcacatgtttgtgaaagggaagaacgttgtaaaaggattgagtttactagctgggaggaaagaaagataagagttgatcttaaggtataagacgtgaccttattttgtggaggataacatttttatctttctagcatcccttctccttctaacagattccctctttccactagaaggtaaattccaagaggatagcagttttatctgttttgtgtattgctgtattctcagctctcagaaccctgcttaacacattcaataaatttttgataaatgaactgatgaacagggaacctattcaaagtggttaagataacggtttaccccaactgaatctgctggttgctgtcctgccttttatgctttgaaagcttgtcttaaaaaaaaggagaagaaagagaaagaggagtcctgtaaatgttatttgagtcctggatctggtagtacctgaaggccactgcatacttttacttcctttttaattatattttccaccccacccccttttttagcttaaattattttgagttgcatgtcacttgtgacggacagagtactaacacatgtaatgatggtgataataaatatgtactgagcctttattatatgccagacactgagctatgcgttttacatgcattatttcatttattgctcaccacagccctgtgacattatataatcctataacccagatggtaaacaactgtgttccaaattatttgaaaatgaaatgggatgcaattatctcaaggttctatttgaaggatttagattaaacagaagagagacgtttctgccagggtggttccaacctggaatgggttgccaagacagatggttgagttgccttctcaggagtttaaaataggatgcgatagatattcctctggcctcttccacatgacataatacattggaatttttgaccattcagtaatgactccaagggatagtagaatgtggcttgacacttgacataattctgaatctagtatgctgagaagggggtgtggtcatgtgagtgtctagctgggtttggaaatactatctgcctgaggcagtaatttgaggtgatgaaatcacaggagttctagccctgtaatttccacaatttctcaggttgtaatcaaagatttaagtaattagagatatgagacaagaaattaatagcacatgtttgatgattctaagtcatttttactaataattaacacttcaatagcactttatgtcctaagaagggctttcacattctttatctcctttgactctaccacgcgtcctgtagtcaggtggaatttatacactggcagatatcttgttgcctcttttttcggcgtgaggcacactgggtgttctttggagatggagctcactggggtcactgattgctgcatgcaggagcttcctgtggagtttcatcactctggcgggcagcactcttaataggatttttacagtgtaacttagcttgaacccacaagaaaaacatacctttgcccaacaactatggaagtgcactcagctcctacagcatcctgttcttctcttggcctgctccagttggtttttgtaaattgcctaagattttttatagaaccagatctctcaccccatcctgtgtctttcattatatggagatacattttctgggaaaactcagactccagctcctgtgctttctgaactccaggaggcatgggtcagcttatggcatgtttctctggacgctccctttacttggctggaaatggggggatagaatgggagtattcagtattctgcaggaggtactgcatgtcctccccaggaagagctcacaatggggctactctttaagcagtctccactcactcatctggttggtctgtctcttatcttcattgacataggccggacagttttttgttttttaattcacttgagataaaatccacatgacataaaattcaccattgtaacaattttaaagtgcgcagttcagtgattgtttaatatattcacaatactgtgcaaccatcaccactatcttaattacagaatacagatgctcctcaatttacaatgggattacattccaaaaaaaactcaataaataagttaaaagtgcatttattacaccaaatctactgaacatcatagtttagcctagcctgccttaaatgtgcacagaacacttacactagcctacagttgagcaaaatcgtctaacacaaagtctatattatatttaaaaaagtgttgaattgctcatggaattcattgaatactatactgaaagtgaaaaacagaatgattgtatgggtacttgaagtatggtttctactgaatgtgtatcacttttgcaccattgtaaagttgaaacatcctaaggcaaactgaaccatcataagtcagagactgtctgtattttcatcaccccaaaaagaggtcctatgcccattaagcagttactcctatttccctttctctcagcccctggcaaccactaatgtactttctgtttctatggatttgcctattctggacattttatataaatggaatcattcaatatgtgtttttttgtgtctggcttctttcacttagcatgttttctaggtttggactgggatttttagctaagggttgcacagaatctgttaggatcacgctgttgaaagacctgcataggttagctgcactttaacttagaatgtggttgtggggaccaaagttccacttacccagagtcttgaattataaaagtattaaaactctgtgtgattgcagaaacctaccaaaattacaaggtgaggagatttaagaggtgatataaaatttagcttcagcagaaaacatttaggctgggatcggtggctcatgcctgtaatcccagcactttgggaggccgaggctagtgaatcacttgaggtcaggagttgggagaccagcctggccaacatctcttctggcaaatccccgtctctactaaagttacaaaaattagccaggcatggcagcacacacctataatcccagttactcaggaggctaaggcacgagaatcgcttgaacctgggagacagaggttgcagtgagcagagatcacattattgcactccagcctgggtgacagagcaagactccgtctcaaaacacgaaacaaaaaacccatttaacctctccaggaacctcaagagttaattgaggatgtaacaattgactatttctaaagttcctttcagcttcaaaaaattcacttgattttctgataacaatgtgtcctctgttgcccaagtcccgggaaccctgggttttgtttcttcacctgccagttagcactgccctgggcagacacagactcctcttctctctccagtgaatgacgtcagtcccattgctacttcaggaaaagtaacttaaggcaagttctttatagttgagaggtcactttaatctattaagtattctattgtgatgggtatcacatgttcattgcagtattttcttaatgtgcaacagggatgtgggcaaataaattcgggtacatccatctggtatgatatacattcttactgaaataatgtggcaggggactatctggtgacaaagcaaaaaaattacaaaatggtatggttccagtttttgtaaaagaaaaaatatatatgtatgttaattatatggtatgcatagataatcaaatgaaaaattatgtacctgtgccataacagtgtttcttttaacatatttcttctttttccttatctgtacatcctattattctagagtcctttgtgagaagaaaaagtacaatgaaaacttaatagtttttaaagtcatgtgcatcaatgtttctgcttaatttggttcctacttcagaatcaactactgtactttcagagagaaaaaccctcttctggcttctcaggcaggaagtgactcagacctcccctgtttgaggcatgataattgctgtcctgctttagctctgcattgtttattcggcggatatttactgagcgcccactgtgtgctaggcgctattctttagtctgagaattatagccatgcataaatgctgcaatagccatacaagtctgactaaaattaggcacataatagacatttaaatatttcttattgcccaattgtccatattctcagcgttcagggttcaacaaacttgggtgtgatcaactcacaatagctatgagtcctccccgatggcacattcttagtccagccttggtgaaggtggcatggtcccctgcccacactgctttttgtttttcaatgagaaataaaaataaaaataacaactaaaaagatttttcctaattcttaaagtactgtactatgtgcttatggtaaaaaaaaaaaaaaaaaaaaaaaggaagttacaggaaaaagaatcaaagaatgaatgccatttacaatctcactggaaggttacaatttctgctcaaagaataaatccattgaagtgaggaacctgagaagtttgcaaaaggatgatcttttttctttgtcataattatataatgagagaaacaagcaaacctctttttaaatactttaacattctcagctttaggaataaaataagcagatgaaaattagctttaaaaaactcagtgtgtcaaaactatgcatctagaattatcgttatctcttgagattttggtcataaatggcaggtgctctagtttttattttgctcattgttagcctgaagaggtcatctgattgaattcttaaacgctattatatccctcaaaactggggttaattttgcctctctgataaatatggataatatttaacaaacccagtttagagaactatatgaagcattcagagtcctattttatgccctttaaaaaattggatttcctgtagcagtaactaatttatcatagctttataaagggaatctaattattcaaagtaatatctaatttgaagcagccattattcaccaaccaacgttaacactaaacaaaataaaattgagagagaaaagaatcagctctctccattatacagtcagcactattgcaaatacttattcaattactttcagcaaacacaaggccctctgtggtggctgctccatgggtaatttgctctggaactctgacctttcagtttgtgacagtgaaaagaaacatcacattaatataggagaagatagaaggacctctcgaaagacccaagaaagtggtcttgataataatacctaccacttattatattctcaccatataccaggcttctcatttaattcttataaagggcttcagagatgggcattagcatccccattttctaatgagggccatggggctttgttggtttatataacctgcccaatattagtggtagaagcagatttctcacagaaatctgccttgctctggattgatgcttaacaattagttctaatgcttcccatttagggagtagcaaggtcagccataatttaaattccattcagcaaatattgttagtcctggctacactcccagagccgtgatatggttgctctcctctaggaatttgtagtattattagaaataattataggatataaggtggtatagaattcaattccaaattggataaaaccatgagccaaagtatttgcaacagaaaatatatacttggggcattcaaaaattccaaatattccaattcagaattttagatcttactcattttgttggaaaagtatctgattcaacaaagtaaattgtatgcaaataaaaatataatctggggaaaaccattaaacggtcagagatgaaaattttctcttagaattaagagtactaacatgaatccctattggtcatcttatctgtggcactcgcaataaagaattataagcaaggaaagtagtgtctctctcctgcacataccaaggaactgaaacaccttctaattaaatgccaaatagagtattgaataaagaatcaaatccctggattttgttccagaacatccatttattaactatataactctaggtaaatgactcaaccttttggattctcagcttcccctttgtaagatggaaacgcagtactaatatgtgcactgtttaatttcacaaagttgactgagatgaaacatgtaaaaagtgctttggtgaactataaagctgtaaaagagtacttgccttattgcccttgtgccttggatgtggtctgacgcagcacagatgtttaacaaatgtttgctgaacctaatggctaggtttatgtgcaaaataaacagagctggagaggtgtctcaacacaatgatgtttgtactaattatgtggctcccccgagcctggctgtaccagagtccagcaggtcctcatttcactcagctctgccttactctccatggtgctctctctcagctgctgcagactggaatgagtccactggtctgcatgcctaggcttctcaaaacccctggggactcgaaggtggcatgttgtggggagcaacctcagtgacctttagtagagagtgagggtcagcaatctcaaaacacactggagagtacccaaaggggttctgaactgcatggaaagcaaaataaataaaaaataataataatcactttctccagagagcagttttgacatgctgctacttgcctcttgcattgtgataaaaatacgtggtaggaaatcaatgtaggtttccttggcagctgttgtatagaagaggtcaggtgcaaatctgaacaagttgctgaaggatgagtctgctcacaggcgtttcctacttcatggaaacagccagatgatagaaaacatgcttaacatgacgattgttcatatttatctcaaagtaaaattttccattcactcaatatttattagaactactggatgcctaaattccttttgtctcaatttcctttcctgggaaggctctaagaaccttggctccttggctgtatttttagaaacagaatatgcattgccacagtgaacattaatatgtttgtttgtaggggtacctgggtgcaagataggcaatagggtcttcagacagggccgtctttataacattgacttagcccagcttgacaggtccagaaacttgatatttttggtgtcccagggctaattttacacatggagagggacttaaaatataaaccaaaaggccaggcgtggtggctcacgcctgtaatcccagcactttgggaggccaaggcaggcggatcatgaggtcaggagatcgagaccatcctggctaacacggtgaaaccgatctctactaaaaatatgaaaacaaaaaattaacagggcgtggtgacgggcacctgtagtcccagctacttgggaggctgaggcagaagaatggcatgaacccgggtggcggggcttgcagtgagctgagatcatgccactgaactccagcctgggtgacagagcaagactccatctcaaaaaaaaaaaatacatatatatatatatatatatatatatatatatgtatataccaaaaaacatacctacctatctggcatttattctctggctgcaagagagctttgggaagccaagtttataatcataaatatgtttggtgagtgtgaaataataaagaagagtaattcatttgatgacttgaatgtttagtggtatcaagctattgtgcatgacaaatccattgtcacaagagagatacgtttgccaataagaccaaatatttagatgggctggataagacactgtcatccccaggcagaaggcatgaagcagttaatcagtgaagtctctctctttttttgagacagagccttgctgtgtcacccaggctggagtgcagtggcatgatcttggctcactgcaacctctgcctcccgggttcaagtgattctcctgcctcaacctcccgagtagctgggattacaggcacacacaccatgcccagctgatttttgtattttcagcagagacagggtttcaccatgttggccaggctggtctcaaacccctgacctcaagtgatccacccacctcggcttcccaaagtgctgggattacaggcgtgagccacagcagtgggcctgaagtcttaatatacaggaaataccatggcctcatgattctgctcaaatcagaaaattgccctttctattaaagatgatctctccctattcctttatcagcccaataacggagaatgcaaagacaatacatcataaatatggtagaatgatgatcacacacaagagaggcaaatggacaacgaacagagaactcatatcagaaagacattatcagacagctgaggagccacgtggagaaaaaagccagtgcccagaagaatgtcatgagatgcaggcattttgcagagcctcaataaaatcaatataaatatgtatatcgaatgtgaactaaacaattacataagcagaagttaagttctgtccaatccttctgatggaatgcaaaattccaacaaagacaatcatgaggcaagaatcatgtaccatgcatagaaccggagtaccagagtaaaggcaaccacacccttgtaaccatcacccaaatcaagaaacaggacattaccagctctccaaaaattccctctgttcccttctagtcactaatttcccagtggtaaccactctgctgacatctaacaacatagattagctcacctgtttttatactttgtataaatggaatatatgcttttttgtgtctggtttctactgctcatctttatgttggagagattcatccatacttttgtatgtagttgtaaatcattcttactgctactgatatagcccaaattctgtggctatatcacaattggtttaactattttgttgttcatgggccggtttgttggaacaacattggaatatttggaacattgttccaaaaattggaacaaccatttgttccaaccatccaacaaatggttgttccaatttttgtctactaacaagtactgttgccatgaacattctgttcccccaaattccccccgattctaattcttttggtgaacatgtgcatacatttctagtaggtgtatgccttgaaatctgtttgatgggttacaggttatgcatatgttcaactctagtagtaactcccacttctccaaagtggttgtaccaatttattatcccacaagtggtatatgataattcttattccttcacgtccttgtcaacacttattattttccatctttttcatcttagccattttcgtggatagcaagtgttattttattatggttttatgttattttattatgcatttccctgagaattaataaacaattttctgtatgtttatttacacatctcttttatgagacttttgcccattatgctgttgagttgttcaactttttcttattgacttgcaggtgttctttatacattctagatttgtgttttttaatcatatatatgtgtgtttgcattggatataaattaatatatgttaatatttttctctcaccttgtgggttgccttttcactcaatttgggggaacagaagtttttagtttcaatgtagccaagtttatcacattttttccttttatgattaatgctttttcatttgcttattttctatttaacaaaggattgctgactccaaggtcatgaagatgttctactctagaagttttattgtttcatctttcaattatttctgcaatctgtctggtattgactcttgtgtgtaatgtgaaataaacattagaatacctttttttccacttgaatgttgaattgacacagcacaatttatctgaaagattatccttttccctactgcattgcaggatcacctttatcataaatcatgccaccatatatgtgcaggtctacttctggattccctgttgtgtttcattggacagttatctgttcttgcactagtaccacacagttttgattgtcataactttataataatagtttctgatatctcacagtgtaagtcctgtatatttattcttcaagaataacttgatgatttccaacttttacatttgatatgaattttaggaaaacttgtcaatttctggaaaaagaagaacctgtagcttagattttgaccaaaattgcatagatgaatgtattaatttggagagaactaacatctttacaatattgagtcttccaattataatgatgcatatacttccatttatttagctctcctttaatttttctcaataatattttagttttcagttagagatcttgcacatctttaattagatttatttctaggtgtttgagttttttgatgctattgtaaatatgttttattttctatttgtttattgccaatatatacaaatgcaactagtttttatatgttgactgtatatccggttcccttcctatattctcttattaattctaagaatttgtccttagattctctagaaattttgaatgtgcatgatcttattgtctggaaatgacaattttatttcttgctttccaatctccatgacatttatttctttctctgaccttttgcattggctagacctccttctacaatgttagactgaaatgatgacagtggtcattcttgacccagttccagtcttagggggaagttttcaacatactaccattgagaatgatgtttgctacggatattttgtagatattctttatgagattaagaaagttctgttcttaattgattacgtgttttcatcacaaatggatgttgaatttatcaaatgctttttctgcatttgagatgattgtatgattttactcctttttctgttaatgtggtgaattatgtttatgatttttgaatggtaagccacacttgtacacttggactgaacttgcactccatttactgtatcaatggatttggcttcctaatattttgttaagaatttttaagtaatgtttatgagaaagatgggcttgcagttttctttctcacaatcttgtcagggtttaaaaatcaagtttatgctattacaattttttttaagtctggaaagctcaccttctctttctgtgttctggaagaattatacaagacagctgttaatttttccttaagtgtttggaagaattcactgataaactatctgagcccaggcttttcttttttaaaataatgggcttaattttaaaaaaaaatacatcctaaattattgatattttcatctcttctcctgtcagtcttggtaaattgtattttcaaagagtttgtttatttcatccaaattgtcaaatttatcagcataaatttgttttaagtttccttttattgtccttttgatgcttgtatgatctatagtgatatctcctttttcattgctgttgttgcgaatttgttttgtctatttttttttcttttgatcagtcttctttagattttgatgtttttaaacaactgactttggctttattgtctttcttatatgttccttggtttttgcttttatctttatcatttctttttgtaagtttgattcctgctctctctctactttcttgaaattaacacttaaatcattgattttcaggctttttcctttctaatatggaatataagactatatatttccttctaagcaccattttagttttttcacatgatttttcaaatgtgatttttattatttaagtttaagaactaatttctgttttttttctttatcccatggattatttagagtatattgtttaattttgagcacttgggtttttcctgttgttgttattgatctttagcttaacttccactgtggtcagagaagacattctgaaagatgtcaatattttgaaattgttgagacttttttcttgttatgatatattgattgtaataaatgttcttatgttctttgtatacttgaagtgaatatgaagtggtcattaggtaccattttgcatacatgacattagattacatatgttaactgtgctgtttatatcttctatatccttactgatttttttatttttcactttttctgctatgtgtttgaaagagatgcactaatgcctcccactgtgagtgctgatttgtacatttttttctcattgttctgtccatttttgtttagtttattttgaagctatattattaggtgcacagagatttaggattgtgctcatttcctattggacttatttatttataattatgaactgtctcactttatctctaataatgtttcttgccttacagttcacattgtctgatattagtatagctagacagctttaggagcaggggcaggtttgtgtttgcgtggtatatttggctttcctttcacattaaacatttctttttattagatttgaagatttgggtttgttttttatctaatctgacagtattttacttcaaatttagcttatttacattcagtgtaatcactgacatcattgggcttatagctaccatcttatttttcattttctattgtgctcttttcttttatattccttttgttgtcattttatgttctttttttcgccctctctttcctctatttttttaattattcaaggatttcattctaaaaacttgcaagttttacttctttaattctaatagtaactatcctagagattgcaatatatatccttgatttattacagaattatacaaattatctttgccactcctctgatactgttagaccctttgaccttttaaatgatttatccctcctgattttgttctttttgccacacatcttagttctacatatattttatactacaaacgacgttataattactgtcttttataatcaatagtgacttacaaatatccatgtttaccctcaccagtgttttttattccttccttcatttccatgtttttctgtctggaattctcttttctttctctctctctttcttttttttttttttcttttttgaggcaggtgtctcacgttttgtcacacaagctggaatgcagtggcgtgatcatggctcactgcggcctcaacctcctgggctcaagcaatcctcccacctcggcttcctgagtagctgggactactggtgtgtgccactgtgcccacaattttttttttttttttttttgtagagacaaggtcttgctttgttgcctaggctgagattattttccttctgcctgaagaacatcctttagttttcctgaaaacatctttattctactttcatatttgaaggatatgattgcaagatataattctagtctggcaattattttctttaagctcttaaagttgacaatattgtcttctcgcatctataatttatgttgataaatcaactgtgaatcttattgttgcttctttgaagctaatttcttttttttcttctggctgcttttatgatttttctctttatctttggttttcaacagtttgactatgatgtggttagctacagttttctttatcttgctccttgttcttacatcaatacatagatattcttatccattatctctttgaatattgcttctcctctattctctctctcctttttggaactccaattatatatatgtgaaaagtttcatgtgtatcttgttcttgccattgtttccattcttttttctcttcctgcttcaggagtagatactttctatttatctgggttccagctcactgatccagcccattattcactaattatgctgtgtgtcatctgctgtaaacttatccatttgaattcctaatttcaaatattttttcagtgtttagagttctaaaatatacatgtgattttttcacagattccaaccttctagtgaaattctccttttattcatcatttcactatttatttttcatgttaatcataagtattataaattccttttctggtaactccaacttttggctcatttgtgggtcagacagatctgagaagcttggtttttttttactctgtctcaggtactttatatttagtgtttacattcctagccagagaagcatttatgtaaacactctctatatttaatgactcagtttaagaaaatgcttacaataattgaggtctccttgtttctgaaccaagttttatatcagaagaccacatcctcatctcggggagaagagcgaggagagtcattgtctaagcattcctgagcactacgtctgtgcttcagtgttccagccccatggaaaacccatttctgtacagtatcatatcccatagttaatcatacttttagattttttaggaatattttagtgtcattgctatttagagattatctgtatcttatattacacattagctaaacatgctctgataatataaatgttatttgagctaattagataaactttgatttcaataattgttcatctttaaaactgatgcagctttattttaggactaaaggattatttatcttctttatatataatacacattatatattatatattatatatggatagatataatagtaatgtaatgtgtacagctgttcacataaattaattcacctatatttagcttcccctgtatcctgtcctcttaagcacattgagggcagaggcagttttcttgtatcttgtcactctacagcacctaacacaatacctttcataaacataatctgggcttagcaagtctgtggattggattcacttgcaaaatctatccattgctttaagagaaaccaatatttaaaagtagacttttcgttaaaaggatattacagatattacttgctttgtttaataattatctgctttggagatgtgtttgcatttttaatgagtgctttaatgagcttctattacatatattagaaaacaaacttggaatagtgccactatgtaagttaactctgctggtttaaaatatatttgagatggaatttgattaaataattaccaaaagtagatatgtaagactgtataagattgctttagtagcaagatcaggcagcaatattgattttttaaattaagtactaaatatacccagtcgaattcaaacacttactaaatgatattttgcaattttcaaaaagccctaacatttagcccctcagttgattcccttaataacttgataaattaggcaaaaaagcaaagaagaagaggatcatggagagcaagggatttacccacatttacatttatattggcagagtcaggacttgaactgaagtctcctgaggcctaatttgatcttctatctgtatcaaccagaaatacctaaaataactcatatgtctataaagataaatgtacctgtagaaaatacatccctcaaaacacacatttaattacaacttcttaaacgagcaccctcttcctttttcttacagctctttatccctagagtttaaagaatcaaaacacacataaacatctccctagagcaaacatagggagtttcctcatgactggaagcccacattaaagccacgcctaagggaagaagggaaggcagggctgataatattttgtttattttagtccttctgcttagtttttgtttgcaggcactggactgaacttagttttcagagccagaaattatcattgtttgtgtatctaaatttgttaatactctgcttttagaaatttttatgtacaatggattccaagagtattttgggaacttctcagtggtgaaatctaaactgtggttcagtgaagagccgacaaacacaaactgcaaagagcagttggcacagtacacttttggaggctatacgactcttctgctcttctagcacaaggcacggagtaggtgcttgctacagttttcggatgaatgaatgaaaagtaccttagtccccagcactgtctcctcagttcacccaaagattccctgtgatggccgtgccaccattacagcagcagtttattttctgtgcaatttgtagaagaagaaccagaaaccaaattgttacccatgctccaaattgttatccatgctccaaagactattcttggttttatgccatagcaaataaggtcttaccatttccaagtaaggctagccacatgccagtctgtgaaaaggaggcatttgcttttgggtagtagttgacatgctttggggcatttatgctgcctccccagctcccatctcagagaattcctgctattcacagtcgctgctggaaaggacaggcttaagtggccctatccccactccatgtctgccttgccccactccaatgagaccaggggtagactcgtggaccacaacaatcagactctctcttacgattctgagccgggttacagaaactacggtcagtgactatggactgcagctgagagctcccaaccagcgagggctgaggttggtgccagtgcaagccaaagtcaaggacaactaaagctacttaagagcaagattataaatagacaaagccaaagtctatgaacaaaggaaatcagacatgcttttaaaaagcaaagagtatgcaacactcacagggaattaataacaatattatttattaatttatttattttatttatgttttgagatggagtctgtcgcccaggctggagtgcagtggcacaatctgggctcactgcaagctccgccttccgggttcaccccattctcctgcctcagcatcccgagtagctgggactacaggcgcccgccaccacgcccggctaattttttctatttttagtagagatggggtttcattgtgtaagccaggatggtcttgatctcctgacctcgtgatccgcccgcctccgcctcccaaagtgctgggattacaggcgtgagccaccgcgcctggccataatatttttttaaaagcaaagagactcaaaagagagagtcaaaaaacaaaagagagaaagaaagagtgggagactacagaccaatcaacttgagtttcagtctctctctttcccagctttggtggctatgaagtctagctggactttgtttcctgctggtggatgtgtgcaaaattgttggcttaatctttacagttaactcctgtttttaatttgagttaatttgagtgagattcgattcccagccaccactcatctctgaccaatggacttccccgtccccttctcccctgcgaaccaggtgcttcagtttggcccttctcgctcctatcaagaaagaatgggatctgaaaaactttcacactgtcaaatactgagtttgctgacttttccagtaacattttagaagagcacagcagtgagaaggccacatgagacagtaagggataacaattcacataccattttgggcatcagttgtaatctatttcaggaggagcaccggaacaccggctattacctcagtagcagatcacttactatcccctttttgagggctacttaccatcacacataaagcttttccttcctgccacactccgcacaccacatactacataagctcttctgtccattgtaaatgccttgaaagcggggatcgtctccactgtggttttatactcactgctctcacactagcagtgacaacatccatttgaatgaatacatgttctacatataattttaatggatattccttctccctctctcagaatgaatagtttgagaacttctgggcctaatattcagataagaccccctcaaaaaccttccttttcccttttgccactccctctgcactaccatgcgcccttgtacttctgtgagatctcctaaaactgaagagcatgaggaaaacaggaaattactattagcttttccttagtccaggaaaaaaagactgagaggtggcccagtcatattcataaagtgttgcttaaagaagccactattagcaattgaaaaggactttctagttcagccctgcctcccattccatctgggcacctccagcatcagcccacagtttctcaggctccaatccattccatgccagtcataaagctgactttccaatgaagacacaaggcagagagcacatttgcatcaatgcaggtacaggtgtataaactcagtgactccaagcggctacactgagcaatgtttacatacttggaaaaaggaccattctcacagattctatttaagaccaatgtggaaatattaatagaaattcttgaatctagaactattcataaatactgttttagaagaatgtattttcattcagaaaggaacacagtttctgacagactgtgattaccgttttatttcctttttctatatcattaaacgcaagggtagtattcagaacactcaaaagtcatatatggaaagaaaagaaaatgatgtttttggcatgcttggatctctatcatattatgttcttgtcttttctggtacaattgtaggatttattttctaaacattccaattttacagcatgagtcattgctaatgtagaaaccaactgaatcatccatccatccatcaatgaatattcttgtcttctttttccttatatgtgcttatctttatactaaaaaagatattaggaattcttgcatttaaagcacttcttctccctttcacttattttgtttgttttacaggtaatacagtaaagctatcattaactttgttttggttcagatttccattcaaaatattgagtcagaaactcaaatcaagtgtactcttaagtatctgaaatctgatgtcttccatacaggaggtaaatataaagtctagaaaaaggagaatagaaaagaaatattttcacactttctggccttaagaaagaccaaacagactggattgtggtaataagtctatgtcttcttcacttagcctttaagagttgactaaaagttatttgattggccaggcatggtggcttatggttgtcatcccagcactttaggaggccgaggggggcagatcatctgagatcaggagttcgagaccagcctggccagtatggtgaaacactgtgtctattaaaaataaaaaaaattagccgggcatggtgatgcatgccttatagtcccagctactcaggaggtcgaggcaggagaatcacttgaacccgggaggtggaggttgcagtgagccgagatcgtgcctctgcactccagcctgggcgacagagtgaggtccatctcaaaaaaagaaaaaaaaaagttatttgatcatcttgtttcaaatatgaagaatctagtttattccattccatcttaaatatatcacctaggatacttgatattgtaatataattacttgttaggcacatcttttattattattatctataccagatggtttcaaggagaagacatatttacttggaaccaacctatggtttgaggtggggctggggagtgggcaagagcactggtccaggagtcaagagaactaaatgttagtcactgtgataccaccagtgagtgaagctgtcacttactgggctttcttgttcgttcgtttctttttcagtaaaatgaatttccttcagtgcctgaaatctctttctaagactcaatgactgagccttttcctattgtttatctcttgccccaaaacttgtaacacaaagtctccccaatttttatgcacttaacaatccactgttcagtagccattctacattacatgcaattatcatcatgagccccctttcccattctgactatatggagattatatggggaaaactataatatggatcacagggaaaaaactgaattaaaaggaagatttggtccgggcacggtggctcacacctgtaatcccagcactttgggaggctgagacggccggatcagttgagattgggagctcgaggccagcctgattaacagggagaaaccccttctcaactaaaaatacaaaattagctgggcgtggtggtgcatgcctgtaatcccagctaccggggaagctgaggcaggagtgtcatttgaacccaggaggcggaggttgcagtgagccgagatggcaccattgcactccagcctgggcaacaagagcaaaactccatctcaaaaaaaaaaaggagggggaagatttgaatttattatgcattatttctaagagagaactcagagaaatcatttgtcctaaacaatagcttctatctattgactcccaagtagttcccaagaaactaaattgcttttaccaaattatccttttaatacatccatgttatagactcatcaactacctgttcattaaaacacatggcctaccaaaattatatcttaacatcattagcttttaaatactagaagtcatttcaacccttagaaaagtctggtgagcatgattacatgtggaaactttcagatacaatgtatccaaaaaagtaagtgtattaaaaatgtaaatatatttcagatatccaaaaatgtagacatattgtcaggctttgctacttttttgcagtttcacatcatgtctttacttgtaataatatcaataattgctgcaaagataataaactacattcccattcgcctatccctctaccccagtactgtgttatacagttttccctgcaacatgatgtcagtctgcaaagggtctttgtgacatcaggaagagagtctagatttccttccagggcaacacattttgctattaggttgagccataaaactgccatttttggtcaggaatgatttaccactggtagtttcatatggcacaagctaaagagccttccttgggtttgagttacagtcctgagagtcgcttgtgtgtccaatgggccagttacttaattgctgagtcttggtgtgtgaaatggtaataacacccactttataggattgattattaactcaacattgaggcttagcaatgacgtataggagcaccgtgcctagaaacagttattgttcaagaaataggtaataatacaatataattatcagtataagtaacgtagaagagtttcctcacttttcctttagccatttttgcatatatggtgaaggtaatggttgctatggtagagagaaatggaaaatatttgtgaagcaagcacaatttttaaaaccccaataacgttaaaggccttccattcctgtcttgtatgctctcttatgtccaagtaagggcacagataaagtttgacacatactcggtggagtatctaaatagaaaatgtactgaagcaaaccaagaacagagttttaaaaaaaaaatcaaagcactaagcaaacattctgaacttttggcagaggaattggactgtctgaatctccatgactctttggagttattaatagtgatgcattttgccatattttgagcagatgcatatttataggtcacgcaatatctgtgtggggagactttcaaggctttatggccttttaaaaatgtcttatcttggaagagaacagggcaaggaggatgccattttgtcatctgtgcagcaccaatcaccctgtgctcattaaatgttacgggaaagatgcgcactgcagcagggcctggaatgtggctcccatctgcactgccagaagccatgatgaagtcacgagttgcacaacagtagtaattcgcagctatttatgaccattttaatagcaaaggtctagattagaaggctgtgtttacatgccatgtagcagaatagttcacgaatcattcccacagtaacgtttggtcaaaccaatcaaccaagtaatgaaaaatgaaccggttgttcttgaggttgtgactaatagatctctaagttagcctctactttcctcatgctcttccatacctgagacagaattgactcctgccccatgcccacagactctcctcctctgtcttcccggcaagccacagccctgttaccctttctccacccaagctcaaagccgtaagacatcaggtaagttaaaggagctttggaaactcctgtagagcacctgtgcacataattaaggaaacataatttttagcacgtttattttctcattgtcattgctccattatgtgactttaattagtgaccccgatggcccctgtgcatccagatgagtaaaatcctttcatttgtctgcttaaactgacttgaggttttagtgattatcacatccatgcagcctgaaggtcagactatttccttttgtttcactagacagttaatcccctcattaggggtgatggaaaatgaataattaaacatgccattttcacatttcaggtaatgagaggccctaagatcccagaggatgccataagaggaaaagtcaggggagtgttgaagactctgcctcctacaaatatgtgagtttttctcccctggcttcatggtagaaaaggtttggcgaaggctcttcctctaaattgaaacaaaacaaaatgaaaaccttagttattgggctgtactctgacacttagtagctgtgtgacttggggcaaagcagctaaccttttgacactaaaagttttctcaattatataactggaatgataatggtaaccattgtattgaaatgttatgagcattaaaaacatgaatgagtgacaatacttacaacagtgtctaccacatggtaagagctctgtaatgtgttaattatattatcattttcattatcacccaggcaagtcacctgaatgctgtgggtatcaggccacagccaaacaaccacttgcaggttatcacaaagttccctttggcctattggaataaggattaagagtaaattatgttgtaccctggagggaaaaaacccaagtagtcatacctctagggccttagggaattcaactttcaccaaacctcttctaattactctaaaaagattttttggagggtggaggtggtagaaggtagagagccacaatagtcgggacccagatgaccacacttggtgagtgaaggtgaagccacccacagcagcctccactggtgcaatctgaattcctgcctccaatcccaggccccacagcttctgccccttcctcatgttctccaactcccaggaagccggctcgccccgggcttccccagccctgtaccatggagactgggcagggacctccttttgtactctgacttctgtctcatctgaccatattttaggcagaccttacgctcatgccgactaaaaatggactcactctgctaaggaaatccaagccccattgggaaatatctctgagtctaatttggtcatttcttttgccgcttcaggctgtggaccttacaaagcagagacagcacccttcaagatgcagagttcagggaaagctcctatacagaggggagtgggagtctccgctgagtttggaaagatgactggggtttgattgacagagtgaacgcggtggggggcggcgggggagatgtttcaagtgaagagggtctggaatgtgcctagaacagggaatcttctgacaggctgaaacaggctgtgtaagggagtgcaggtggctaaagctgctcagagagacacagaccagtgcggaaagaaagttctgagggttcatgaagatattggactttattctgcataaatacagatggtgaagggtggaagcagtgtttcagaaaagaaaaagtgtgtagtgctgtgcatgcagcattggtagaaatgggcttgatgggaggaaaattacttagcggactagggcctgaggtcatggggacctatgaaaaggaaaataaaatgcatgagggtggctatatgattatgtgcagagggggtggaaactgttgctcaaaactgaatcttaaaatttgttttgtcattgctttacccaaaatagtcgaccctagttggatttttttggagaaaatattttgtcccttttaaaaaggttctagtaagaagcagctttaatgctgtttgtggaaggaaaaagttacaaggagaaagagtgaatacagtgcatgattaaaggagtgatggaaagtgacaatggctttcaaaagagcacaggcgaattgacacgtattatgacaaacacgatcttacagtgacttcattttcttgtgagtgttgggaaatactttctagatattctaataatgatgccgttagcattgtacaatttttaattaaaaagctt

SEQ ID NO: 60771 - DNA, 505 bp, Homo Sapiens
cccctgagacagtctcactctgttgcccacgctggagtgcagtggcaaatctcggctcaatgcagcatcgacctcccgggctcaagagatcctcctgcctcagccccataggcagctgggactacaggcatgagacaccacgcccagccaatctttgtatttttttggtagagacgaggtttcgccatattgtttaggctggtcttgaactcctgacctcaagtgatccgcccgcctcggcctcccaaaatgctgggactacaggtgagagccatcgtaactggcctgcagtcccaaattcttaccgacatgactactttagttctgtttgattttggccaaattatgctcccatgctgtttcttactcatttagatacttccatttctaatatttacctcccagcacttctccattaccgatggggtcactcctgataaacccgtaatttgcacattacaatgggtttacaggaagtagcccatcataagtagaggtgcattcg

SEQ ID NO: 60772 - DNA, 555 bp, Homo Sapiens
ttttttttttttaatattttcgagccttggttggttgaatccatggatgcagaaaccatggatacagagggctgactgtatatagaaacaaagctatccaagacctcatcccacagtcactctggttgttctcctgaccacatcacactgctgacttctaatgcattttttgccaacttgaaatccattctttttggatttttccagtgtgttactgctaagcagtccattcagcatatatactgctggccttgtggactcacaagtcataccctactaaacacccatcagatggacttgtctactttattgagaaacaacagaagatagacctgcaagtccagctgttcatctacctccaccccacagcccaagccacattcccaccctttgtggatgaagctcagggatgcagatcccattccaagatccccactcctgttctcagatcctgccagacctaaaactgtctccaggacacaaggctattccaagcaacattaagagagagctctgtaggaaaagagggtcttgtcaacacaattctcagaataa

SEQ ID NO: 60773 - DNA, 2047 bp, Homo Sapiens; identical to SEQ ID NO: 25362

SEQ ID NO: 60774 - DNA, 2061 bp, Homo Sapiens
ggcacgaggagggcttcggccacgcttcctccctgagcaaacaccgggccatccatcgtggggagcggccccaccgctgtctggagtgtggccgggccttcacgcagcgctcggcgctgacttcgcacctgcgcgtccacaccggcgagaaaccctatggctgcgccgactgtggccgccgcttcagccagagctctgccctctaccagcaccggcgcgtgcacagcggcgagacccccttcccctgcccggactgtggccgcgccttcgcctacccctcggacctgcggcgccacgtgcgcacccacaccggcgagaagccctacccgtgcccggactgcgggcgctgcttccgccagagctcggagatggcagtccacaggcgcacccacagcggcgagaagccctacccctgcccgcagtgcggccgccgctttggccagaagtcagccgtggccaaacaccagtgggttcatcggcccggggccgggggccacaggggccgggtcgccgggcgtctgtctgtgaccctgacccctggccacggagacctggacccgcccgtgggcttccagctgtacccggagatattccaggagtgtgggtgacggccttaaaagtgactatctagacattacgggaggcccgagatgggctcaggggcccgaacctctgcggcggcctgcagggaggtcccagaatctagggcaagagctggccctggggtgcggacagtctgatcttgggcccttagcagcctcctctgccagcaccttgctccccactgcccagggctctccaaggccccctctactgaggcagggctgagttgagaacccccagacctacataaggggaaccaaaagctgtttctcagcccagaggtgctaagaggactgaggtagaggagaaccttgttttacccattgtctttttaaattttttatcattatttttattcttgtgaccctcccagaacacaatactcattgtctttttatttatttatttatttatttctgagacagcttcctgctctgtcacccaggctggagtgcagtggtgtgaacagggctaactgcagcctcaacctgcagtgctcaaggaatcctctcccatcagccttccaaatatctgagactacaggcgggcaacactacggccagctaatttttaaattttacatagagatgaggttctcactgttgtccaggctggtctcaaactccttggctgaagtgatcctgtcgtctcggcttccgcaagtgctgggattacaggcgtgagctaccaccatgcctggcttccattgtctttgtgtgtgtgtgtgtgtgatggggttttgctcttgttgcccaggctggagtgcaatagcgcaatctcagctcactgcaacctctgcctccagagttcaagcaattctccttcctcagcctcccaagtagctgggactacaggcacccaccacctccattgtctttttactgcccaagttaaaatcctgtgactgtgtactggatctggcctgcggttgtcatatttattgatctgagtccaggcagtgtttttaagtgatatgagttagtagtgaaaattgaaaaggatattttacaaccaaatacaggttttctggtgtcttttgaaaaatccaaagatttggcaactcgacctaggctccgacaaaaccacagttgttgggagctgagccggagccagaactcacaattcaccgtggcccggccacccatccccaccactcccgtgggctcctgaccaagcaccacgtgccattcatcatggcttgcttttagtgtttttggtgtttatcttaaagtacagcgaagaagaaagggaagtatttcttagacccatgtctctgtccaaataggcctttccatctggcatttcccgctcatttatatgacttgctgagttcctatggtcatttgagtttgcaaacagtggtctgtagcactcaggttttctggagttggagagaaagggtggcaagagagaagtaaaagttggttttattttaaaaaaaaaaaaaaaaaaaaaaaa

SEQ ID NO: 60775 - DNA, 478 bp, Homo Sapiens
  misc_feature (467)..(467): n is a, c, g, or t
  misc_feature (473)..(473): n is a, c, g, or t
ggaaatgaagaattgtttatttttcttcttgagcacttatttcatgtcatttaataattttgaggcaaaaaataaacagaaataatatccaaagacattttcagtttgttcattgattgccattctaatacataaaggtaagaattttagtgaccagtgttttgtatctgactcttattttagaatttccagtgttccaaggattccttattaattaattccctcaggtcttgagagaaaagttttgatatagaaaagcagattttgacaaatatacacaaagagtggcaaatggtttagacagtaatttggacccttgaaaattttatcaagctgtgtgatcaaaaagctagtccttattaattctcaaagtatggaaaggaaggaagggatactacttatgttaagcaaaattatcccattttgagaaaaacaagacaatctccgcaatgaagtttctttgcttntcattntaagg

SEQ ID NO: 60776 - DNA, 1036 bp, Homo Sapiens
ttcggcacgagctaatgttttaatttgtaaagtgtacaagtcatttttaatgttaaaaattagtgaatctaacaaaaggaataaattagcaatatttgatgtggttatgaaaagttgtttttgtttctaggttcctagtttcttaaggattcagggcatgggaagtaaaacattgactatgtgccaataatggaggttgtcaccaggctggagtgcattggtacagtcacggttcactgcagcctccacctcctgggctcaagggatcctcctatctcagcctcccaagtagctgggtctacagaacagaaactttggttataagaagcacttctgggttctgacagacagtgaacctgctggagtcggtggtggggaggaatggttcttcttcagcttgggaagcagaacggataggagcggagcgatcagtcctctgatcaccttgagaaccctggcagcgaaaggagcacaccaggcgttaaccaagactatggaaatgatgtcagacaaaaagcgaatttgagtgactttcttattcgagttcaaaatgggtcgtaaagcagtggagacaacttgcaatatcaacaatgcatttggcccaggaactgctaatgaacgtacagtgcggtggtggttcacgaagctttgcaaaggagacgaggaccttgaagatgaggagcatagtggctgaccattggaagttgacagcgactactcaagaacaataatcaaagctgattctcttacaactacacgagaagttgctgaagaattcaacattgaccattctatggtctttctacatttgaagcaaatcggaaaggtgaaaaaactcaataagtaggtgcctcatgagccaagcaaaaataaattgttgtttggaagcatcttctcttattctgtgcaacaacaatgaaccatttctcagtcggattgtgacgtgggacgaaaattggattttatatgacaaccactgacaaccagctcagctgttggactgagaagctccaaagccaaacttgcaccaaaaaaa

SEQ ID NO: 60777 - DNA, 1633 bp, Homo Sapiens
ctcaagatgagtaaaaagcccccaaatcgccctggaatcacttttgagattggtgctcgtttggaggcactggactacttacaaaaatggtatccatcacgaattgaaaaaattgactatgaggagggcaagatgttggtccattttgagcgctggagtcatcgttatgatgagtggatttactgggatagcaatagattgcgaccccttgagagaccagcactaagaaaagaagggctaaaagatgaggaagatttctttgattttaaagctggagaagaagttctggctcgttggacagactgtcgctattaccctgccaagattgaagcaattaacaaagaaggaacatttacagttcagttttatgatggagtaattcgttgtttaaaaagaatgcacattaaagccatgcccgaggatgctaaggggcaggattggatagctttagtcaaagcagctgctgcagctgcagccaagaacaaaacagggagtaaacctcgaaccagcgctaacagcaataaagataaggataaagatgagagaaagtggtttaaagtaccttcaaagaaggaggaaacttcaacttgtatagccacaccagacgtagagaagaaggaagatctgcctacatctagtgaaacatttggacttcatgtagagaacgttccaaagatggtctttccacagccagagagcacattatcaaacaagaggaaaaataatcaaggcaactcgtttcaggcaaagagagctcgacttaacaagattactggaagagaccagctgtgtattttatagctaatatagaatactggaaggttgtaactttattggtttgttggcatccaaagctgttggggttgatggtgctgaaaaaaaggaagactacaatgaaacagctccaatgctggagcaggcgatttcacctaaacctcaaagtcagaaaaaaaatgaagctgacattagcagttctgccaacactcagaaacctgcactgttatcctcaactttgtcttcagggaaggctcgcagcaagaaatgcaaacatgaatctggagattcttctgggtgtataaaaccccctaaatcaccactttccccagaattaatacaagtcgaggatttgacgcttgtatctcagctttcttcttcagtgataaataaaactatgcctgatgttgcacatttgccacttgagaagctgggaccctgtctccctcttgacttaagtcgtggttcagaagttacagcaccggtagcctcagattcctcttaccgtaatgaatgtcccagggcagaaaaagaggatacacagatgcttccaaatccttcttccaaagcaatagctgatggaagaggagctccagcagcagcaggaatatcgaaaacagaaaaaaaagtgaaattggaagacaaaagctcaacagcatttggtatcaggagttgggatttctcagcactgctaatgaagatcccctcttatagtccaataagcttatcaggacttccagagtcatgacatgaacagtttaattgaacccatccactctgggcaggtaagagaaaagaaaaagataaggaaagaagagagaagagagacaaagatcactacagaccaaaacagaagaag

SEQ ID NO: 60778 - DNA, 520 bp, Homo Sapiens
ttattcaatatcttataataatggggctaaaagaaacctttttgtagttttgaagttctgctgaaaatctccttagccagatcctcccattcattgggcaccttttctattttcccacattatcaaagacgaaaactttctgccattacataacacaggtcatttcttcagccaccccccatagtattttctttactgtccttcagtctctccagcagtctcctcgatgtccttccagtattcactaacatttttctcgaggcctttctaacttctgtggcaaccaggtacaaagtcattgccatttgttttcagtttttgttatagtgaaagtccactttcagataccaaatttagttccagttatctattgttacttagtaaactactccaaaacttagcacaataagcaatttattgtatctcatcattttggtaatcaataattctagcatggttcagcagggcaaatttattccatagtggccacagttagggttgctcagttgtgtccagctga

SEQ ID NO: 60779 - DNA, 449 bp, Homo Sapiens
tttggatgtaaaatatttttttaattacccaagaaccatatttattaatgataatacttagaacattatttggaaagtattctttatatactctattgaggatttaaagctagtgacaaaacctgatataatcaccttatgtgaacatacagtcttataaatatttgcctttggctataagaagaaatgcattaaaaaataaaccttcccaattcaagagaataatgtataattctaatatttaacttaaatgtgtaagtaatattcagaagaaatggaggaaatacatggctaagtatatgtaattcatcttatttcatcatggtcttcccaaatctaaagtatatgaaaagtgagtagtcctataattccagtactttcaccgaggtagacacagaataagttatttttatatcaatattccacaaatcagaggttttcttgaagaa

SEQ ID NO: 60780 - DNA, 797 bp, Homo Sapiens
  misc_feature (734)..(734): n is a, c, g, or t
tgtttctagacatttctaagtggtatggttagtgctcacttggctcactcttctaggtttaagttagcccagagatgtatttactcatggatcactttatttatttcacatttactcagaatgatcctttgggttctataaggacataaggtacaattgtgccatgtgtctctccatttttaaaaacatacaagtcagtgtcagcttaccaacatgacattttttcagtcagtgtgtggtaggccagccttgaagccatcgcacagtctagaaacttgtgtagctgagtgtgcagctcacctttaagggtgaagttaggtaaaagcaattagcagaggcgttatctatgtgattatgttgcttcctgtgtcagtatgttgaattttatagccctttcaatgaaataaaaaaaaaattggtatattaccaatgtttttagtttaaataaagagtcacccttactactgttgaatttcaaaaaaaaaaaaaaaaaaaagaaaaaaaaaaattggggggggggtgggccggaaaaaagttttttaaaaccattgttttgggggcggcgggcccagtgggttaaatggaaacggccaagtggcgccagggaaacgcggcccgacgaggtgggttttcccaccaaaaaaggcgcgggggcgcggtgtcggaccaacgcaaggggtggggtcaggttccacacggtgccggtgctatccccccgcgccgcgcggccgcgnaaaaaaaaaacaaggaaaaacaaaagggaagaaaaaaaaagacgaagaaaagaacaagaagaa

SEQ ID NO: 60781 - DNA, 564 bp, Homo Sapiens
tgagacagactctcgctctgttgcccaggccagagtgcaggggcgtgatctcggctcactgccagctccgcctcctgggttcacgccattctcctgcctcagctgtagcagctaggactacaggcgtctgccaccacgcccagctaattttttgtattttcagtagagatgggttttcacagtgttagccaggatagtctcgatctcctgacctcgtgatccgcccgcctcggcctcccaaagtgctgggattacaggcgtaagccactgcgtccagccctctgccttcttttaaaataaatcaggtagacctaaactaacttaaatgttctcatgaaaatcagtaaacagcttggttttgtattaacttttagatctcctcaggaacctacatgtgacaaattcctaagtttaacaccttaatattactagtaagtagcatgagtggtagactatgtctggactccacatcctgccacttccattccagtatctggaccacatcaccactaggagtatggagttaatcatcagtatgacacagcattgaaattctaagcactg

SEQ ID NO: 60782 - DNA, 2806 bp, Homo Sapiens
gtttgggttcctgtattttcaccagagggagttagtcctgccccagttcagctggtcctcaaagtgtatatagctctttaaccatcagcaagtgtctatcagaacataatcttgatttcagctgctactaaatatctaccaggagactgcttgagagaattgcctgatgggtgctgagtccaccattcctgagatactttgaaatcagtggcttaacccaagctgtgtatcgggaccctctcaccgtggtcccaatggagtcacttttcttaggcgcccccctttaccttgggctctgagcttcctctgcctttcatctctgtgggatgaagccccaccgcccttcaggatgcaaagccctcttctctaatgtgagtgcagggccaggtgcagtggctcacgcctgacctcccaacactttgggaggccgaggcagggggatcccttgagcccaggagtttgagaccagcctgggcgacactgtgagaccctgttgcctgaattgccctgggagatttcctcagcttgtgctgggggcatgtggccccatgaagcccgtagtcactgttcaccctgagagacgctggctttcgggctcacacacctgctgcggggcagccccaggaaatggccaccccatttctcctggagctgcgcgtgttctcagaaactgtggtggccgttctgttttgtttgcatcttataaacgtttacctgatgacattttcctcttcaatttagctgctagaaaatttaaagtcaggttggtggctcaccagtaatgagagtttagagtagaagtaaactttatgacatagtcttagactcttcactttcttctcaaccaatatgattcacatttactttattttgctgtaccgtgagtgtctctgtgtttcctgaattccttctggaataaggcaggttgttagtaagcacaggtttctggtccatctcacagcctcaggcagtgggcattgctgtcggtgctccctttccgggttacctgtggtagctctcaagttgcagggctgcgatttgaagcctgatttagtacaccgtgtttctgttgtgttctgtggtggtttgctcctcacatgtgagcattcaccgtggccctgtgtttttccaccacacctctgcctggtggcatcctactggatgtctcagccgagccactctgttctgaagatgcccttgtcctccacccctttgctttgggctctaagcttcttctgcctttcatctctgtaggatgaagccccacccgcccttcaggatgccagccttggcaacattgtgagaccctgtttctacaaaaagtaaatgagtgtagtggtgcacgcctgtattcccagctacttgggaggctgagatgggaagatcacttgagcctgggaggttgaggctgcattgagctgagatcaagccacggcactccagcctgggagacagagcgaaaccccatctcaaaaaaacaaagaaagtggatgcgcgctgctcctgccattggatcatcgcagcatttttcttttctctgatatgcacctttttcctcatcgtgggggctcacgttttcatagttccctctcactactaggttgtgagctgcgtgaaggaaggttcatagttgtgttgtatgtacaggcacacaaaatttgtccttggataaacacatatcctcttccttcttctctctgaatttctttattttaagaaaaaaattagagatggagtctcactgtcttgctcaggctggtctcaaactcctaggctcaagtgatcctcctgcctcagcctatactaatatgaattcctatactaatatgattgaaattagtttgatttctataataattgtgctcccagattgggcttctgttttgatagtagaactaaattattaggctatttcaagaaattaatatattactggtagaaaaactgaagctacaaaatggcctggtttctcacttcagttaaatttgtgcttctgagtgcttgtattctaggtgaaaccacactgagaaggtatttgtggcccatacactgattccttcatgagacttgtttgcacaggagagctgctaaaaattactgctctcagggaggtctgtggtgaacaggtatgaagaagaagactgttctctgcccttctttttgcaataaaatgttccaaactatcttgagtttgatcccttttcgggtgtttggggtttttttaacattcagagtatgacacagccgcatccttgccagggccggagggagggtggatggacttataggtgttgcttgtggctgggtgacttgcttctgccaacaagattttcacagacacggcacaagcagaagcctggaatgtgtggcactgccaggcctgccctcttaggctcttgattttccccacgagatatgcgtgccccagggaacggcggctctggctgtggaatgagaggcgtgtggagcaggcatggttcccaccctcagcctagagtcaaggccagactagatcagcctaagcccagccacgccacgggtgcagcagtgaagagcaaatgccaactgtccatgacagtgactttcaaaggggcgtgtcatgtgcctcatcccagcaacagggaaggcacttctctatcagtcagttggtaaatgattattgacaatgtgtgggaaggtggagttatttgagtagatttggcctctattctcatggagcttcctttctagaggggaaggcagatgatggatgaataaatataaatgattctaataggttggtgcagcagtcattaaaagtaatggc

SEQ ID NO: 60783 - DNA, 673 bp, Homo Sapiens
ttttttttcttagtgattgccctttttagtaacttctaattttagattttagggcaacataatcagatagacttgttgttatgtgaaattctcatgtacaaattaagtttagtgataaagagaatgatgacagtaattataaaattatatgcaaagcttaatctacaaagggaatagtaaaccaaaaagttaaaccaaaaagttatgttttccccaaaatgcaaacgtcaacattgtaaatagaaagttaacacaacaccaagcgccacacttcatttcttgtttggttctcacaagccttcagctactaattgagtaaaagaaaaatccccactccgaatcttgttttttacatacttggaaggactagcatatcttttccccttttatcactcatttgcggaaatgacttagaattgggagtagatgacagataggagctaccgaggagactagggaaatgcaggtttactaacctttaaaatatttattccaacggctaaacctctaccctgattactgaagcttgaactaggtagtagcactgtctgtgccagttgtaggcaaagggaaaaaagttcattcgttggtcttaggaaagaacatccattcgtgtttcgaaaaaaaaaagaaagaatgagcctcgtgccgtatccttgggcgcgagtgcaaa

SEQ ID NO: 60784 - DNA, 2327 bp, Homo Sapiens
tttcctaaaattctagaatcccttaaaaaaaaaaaaactcatgtaatagtactcataaagtctactcatgattctccaacctccaggctggactggacttagcccagcctaaaagatgaaagtgtgtgtgtgtgttacatatagataacatatgtgttatatataggtattacacataacatctatataaaagtatactttttttggtccacattaaaaggattcaacaatctttttttactaaccccagacatcatacttccaaaagcacatctttaagatcctgctactgaaatttgaatttgttgtctaagctcattagagatgaaaaacaactgctcgtcatttacaattcatcagctggttcggagtaagaaaatctctctctctttctctctgtctctctgtctgtctgtccgtctctctctctctctctcacacacacacacacagagagagagagagagagagagagagtgcgagagagaccattataccccagccttatttctaacttaaattctaacattagatttgatgcagatattttagctgctaacaggaagtgttatctccttttctatgagatgcctgggcttccctaaagtggtgctcatctttttttttttttttttttggctataaatatatgaaagagtctgtcaagagtgcctgcagggaatgaaagtgaaagtgcagtaaagagcaagtttatgagttggcagcttgagtgactggctcctaaacagggacccatctgttctggggttgccttgtgattctctctcgtggatgccgtgcctgcctggagtcctcacatgcaggtggccagctgacaagggatgacactggtgagcctgccggtgtgtccagaccctcttaggtgggtttctgtgcagaatttcccccagatccggctcttcagaaattgtcagtagtaaattatccttagtaaatgtggacatgccactttagaaatcatgtgactccaaaacccatgactatttccaactccagcttttgagaaccaaatgccttctcaagtctcttcaagcccagaaggcaggctttacctcatctctaaagaatctacagagttggagctaaaaaaaaaaagattttttcacaggttgctttattttattttctatttaccctcccacaagcaatgacatgcttgacatgtccgttacatgtcaagcactggcagaaagactggggagatggaggtgagtaagatgcagcctaatcctcaagaagctcacagcccagtgaggaaagcaaatcaagaaattgtaattctgtgtgtcaaaagcaatcatgggtgaatattcataactcatcctgaagccagtgcaggggcaggggcagggacggccttgcagagaagaaactgggctgagtttgaaggctgattaagaggtaatcaattattaattctcagagaaggtgatgatttaaaaaaaccaaaaaagtaaaagaagaggtaatcaactaaaagaggggctgaagcagggcagcagcaggaggaagacaggcaggagtgtgtgtttctaatagacggaaaagcatgttcaaagggccagaggcagatcctgtaagggagagggcatctcagagttaaccatacattcagtatggctggactattatgtgcaagaaccacagagttcagagggaggtaggcaagggccagatgctgaacggcttgcaagtggggcccagagaaaagaggcaacagcccgagccacaccatgacaagaggtggccacaggagattccctgtgtgaggctgtgccggcattgcacaaggcttcttaattattgcatttgccattaggaggacaatatttttgtcattgaacatgtcctacaccttgtaggaaatccagcaatcctggcccctggcatcaatgccagtaacaccctctgcaggccctgtagcagcatcagcccccagacattcccagaagttccccctaagaaccactgcccaggagaaggggacagagaaaggggagcctcctatgagaattcccctagtgattccctgtggaggtggttcccacatcatcactgccaggggctaccaggctcatctgcccgaggagagaaggagaaagaggagattggcacagtggggtggccctttgacctctggtggaaaatcagcatctagtcatggagctccataaatcaatctgtctttctcactgtctctctctcatggtccttcccaaagcccctccctaccaagactttcttttttggttttgttttccaaagcaacatggcattcacgcagggcctggtaatgaaatgagatt

SEQ ID NO: 60785 - DNA, 2857 bp, Homo Sapiens
aatgcggaaaaaaaaaaaaaaaaaaaggaaaatccttagcaggttctagcatgcaagagttcagtaaatggttatcgtcattattatctttggtatagtaaagattggcatgttaacatacactgaggatttagtaaatgtggtgtaagtatggtgcatgctctttgttttgtttggcgtaacagctttattgagctatacaacttacccatttaaactgtacagttcagtaggctttagtgtattcccagggttgtacatccatcacaatagtttcaggtagctctgcattgggcaatgctgttgggagcatcaggaagagcttcccaggaggtcacattaagtggatgttggcagacaggacttagaacagtggggaggagggtggtgtcccaggcagaagcaaaggcttggaactgggaagtacccttgacacagataaagcctggcctggaggggtgtggggcacctgcctccccaattcctcctcctagcctgtatcccaggacacagagttcgaaatattgataataatgaccatccactaagtacttgctgtggccagatcctgtctgaacttttttttttttttgagtcggagtcttgctctgttgcccaggctggagtacagtggcgtgatcttggctcactgcaacctccgccttctgggttcaagcgattctcatgcctcagcctcccgagtagctgggactacagacgcctgccaccacgcctggctaatttttatacatctttagtagagacaatgtttcaccacgtcggctaggctggtctcgaactcctgacctcaggtgatccacccgccttggcttcccaaagtactgggattacaggcgtgagccaccacaccggccactgtctgaactcttgatatgtttgaatcctcacaaccttttttattttcccttttttccagaaaggtacaacttgctggggtaaagcagagctgaaattcaaacccaagtgaccctgacccccaagtccaatcctgagtttcggctgttaccaacctggaggaccctgggcaggttccttccttctgaggcctcggtttccctagctatataccatgagggggttggactttaagatgcagccgatttcccaggacgctgtcgtctgtgagggtggctggctctaggcaacgggtgccctttcccagaacacaggcacatatgcacccataacccagatacgctcctccagctcctccaccggctgcttcccccttggtctcaagctggcagctgagtgtatgtgagtcatgggctggctcagaactgggtcccgcagtgggcacaggcccagaccttgagtcctcagggacactgtgttgctgagcagggcagctctggagtggccgtggaggggagggagtgatggtttctagtggagaccagggaaggcttcttggaggaggcattttgagctggtccttgaagggctgttgtggttgaggcattctaggttgcagggatagttgagcaatggcggagaggctggaaagtcagaggcttcattcattcactcactcagtcattcaacaaatgcttatcgcaaaactgtgagggcaccagggagccagcagcgaacacaggaccgttcatctttcatggggaaacataacagcactcagataagcacagcagtcaatcctggagagaaggtcgtggagggctgaggagggctaggggctcagcatagaggcctgatccagtctggggcattgggtgggctcccggtggtgacatccatactgagacttgaaggatgagtgggactcatccaggaggagagaagggaaggaagatgggaggaccctgcaccttccaggcagagacagcagcatgttcaaagggcctgaggtaggtaaaggcaggtgtgagagaggaaaggaagaggcagggaggcagggctagctaggaggcaggggctggagactccgctgggtgttttatcctgagggagccacagaagggctggcgaacagggcccatctggggacagaggccttgaatgcccaactcaggaatgtgggctctggccactaagcagctgctgcaggaagtgcagagacttggcatctggcaggacttcccatgtaggacactggctcgccaccctatgaccaccctaaccctagaaaaaaggatgcagtactaaagtgtcattcattcaaagccactcctcttttggtattccacccattttccagacggtgacactgaggctcaggaagcagtagggacttgcacaaagccctttgggaagcaggctgggaaacagtggagggagggtgtccattagccccaaggagacacaggatctgggctctgtctttcgccttcctcccagaatacgctgccatcaactccatgctggaccagatcaactcctgtctggaccacctggaggagaagaatgaccacctccacgcccgcctccaggagctgctggagtccaaccggcagacacgcctggagttccagcagcagctcggggaggcccccagtgatgccagcccctaggctccaagagcccccaaccgggacccaaccctgcctccctgggctaggctctggcctgggcactcaccccctggcttagacaccttctcaagggctggccttcagggacccctggtgggtctgcctgcctgggccacccttcctgcctgggcctccccttggcctacctgggccagcccccaccacctggcatgccctcctggggccaagagtgggcctgcaacccacccacttgcctgcccacccaactcctgggcgctccccactctgcccaggccttgagtgtccacattaaatgggtctcccac

SEQ ID NO: 60786 - DNA, 1461 bp, Homo Sapiens
gtgaggacatgagatttgggaggggccagagatggaatgatatggtttggctgtgtccccacccaaatctcatcttcaattcccacatgttgtgggagggacctggtgggaggtaattgaatcatgggggcagatctttcctgtgctgttcttgtgttagtgaataagtctcacaagatctgatggttttaaaaagaggagattccttgcacaagctctctgtgcctgctaccatccatgtaagatgtgacttttctccttgccttcctccctgattgtgaggcttctccagccctgtggaactgtgagttctccattaaacctcttccctccattaaacctcttccctttgtaaattgtccactctcgggtgtatctttatcagcagcatgaaaatggacgaatacacatatataaaaattttacatgtataaaaatgaagctgctctgacagaagctgttagccttgtgctttgaaattctcttgtgtagtacttttccccacctcttccttgagttacattactagaattgaacatggagatcaatttgaaaaccactttctagtctagattcttccttttctagatgaggaagctgaaacctattgagtttataattatccttttctttggttttaatctgtaaagttatctggatttagaacagagaagaaaaaaatacatctaaactaacactgattctaggacctttcagcagtgtgcaagtctgaacgtcttccctgtttttgttcatgttatcactactgttgttctgggtatcatgccaaatttagtgcaatactctcttatattagtttcctagggcttctataacacattatcataaactagtgacttaaatatattctcacacagttctggagcgcagaagtctgtaatttgtgctatgcatcctatttcaaaatcaagccgtgttccctccagtggctctaagggagattttgttccatgcttctttcagctttggtggctacaggcattccttgtcttgtggctgcataactccagttttttcctgtgtctttacatggccttctcatctctctgacctcactctgtgtattttctgtaaggacacttgtcattggatttgggatctacctggataatccagtgtcatctcatcctgagacctttaacttaattacatcttcagagactcatttttccaaataagataacaggttcatttcacctaattactctttctgcatctgtgctctcttttttccagtacaatatgtgaactgttagaccagttttcctatttactcttgttaattttttgacttcctgtattttcaacctgcaatattctgtttctcctcctgactacactttaagtttcccaaggtaaggagcatgcttcatctcctttgtccttcctcagcataaatgcctggcccatacaggtaggttgttaaataaacgttagttt

SEQ ID NO: 60787 - DNA, 397 bp, Homo Sapiens
tcttttcaccaaagtgcttttattttaactagagtgacataatcaaatacaataaaagaaaaattagataatcaaacatgtttctaagttttataatattcataagaaaattaaaaaaaataaaatttcaaagaacagttcactcaactgttttacaaacctggttatgtaaaggttgtacaacaagctccacagatacagtcagcaacattggaaacaagcacttacaaatagattatgcaaaactaccacattccaaatggcaggaagaattcgttataaatttcagttaagtgaagtagtttacagaagcagaagacacttggcttagaaattgcaaggaaaagagcccagcaaattccctccatgaaagagagttggtaaatgttgaatctga

SEQ ID NO: 60788 - DNA, 501 bp, Homo Sapiens
  misc_feature (352)..(352): n is a, c, g, or t
  misc_feature (354)..(354): n is a, c, g, or t
  misc_feature (437)..(437): n is a, c, g, or t
  misc_feature (449)..(449): n is a, c, g, or t
  misc_feature (476)..(476): n is a, c, g, or t
  misc_feature (478)..(479): n is a, c, g, or t
  misc_feature (493)..(493): n is a, c, g, or t
  misc_feature (499)..(499): n is a, c, g, or t
aaaaaacaaaaatggattgccaacctcccctaccatagagtgtctaactcagaagcatgaactggcgtggcatatgcctgttgcctatgtatagtttctcagtataaagcttttctgaattgtcagattctgtggacatttggaggctaggaggtaagattccaaaaccagcatgtcaaccaaagccaataataaggcctctcaaatacctaccacatatctgaagagaaacttttaacagttttcactatatatttaaaacaaaaagtcagaagagtaaaaaagtcccattttaaactgtatatataccatcttaattcttgtgttggactatagtaaataacaaaatcangncaggtgcagtggctcacgcctgtaatcccagcactttgggaggccgaggcggcagatcacgaggtcaggagatcaagaccatnctggcgaacacnggggaaaccccgtccctactaaaaatncnnaagattggcccggnggtggngg

SEQ ID NO: 60789 - DNA, 435 bp, Homo Sapiens
tttttttttaaaagtgattttaatttattgactagccacaaaacattaagcttcagaaagttctgcctctaagttcaacgaattgctttttaaaatttaattttcaagtcctcttcatttgcaccagtttcaaattaagcaacttattgccaccacattttattcaatttcctgactttccaaggtctgtaagtccaagttaaaaccggcatctttgagcagaacaaagtctactctgctggttaactccctttggtgccatatgtaagtattgcattattttctcgcagaccaatttctccataaaagcagttaaaagttaacaacaactcatgtgcttgtagtaccttgacagaatgattatggaaatctgtaataataatctcattattgctatttacagctgcaaaatggggacctgcaataaagatggaa

SEQ ID NO: 60790 - DNA, 7002 bp, Homo Sapiens
  misc_feature (5108)..(5108): n is a, c, g, or t
  misc_feature (5114)..(5114): n is a, c, g, or t
  misc_feature (5186)..(5186): n is a, c, g, or t
gaattccgtctgagtggcgctcgcggcggccgcgccagtcgcgtcccccaccccaacccccaccccaacggccgcacgcgcgcggcggacggacgggcgcggcgcgtcctcgctcccgctcccgtcccggctggggcgcgtggccgtgtccgccgcgtgcgcgtgctgcgtccaacggcctcgcggggcaggagtaagccgcggccgccgcctgggccccagggcggtctctggggccaggggtcccgcgcccagcgtttcccgcccgccaccctctccgccacgcgcccgcggcaccttttcctcccctggccaagggatccagtcggttcggaccagaaggaggctttcgtttagggtgggggcagcactaaagtctgattggagtcttgcggtccgcgcgtcgcagaagcgccttcggttttgcagagagcaaagagggagcagcgagtgcacggagtggtagtaacaaccaatgttctttccacgccctcactgtgtgtccggcactgtgcggagccacttttctgcctttcatttgattcttgcagtgagctggcgaggtgggtacggctatcctccttccttagcggcccaaggcacgggtttggagagcggggtcacaggcacgcacgggaagggcggggatttgttgacgccgggccctctgactccgagctccccgcttcccaagcctgtttttagtctttgcccccagagcacttgtccctcggggcagtatcagcctcaaaaggccacctgccgagaaggctgcagcggcatttgtacttgggctagttctgggcttccagggagacaagggttggaagtgggaatgtgacaaaggaaaagggtttgggcttcctttctacgtgtacttgtacaggccctgggtagatgtgccgccaccgtagcttctggaaaaaagtagggaaaacgatgagtaagtgcaaatgaacatggactgtgttcctcatcgggtttgaatctcagattgctgatgggaaattcccgccagcgggaagttaggctccggttttagacgttgaatttttttttctctactttttttttaattggaggagacttttgcagaaagaccttgagaagattcactttatagttgaagggaatgaggtgcaaagcgacgaatttaagatctcactagcatctgtgggttaaaatacggaattggaatagaaaggttggcgcccagttacagtatacatttggacctctgtggagcgtgtcatgctggatgaattactggtgttggagatgtgttggaaaaaacaactgtgacagtcgagatctgtggatgaaagtttgtgtacactccgtttatttagcatttactctgctgggttcttgtgtatatgcagaaacaagatgcttttcttcagggactggagcttatatttttctagtagttaccatcttttagattatttaaaagccaacatactccttggcttagtgaaataaatcttctatgttatagaaacacttctataaacataaagatttctataatcgtgttctggaaaccctttctataaacatgtttctataacagtattataataatctataacagtattataataatgttccaagtaacatttacttggaactttgctggtgtggcgattccggttacttgcccttacagactggttactatgaatagcatttaactagactaaagttgagcaatttaagttgtcaaatgaaaacactagaatgacctacatttaaactgtttaagcttgagtccagctaattttattactgcttgaggcaaaatagaatgaaattaccttacacattattgagggaaaatttcgttagtttctacttaaaatattaaaaaaatacagttcttggcctcaggcaaatggttatcacttgggcaggaacatgaaaattacgtgattatttcacaaactggtgctctaactgattacttgtgcatttatcaggaacaagtgaattgaagcaaattgtggtaatgtaaggcttggcaaggctgccctacatccctaccaagtcatacgtcagttttgttggagctgcttaccggtacaaaagtctaagcttttgtacctcttacaggtagaaaagtagagagttctttgtttaactcagtttgctgttcctgagctgacactgcaccaggggaacattaggagattttggtaatgtttgtttgtgacctacttagagcagtttttgttttgtaacttatggtttttttttttcccactcgttctagtattttgcatagaaagtgaacggcagaaggcagttttaagtttttgtaaaagtttgtgaattttatatcgtccttaggactgatggggctagtgttaaaagataaaatttaacataaagcttacatttgtgactaaagccaattttatattttttttctttatttttgtcagtctgataaaactgcccacttggtcttttaacattttgcaaattgattttttttttaactttcagaatttaaataggcattgtatgtttgtttaattatattgtgctttggcttccttggacgaaactattactgactttacaaagaagaatggataattgtggaagtaggtaggtcaaaaaaaaaaaaggaaagcctcgcccgccccccagtaatttgtcaaaagcaagtgggaaaaatctctggtagtgcagtactgcccttccagtactccagtacaagccctggagttgaatttagattcagcaactattatcttacatgtagttggtgatcacaatgtggtggcacactaggtttataattttatatctcagaaatcagctatttacttttttttaaaaaagtattcttggacatcctgtctgtctttagttgggaaggtcaagttgcaagccaggtgatagggttaagagtaggaataattcacacacacgaatagtgtcttaatattctgtcttacaaggtggaaagcaatttcaaaaaaattgcccttacagcctgtagcttagtaaataaggtctttaggcgactttgtgatagagtccctcttctgtcaggtggccagtctgtcatgtaataagctcttggtatgtgtgttgtatcttaggtacttaatcaaaagtaaagattaaagatgattgacagaaatttggcttcctggatggtatacacatctacttagtagggatgtaatctttggtggctattaacttcactggctgtataaagcatcattatgtatttgtgtaaccttttgcatatttagagagtgctttcacacatctttggtattaccatacttttactaaaaagtgaattggagctctgaaaccgaattgtcaaaactattttgaaaagcatgtggtacctaatagggtactatagccagcttatttccttaattgaaaaatcttagagggattttgaatctggaatgtatgaatgtgacacctgcctgcccttgccagttctcccatatgctgtttatgcaaagccatagcgtgtgcttaagtacacccttgtttctgcactgaggttgcctagatttccctggagtgtatccacctgtcttgatctgtttaagaattttgcggatgagcattagtattaactgtaacatatcttttcacgtgatgagaaagaacaaagatttttttaaattgtgaacctgagtaggttttaactttggagtggggaagggatacactaagataaaagatagttgttaagtattctgattcctgaagttttttttctttcaggaaaacggtatttttgagataaagtaagatttgtggaagagttgcaatagagaggtcttgaatacccattatccactgttaacatcttatgtaatccaagtacatttaacagaactgagaaattaacatcgataaaatactgttaatgaaagactttatttggatttccttagtttttctactaatgtcctttttctgttctaggatccagtccaagatgccacattgtatgtagtctcctgatctgtgtcagtttctgtctttccttttgtctttcgtgaccatgacacttgatctcatttggatttgatgttaaggattagactgaagttacagatttttgggggaagaataccacagaaattacccttatcacatcagattgggggtccataatatataactggttgaatttaacctgatgatttggttcaggtggtatctgtcaggttagtgtttttttcccctttagatactattccttagatgctagtcaccaagtccagctcacactcaaggagagaggggaattaggctctactttctagagggaggagaatgtgaatttgtggaagtatattaaagctactgttattattttgggggagatgcttcgaagccatggaaataaagttcccctccttaattttagcattttaatggatctcgtctgcagctattattacttcggggttctaatggtgattttttttattttcctcattccttctacagtataaattttctgtgaggaagatttgtgtattcttcatgttttttctttttttcatttatatcactatagaccacggatattaattttattctttgggttgtaatccacaattatccttgctgatgtttacttatttttgattattatttattttatatttttataaaatatcgtccaggctgtctcacactcctgggctcaagcaatcctcttgtcttggcctctcaaagtgctgggattacaggtgtgagccactgtgctggccacagtttattttgttgttcatgttgttccagcttttttttttttttttggctcctttctccttttgacacttccctatcttatctgttttttaaaagcatgttttttctttcattaattaccaggtatttcaggctcatcttgcattttgcctgtctcaggtccagaatcaaccatttctccaaggaggcgtcaggaagaattgtgaagggaggtgacaggtggtaaatgcgaagagtttggaaaaatagattgacagtaggcccagtgatgttgatacttttcttgctctgagcacagatgttggcttctgtattcatgttactccagttctggnaaaagnttttgtttctaaattcccacgatttagagaaccagatatcaaatgtttgaatacatgacataatcctgaaanaaaatttacaaaaatttaatatattctcaagttagtacacacaaacacttgctgtttttccttggtgtttttgacaacttttttaaagtaaaaagaccacttaaatactatcgtactcagaattaacatttgacattttgcattgccctctaagactcctttttttctatacgggcttccattcccttccttccagggatctttttcacatctttccaggctgttttattgatggggaatttttaaaaatagctttattgaggtataattgacaataaactgcatgtttttaaaatgtactgcctgataatttcagacaccttttgtaatcccagcttctcaaaagactgaggcagcagagaggattacttgagcccagatgtttgagctgcagctgcagtgacctatggtcatgctacgcactccagcctgggcgacacaggagactcttaaaagaaggtatacccatgaaaaccatcaccacaatcaagattgtgaacctatccattacccccaaaagttttctcatgtcccttttccctctttcttgcttgttccttctacccttctccctgcaggaaatccttgatctttttatcactgtagattactttgcgttttttagaatttttttgtaaatacattatgttctttttttaattgctcagtgctagtctgttgtgtaggcatatcacaattttttggtttacctgttggtgggcattgaaaaacggcaaaagctgtgtgtttccagctttttgactgttacaaaataaagcttctgaactttgtgtacaagtctttgtatgggtatacgcctttatttctcttgggtaaatgcttaataggggaatgtttagatcatgtagtagatgtatgcctaacttttaaagaaactccctgttttccacagtggttgtaccattttacattgccaccagcgatgtttggggggttccagttctgccagtatgttggctaacagtgtgtatggtcagtctttttaattttagtcattgtgacaggtgtttagtggtacctcacaggttttaatttgcatttctgtaattgctagtgatcagcatttttcatttggcattcatataatttctttggcgaaatatctttaagtcttttgctcatattttatgggattggttacttaattattaatttttttgttttgagacagtgtttcgctcttgttgcccgggctggagtgcagtggcgccatctctgctcactacaacctctgcctcctgggtttaggtgattctcctgtctcagcctcctgagtagctgggattacaggtatccaccaccacacccggctaatttttgtatttttagtagagatggggtttcaccatgttggccaagctagtctcgaactactgacttcgggtgatctgccctcctcggcctcccaaagtgctgggattacaggcatgagagtactttatatattctggatagaggtattttaaaaattagagatatgggtcaggcgcagtggctcacacctgtaatcccagcactttgggaggccgaggcaggtggatcacttgaggccaggggttcgagaccagcctgggcaacatagtgagaccttgttgctactaaaaatttaaaaaattagccaggcatggtagtgtgcgcctgtagccccagctactcgggagggtgaggtgggaagatcacttgagcccaggagttagaggctgcagtgagccatgatcacaccactgcactccagcctgggtgacagagtgaaaccctatcaaaaaaaaaaaaaaaaaaaaaaaaaaaggaattc

SEQ ID NO: 60791 - DNA, 502 bp, Homo Sapiens
acattagatttttttattcatcattaaattacaaggcaaaaaaatgatattttgttttaatttgcatttatttgattgttgaaactgtatacatttttctcatgcatttcttctttgagaattacctgattatatcctttcctatttttttttcctggaggtgatggcttcttttttttatttttagaagttgcttatttaagatagcaattgtttatagtaaatatagtttataatgttaataatgctttttggctaatttaaaaaaatttgtcgtccagagtcccaacctttggaatatatttttttctttttttatcatgtttgtatcaagatgtagttaaactcatggcacattttaaacatctgtaagtcagaaggatcacttttggaagaggccaattactggcaaaagtgattcattatcaagacaaaaagtaaatgtactttggaagtgtaaaaatcttaaaaaatccttaaagaaccctttataaaagcaatg

SEQ ID NO: 60792 - DNA, 1657 bp, Homo Sapiens
aatagtggtgatgtcatgcaggcaagatggcggaaggggaggacgtgggatggtggcggagctggctgcagcagagctaccaagcagtcaaagagaagtcctctgaagccttggagtttatgaagcgggacctgacggagtttacccaggtggtgcagcatgacacggcctgtaccatcgcagccacggccagcgtggtcaaggagaagctggctacggaaggctcctcaggagcaacagagaagatgaagaaagggttatctgacttcctaggggtgatctcagacacctttgccccttcgccagacaaaaccatcgactgcgatgtcatcaccctgatgggcacaccgtctggcacagctgagccctatgatggcaccaaggctcgcctctatagcctgcagtcggacccagcaacctactgtaatgaaccagatgggcccccggaattgcttgacgcctgccaaccagagctctgggcacagattctggtggctccctgctggccctcttgggcctctgctcacacctgggaaggggctctctaaatcccggccagaaactctgacttgtgccaacaataggatgacccaagggagaggaaacctatcctcctcaccagaagagcctgtgtttttctgctgaacacccactgttcctgaggactcctgctgggaagtcccaagggatagttctagcccttctgcctgtgtagacagaagctaaaccaccagtctctctcggaggaagctgagacaacatactctgtccatacataagcaggcagggagggccatgccacctacccttggctaaacagggacagtgaacacattttggttcctatcccagtgggtaagaggcacttatctctgggaaatttgcctctcttgggactctccccctcccaggcattttccattcctggaaaggctcctttggggttcagaatccagagaccaaaccctgacccacctccttcctttcctccagcccacgctggtctgtccccatgccttcccagggcttcttcatgtcagatgcacccaagtccttagcccagctgtgccacctgcaggagttcgctcttgcgtttcttcccctccccaagaagggagggggctacttcaggcccttctgtgtgttgcctggcaggataccttgtccaaccagctacccacctcaactcccctgtagtttaggacacaaaacagctaccagcggtacagagcggtgatcaaagccgagtacttacaactctggtaagcctagcttctccgcctcagcccttctgcttctggaagggctatcctgggggtgaacttgaaactctcatcaggcttccacttcaaaccttcagtgagggggtgggatggagagaatgctgaatcttttttttgacgggatggggtttttctctttgtaattatttctttagtttaattaaccttttggttgtttgtgcaatattatatattttaaattataatgcatctccccagagtattttgtagctgggaaaagaaaaaaggaaaaaaagaaaaaaagattctaacagctgttagttttataattaaaaaagaaagaaaaaagaactttgtcctgaaccttttacagacttgccgttaacagcattaaagtgattcacccgaagctg

SEQ ID NO: 60793 - DNA, 468 bp, Homo Sapiens
gtttttctccccaactaatccagaagctccatggggataggaactttgtcttgttccttactgcatgcctagcacctagtatgcttaacacatagtaggaggcactgacacatagtaggcatattatgcagaacaacacatgcttcataacttagtattctcaatgtcgcaaacagtcatgacctagaggcttatgaaaatgcaacagaatagaaagcagagtttattacatttagtagaataaaaattcttcagtgaaacttatagtttatatgtacacatatgtcccatataaaatttatttcttactataggtaaacattttaagaagtcttaaaatcactgctttatggggattatttcatttgctccccacaataaccctacggacaattccataacttccattataacagaatcgaaatttctagatgttatatatgctgtccaagttgacagcgccatcta

SEQ ID NO: 60794 - DNA, 537 bp, Homo Sapiens
ttttttttttttttaaacatcaaagacttctaacatccagaaggtaatacatttagcaggccttatcaaagataactgtctattctgatatatgaataaaggtaatacatgccatataataatattcattattaggtttgctttgggccttaaactgaatctaatgatctcttggagctgacctagggggtgtcttttcctaatgttaagaattttaaaaggagccatttattttcagtcatgtacaaggtatgtcttcttttaaacacgggactactttagacaatcaaaactccattctcctcaaaggcatgatggatgccttcaactttgtagctgtcttaagtatttctaacaagcttttttttggataaagtgataaggtttttgtgggagggaagaaaaaaattgggacaatttgggggtttgcttcttggagagaagggagggttggaaatctcatgcctttcaattaaataattaaaaagttataaataaataagttataaaataaataattaaaaaatgtagtatcta

SEQ ID NO: 60795 - DNA, 1389 bp, Homo Sapiens
ggcacgaggcccaccctgctggaattagcgatttgctggctgaagtgtccgctgaagtggatgggccagtgccaggatacctctcttccccccagagcataacagacacgtgcctgtacatcttcacctctggcaccacgggcctccccaaggctgctcggatcagtcatctgaagatcctgcaatgccagggcttctatcagctgtgtggtgtccaccaggaagatgtgatctacctcgccctcccactctaccacatgtccggttccctgctgggcatcgtgggctgcatgggcattggggccacagtggtgctgaaatccaagttctcggctggtcagttctgggaagattgccagcagcacagggtgacggtgttccagtacattggggagctgtgccgataccttgtcaaccagcccccgagcaaggcagaacgtggccataaggtccggctggcagtgggcagcgggctgcgcccagatacctgggagcgttttgtgcggcgcttcgggcccctgcaggtgctggagacatttggactgacagagggcaacgtggccaccatcaactacacaggacagcggggcgctgtggggcgtgcttcctggctttacaagcatatcttccccttctccttgattcgctatgatgtcaccacaggagagccaattcgggacccccaggggcactgtatggccacatctccaggtgagccagggctgctggtggccccggtaagccagcagtccccattcctgggctatgctggcgggccagagctggcccaggggaagttgctaaaggatgtcttccggcctggggatgttttcttcaacactggggacctgctggtctgcgatgaccaaggttttctccgcttccatgatcgtactggagacaccttcaggtggaagggggagaatgtggccacaaccgaggtggcagaggtcttcgaggccctagattttcttcaggaggtgaacgtctatggagtcactgtgccagggcatgaaggcagggctggaatggcagccctagttctgcgtcccccccacgctttggaccttatgcagctctacacccacgtgtctgagaacttgccaccttatgcccggccccgattcctcaggctccaggctgtaggtgcctacctgcccctcacaactgcccggtacagcgccctcctggcaggaaaccttcgaatctgagaacttccacacctgaggcacctgagagaggaactctgtggggtgggggccgttgcaggtgtactgggctgtcagggatcttttctataccagaactgcggtcactattttgtaataaatgtggctggagctgatccagctgtctctgacctacaaaaaaaaaaaaaaaaaaaaaaaa

SEQ ID NO: 60796 - DNA, 1999 bp, Homo Sapiens
cgctctcagccgccgctctgccccgcagcagccagccccgtgtccggcagtatgttcagctgggtcagcaaggatgcccgccgcaagaaggagccggagctcttccagacggtggccgaggggctgcggcagctgtacgcgcagaagctgctacccctggaggagcactaccgcttccacgagttccactcgcccgcgctggaggacgctgacttcgacaacaagcctatggtgctcctcgtggggcagtacagcacgggcaagaccaccttcatccgacacctgatcgagcaggacttcccggggatgcgcatcgggcccgagcccaccaccgactccttcatcgccgtcatgcacggccccactgagggcgtggtgccgggcaacgcgctcgtggtggacccgcggcgccccttccgcaagctcaacgcgtttggcaacgctttcctcaacaggttcatgtgtgcccagctgcccaaccccgtcctggacagcatcagcatcatcgacacccccgggatcctgtctggagagaagcagcggatcagcagaggctatgactttgcagccgtcctggagtggttcgcggagcgtgtggaccgcatcatcctgctcttcgacgcccacaagctggacatctccgatgagttctcggaagtgatcaaggctctgaagaaccatgaggacaagatccgcgtggtgctgaacaaggcagaccagatcgagacgcagcagctgatgcgggtgtacggggccctcatgtggtccctgggcaagatcatcaacacccccgaggtggtcagggtctacatcggctccttctggtcccacccgctcctcatccccgacaaccgcaagctctttgaggccgaggagcaggacctcttcaaggacatccagtcactgccccgaaacgccgccctcaggaagctcaatgacctgatcaagcgggcacggctggccaaggttcacgcctacatcatcagctccctcaagaaagagatgcccaatgtctttggtaaagagagcaaaaagaaagagctggtgaacaacctgggagagatctaccagaagattgagcgcgagcaccagatctcccctggggacttcccgagcctccgcaagatgcaggaactcctgcagacccaggacttcagcaagttccaggcgctgaagcccaagctgctggacacggtggatgacatgctggccaacgacatcgcgcggctgatggtgatggtgcggcaggaggagtccctgatgccttcccaggtggtcaagggcggcgcctttgacggcaccatgaacgggccgttcgggcacggctacggcgagggggccggcgagggcatcgacgacgtggagtgggtggtgggcaaggacaagcccacctacgacgagatcttctacacgctgtcccctgtcaacggcaagatcacgggcgccaacgccaagaaggagatggtgaagtccaagctccccaacaccgtgctagggaagatctggaagctggccgacgtggacaaggacgggctgctggacgacgaggagttcgcgctggccaaccacctcatcaaggtcaagctggagggccacgagctgcccgccgacctgcccccgcacctggtgccgccctcctctgcctggggccattgagcccagcctccagggcccgggtgcgtttgcaggccagtggccactgtccgggctgtgatggcaccaaggcaggtggagcaccaggtaccacacagctgggcttcccaccaggctttcccgcgggggtctcagggagcttctccccagcgctgctcggagtctgcaggaactggccttgttctccttagcccgtcactccatacagtattaggtgaggatggatgcgggcgctgtccttgccgggaagtcactgttgaagttgcagtggcttgttcacacctgtgggaagagaagtgaagactttctccttgcattaaaaagtctgaactgtgaaaaaaaaaaa

SEQ ID NO: 60797 - DNA, 386 bp, Homo Sapiens
tttagttacttcatacttttattttctcatatatatttctcctttattcagataaaactacagaatacagatatcacaaattcaaactccagcacaagtcaaatacctgatgatacatgtatgattacaggaaagaattcagaaaggaatatttaaataaggttttaagtttatgatgtgctataatattgtatagacacacaggaattaaatttctacttctttattctattaagcaatacaataaaagataatttacatactgtgcacatagatgtacacaccacacaaaatctaaagttgtctaacttcatcttatttttaggtttctgagttttaaaatctagtccatttatagtgaatgaatgtaaaatttaatgagaggg

SEQ ID NO: 60798 - DNA, 467 bp, Homo Sapiens
tgatggcaccatcactttctaacaccattatatattttattttctgcatcctctaatagaatgtaagctccatgagggcaaagctttttattttgttcacttaagtaaaataggcgtctagaacagtacctggcacacaataggagccaaaaaaaaatctgttcagtaaacgaaggcaaatatcagtaagtataatatgcgtgtgggaggggagagggggttaaaaagggcaagaagtcccaataggtagataaaaactccacagagtaggaatacagaatcgtgcatcgtgtcccatttgacaaatttttgagtttatctagaaaatagccctgcgttaaacgtttgttaaaagtgctgatttcaatgttcttacattctttaaaaattccttgttaagtgttctaatcttttagatgtggtatcagccacagaaatttattgttcccttcttgttttgcagttca

SEQ ID NO: 60799 - DNA, 324 bp, Homo Sapiens
  misc_feature (82)..(82): n is a, c, g, or t
  misc_feature (177)..(177): n is a, c, g, or t
  misc_feature (189)..(189): n is a, c, g, or t
  misc_feature (272)..(272): n is a, c, g, or t
  misc_feature (281)..(281): n is a, c, g, or t
  misc_feature (320)..(320): n is a, c, g, or t
ttttttttttttttttttttttcttataaagtaagagttataattaaggtaatgactaaagaaaaacactgagtggtaagantgagaggaaatgttatctgtagctattgaaagctctcttctagcactctgactttgtcagggctaacgcttttttcttattgtctctatattccnaattctccaccngtaaaacagtgcaaatttatgaatcttgtaacttactgtcacaaacctgggaaaaatcttaacagtgagggtggttacaggantcatttaangtataaacattagtgggggtcttaaaggggaaattaacnttaa

SEQ ID NO: 60800 - DNA, 468 bp, Homo Sapiens
  misc_feature (218)..(218): n is a, c, g, or t
gtcactgaatataaaatttgtcctgaatttactaaatcttctacaccctgaggaataacaacagactaataaaagtaacgtcagggttagctttctggacaatagaatcatccagaaagcacaaattatatatagctaatattcttggaagcacaaggtttcatcagcagactaaactactgccctgtattgttcttagcaaagagtttggttttacngtgttaacatggcctggtgagagtagagaagtcaaagttgggagcctgaggtttcctctcccacctgagatccacaactgattcattggttttctgtcttcaccatgaacatggcatattgctgccctttaggaatatattattcaacagttctctgtaaaagcactttgggaatctttagctatatatttctatggaaattatatttgctatcttgaaatatggaattcctatccctcccttctccata

SEQ ID NO: 60801 - DNA, 491 bp, Homo Sapiens
ttttttttttttttttttttttttccttaggcacgatatttattgaacaccggctgcctagcacaagctgtacctgtgaatacaaagaaagccgaatgatacagcccttacctttgaggaacatgcatttgcaatccctggggcacaaaggccaaaagcaggccgtccctaacaatgttcttgcctcaagcccagtaaagatggaagcctcaggacagctccttctttaacgcaaaggggttggtaactctagttccaggctcccaatactgcagtgaaaaggaattttgtcctatctgaatagatatatgttttttagacaaacaggtatcatattctaagggccagaaatatcagctttgtgaaaatacagtccaaacaagtcattttcccatggaaattgtttcatagatggccaaagattccatggtttctataatagctcatactcatagtcatccttccatctcaatatccagctgatgtctccc

SEQ ID NO: 60802 - DNA, 1777 bp, Homo Sapiens
gaaaaggaagtgtggagtcaagtatggctgcctgaccatctcacacagcacgataaaccggcccctggtgaagctgaccctgctgacgtgccaagtgaggccaaaccctgaggagaaaaagtgcttcgacctggtgacccacaaccggacgtaccactttcaggcagaggacgagcacgagtgtgaggcgtgggtgtcagtgttgcagaacagcaaggacgaagccctgagcagcgccttcctcggggagcccagcgctggcccggggtcctgggggtccgccggccatgatggggagccgcacgacctcacaaagctgctcatcgcggaggtgaagagcaggcctgggaatagccagtgctgcgactgcggggctgcagaccccacgtggctcagcaccaacctgggcgtgctcacctgcatccagtgctcgggcgtccaccgcgaactgggcgtgcgcttttcgcgcatgcagtcactcaccttggacctgctgggcccctccgagttgttgctggccttgaacatgggaaacacgagcttcaatgaggtcatggaggcccagctaccctcacacggcggccctaaaccctcagctgagagtgacatgggcacccgcagggactacattatggccaagtatgtggagcataggtttgcacgccggtgcacacctgagcctcagcgactctggacagccatttgcaacagggacctcctgtcggtactggaggcctttgccaatgggcaggactttggacagccgctgccagggcctgatgcacaggcacctgaagaactcgtcttgcatttggctgtcaaagtcgccaaccaggcttccctgcctctggtggatttcatcatccagaacggtggtcacctggatgccaaggctgctgacgggaacacggctctgcactacgcagcactctacaaccagcccgactgcctcaagctgctgctgaaggggagagctttggttggcacagtaaatgaagcaggcgagacagctctggacatagccaggaagaagcaccacaaggagtgtgaggagctgctggagcaggcccaggcggggacctttgccttccctctacatgtggactactcctgggtaatttccacagagcctggctctgacagtgaggaggatgaggaagagaagcgctgcttgctgaagctcccggcccaggctcactgggccagtgggaggctggacatcagcaacaagacctatgagactgtcgccagcctgggagcagccacccctcagggcgagagtgaggactgtcccccgcccttgccagtcaaaaactcttctcggactttggtccaagggtgtgcaagacatgccagtggagatcgttctgagcaaagaaagaagggagagtaatagaattgggagggcagagacttaagggttctgcttcccagccctagaaattctatcattgctcagccccaatgagaaagcagatacacctaagccatcatcaaccactaacatctcaacttgccagttgctgggtgctgggccctggcaggaatgggccaagccaagcaggggagactagagagcaccaatggccaacacagctgcctggctggggaggctgtgctgtttcccctggagacctgactggtctgtggttcccacaggaacagggttgtcttttgagcccccagtgtctggtttcattcatctcagacttgttatttcactcatctctaataaaggattggggggtcaaaaaaaaaaaaaaaaaaaaaaaaaaaa

SEQ ID NO: 60803 - DNA, 176928 bp, Homo Sapiens
  misc_feature (24475)..(24476): n is a, c, g, or t
aagcttctagttttaaaggaacttttcacaatcatcagcatggacttcccaacggagacaaagatgtgagctctaactgaaggctgaaccacacctctcatttctacagattccctccagtgtggactctctgatggtagatgagatgtgacctctgactgaagcccttacaacagacatcacatatgtaaggcctctctccagtgtggactctctggtgtgtgtgaaaatgtgaggcctgactgaagcccttcccacactgctgacacgtatagggtttctctcctgtgtggaccctctgatgggcactgagaccagcactccaactgaattctttcccacattcctcacatttaaatggtttctctccagtgtgaattatctgatggacttgaagatttgacctctggctgaaggccttaccacaagtgtcacatttatatggtttctctccggtgtggactctctgatgggcttgaaggtgtgaggcctgactgaatcgcttctgacatgcatcacacttgaatggtttttccccagtgtggacgctctgatgggcttgaagatttgaagcctgactgaaacccttaccacactcttcacatttgtagggtttctctccggtgtggactctctgatgattgtgaagattcaagctccaattgaagcgcttcccacacacttcacatttgtatggtttttctccagtgtggactctctgatgtgcttgaaagtatgaactctgactgaagcctttcccacacacgttgcatcgaaatggtttctctcctgtatggaccctctgatggctctggaaacttgaggctgaactaaaacccttaccacactcttcacatttatatggtttttctcctgtgtggactcgttgatgactatgaagattaaagctcaaactaaagcacttaccacactcatcacatttgtatggtttttcttcagtgtggactctctgatgggtatgaagatttgagctacaactaaagcgtttaccacaatccccacatttatatggtttctctccagtgtgaattctttcatgggcctgaagatgtgatctctgagtgaagcccttcccacacacctcacatttataaggtttctctccagtgtgaactctgcaatgaatgttaagatctgtgctacgactgaagcccttcccacaactgtcacatctatagggcttctctcctgtgtgaataggcaaatgagcataaagatgtgagctctgattaaagctcttaccacactcgtggcatgtatagggtttctcccctgtgtggactctctgatgagtttgcagatttgagctctgactgaaacctttaccacattcatgacaccaatagcgttttttcccagtacgaacactttgttgaacaggaatacctgagctataactggtgtccttctcatgtgtactacacgctggagacttctttcccaagtgtacctgtttatgaagttcaagactggagctatcattgaaggcttcttcacattcattaccctggtaggttttctgtcctgtgtgaatactacgctgggtaagaggtgatacctttagggtatctttaccacaatcactattgctatgaactttatctcttttgtgcactatattatcatcatggtggtgtgaaatacaactgaaaatgtcaacatatggagcaaatatacatagtttgtttttcatctgagtctgcttacaacttctctgataattctgtgtctcattcagatatattttactccaagaattcggaactttcccagttggaaattcttgattttcaatgatactggaatgatcccctatgtgattcactagacagttgtcatccacagaagcttgaatagattctcctgctcccacttgacagggggaatcatggtgcttggggaactgagagctctttccttcaatatttatcatggagtcttgacttctggctaatttgctcgcaatgtgttcttcttgatttgccagcatgaaagctctcccagtgaaaagcaccttaatcctgctttgtgaagagttgccatctcattttgattcctgtctcctgaaaggatagagagaataaggaataaaggaccaagagactgacattagcaaagtagagaattaagatctaagctctcattttccccatggaaacgtcaaaaaaacaactagactggctgaaataaatttataggaactctgaaaagcagctgcaaccaagagaacaccaaatgttttaaaaagccatatttaagatagaaaatttgagatcagcccagggtatggttaaggtgtatcttgggtcttttctgagtatgagtcttgctgcctgtgtgtattctccagtatacacaactccaaagtgaatgctttgtccagatgtttccaaattttacacatagttccttcggtatcaggctttagttcatgatggaaactttcagcttatctttaccatcacagattttcctggattttatttgcctctcgaaacacagaactacagatctaagaataggacaagaggtagaaaccagccaactgcagaacaacaaaatgatatctcagtaagtacttagaaaggaaaaattgacttctttgcctataagaatggtaaattaaaagtcacctcttctttggctacagcaactgaatcgtaagtagcaactacataaatcaggcaaaatatatgcctcaattataggctctcattatacaacctgcacatctagaaacatgctcaaaataactgatagacaaatccatatttatagctggagatttcaatacccctttccaacagctagtaaaccaagtaggaagatatgtggtggcactcatgtaactgagtccgtgctgtgaaagggacagctgccctggccccttgggggtcagaagtcaccatgccaagggctgtgtgaaaggtgctaagttccactgagacccaagctccagtttttgagaagccaaaaggagggagcaccaggcttccttccaaccagtggtgctggtatcctccaagtttcttcctccaggccacctgtggatatgccatccagaaaccagtccagcccagccaagatgatgacctgtccccttatacgctgctcaaagactaccagaactttcccaggattgagagggttgatgacattgggaaaagacacttgtctttggaaatggccaaccaggagaagccaaaaattaagccagaatagttgataaaaaaggacatggcaagccctgaggacaccagctccacagaggctggaattatcgacttgaacatcaaggcccacagttttgttttgttttgttttgtttttttgaaatggagttttgctctgccactcaggctggagtatagtggcatgttctcggctcactgcaacccccgcctcctgggttcaagcgattctcccacctcctgggttcaagcgatcctcccacctcagcctcccaaaatgctgggattacaggcatgagccactgcacctggccaagatctgcagttatgaaaaacacatgctgacatattgaaaggacaaagcccacaaatgctatctgctgataagcatcaaccagaggaaaaagatgctcaaaaacctccacaaaacctattatgacaactctgggaagacatgcagggaactggggactgaagacacctttcccctctgaattaccaaacagcccactgaccgtcgcttctgactaagaaggctctgtgaattcaggttttccagaatgtgcaaaagctgaagaaacaaaaaaggtcttagctgcagcagcatcagcagtcagaaaacaaaacaaaacaaaaacaataaattatataaaaaataaagcaaaacacaacaaaaaacaagtaggtaataagtgaagatacaggcttgaagcaatattatcaaccaagttgactacttggtctttctaggacactctatccagtaagagcagaaaatgttattttcaggtgcacatggaacatactccaagacagaccatattctaggccataaaacaagttctaacagatgcaaaaggagtcaagtcatacaaagggtattctaaccacaactgatttaaatcagaaattatgaacagaaacatctctgcaaaatcttcaaatattcagagaataaataacatacttctaaataaactgtggatcaaaaataattcaaaacagactttataaattgagtgaaaataaaaaaccaatatatcaaaatttctacttagagcaaaatttataaagcagaaatgtgtcatagaaactaaaaacacaagaacaaattaaacacaaagtaagcataaatagaaaataagaaaacaaatagctagttctttggaaagaacaataaaattaataaactctagcactcatgataaaaacagaaagaagatacaaattacaaatatcaggatgagaggtgacatcactatagatcctgtatatattattaaaaggataagggacttatgaactttatggcaataaatgcaacaatgcagatgaactggacaaatttcttgaaagacacaaaataagtttacttgagaacatacagataatctgaatagcccttatctaccaaagaaacagaattcatacttacaaatatttccacaaacaaaagttcaggcttatagggcttcatccatgaattttaccaaacatataaggaagaaacaataccaatgctagacaaactcttccagaaaaatgaaaaggtgtaaatacttctcaacacattttaggaagccagcattattctaacaccaaaataagacaatgacattccaagaaaaggcaactacagactaacattcctaatgaacatatttataaaattcttaacaaaatgtgatcaaatcaaatctaacaatgtataaaaaggataaatcaagacaaagtagtgattatctcaagaatgcaaggctgatttagtattctaaaattagacctaaatgcttccctcagaaaatcaggaacaaggcaagtatatccactctcacaacctttattcaacattactgaagttctagtcagtgcagtaagacaggaaaaaaacaacataaaagaaataaagatcataaaggaaaaaatgagccagataaataatttgaaatactgattttaaggaagctcaatgagatacaaaagaaatttgaaaagcaatacaaaaaatcaattcaggatatgaatgagaaatttaccaaagagaaagagataggtatcttttttttaaaaagccaaacaaataaaaacttctggaaatgaaaaaatcattgaagaaattacaaaatacagttgaaagcttttacaatagactagacaagcagaagaaagcatctcggtacttcaagacaggtcttttgaattaatctagtcagacgaaagtaaagaaaaaagaataaggaagaaaaaacaaagcttctaagaagtatgaaactacataaagcaaccaaacctatgaatcataggtattcctgagggagaagaaaaagtaaaaagtttggaaacctagttaaggaaataattgaggaaaacttccttaatctagcaagagctttagatatccagataaaagagatctaatgaactccacgaaaatacattgcaagatggaactcaccacagcatacagtcatcagactaaggtttatatgaaggataaaatcctaaaatcagcaagagaaaagtgtttagtcacctataaaggaagctccatcacacaattcaacttgtagaaaccttacaagccagaagagattggattctattttcaagttgcttcaaaaaacaaaaaaatttgtatcctactagaataagctctataaatgaaggaaaaataagccttccccaaataaacaaatacttagggagtttgtcaccactagaccaggtctacagggaatgctcaagtgagttctaaccatgaaaacaaaaggttgatacttgccatgataaaagacacaaaagtataaaacttgcaggccttataaaataattacacaaagaaagaagataagtcaaatggcaacataactcatcttaccgataaagacacagactgaaggtaaagcggtagaaaaagatattccatgcaaatggaaaccagaaacgagcaggagtagctatttttatatcagataaaaaaagactttaaatcaacagcagtaaaaaaagacaaagtcattacataatgataaagtgatcaataaacaaataagataacaatcctaagtatatacacaccaaacatcagggcacccaaattcataaaacaaatattattagacctaaaaaaatacacagcaatacaataacagtgggggacctcaacaccccacagacaccactagatagactgagacagaaaatcaacaaagaaacactggacttaaattaaattttaggtcaaatggagctaacagacatttacagaacattctatccaacatcagaatatacactcttctgattagtgcatggagcattctccaagatagaacatatgttaggtcacaaaaaaagtctcaatacatttttaaaaaccaaaatcacaccaagtatcttctcacacctcagcagaataaaactagaaatcaattccaagaagaactctagaaactatacaaatacatgaaaattaaacatgatcctaaacaatctttgggttaatgacaagacaaattttaaaatttcttgaaatgaatgaaaacgaaaatacaatataccaaaacctctgggataaagcaaaagcagtgctaagagggaagtttatagtgttaaatgtctacactaaaaaaaaaaaaagataaaaaattaacaacctgtgtctcacctccaggaactagaaaaacaggaaaaatccaaacccaaagtcagcagaagaaagatataacaaagaccacagcagaactaaataaaatagagaaccatggaaccatacaaaggatcaatgaaacgaaaagctcgtttttatctctgaaaagataaaattgatagactgccagtaagactagccaagaaaagagaagatccaaataaacataatcagaaatgaatgagacattacaactaataccatagaaataaaaaacatgatcagacactcttatgaacaatacacttgaaaactagaaattctagagaaaatgaattcctggaaacatacaacctcccaagattgagcccatctggctcccaagattgagccaggaggaaacagaaatcctaaacagaccagtaatgagcagtgagattgaatcagcaatgcaaaacctcccaagaacaaaaaagcccaggaccagacaaaggtacactggaattccacaaaaggtacaaagaactggtaccaattctactaaaactctttcaaaaaatctaagaggagagaatcctccctaactcattctagaaagccactcttgctctgataccaaagtcagataaagacacaacaaaaaaagaaaactacagagcaatatccctgatgaatgtagatgcaaaaatcctccaaaaacaaacacaaatccccccacaaaaccccccaaaccaaatctaatagcacatcaaaaagataagccaccatgatcgagtgggttttattccaaggatgcgagaatggttcaacatacacaaaccaataaatgtgattcagcctataaacagaattaaaaacaaaaaccacatgatcatctcaacagatatataaaaaccatttgacaaaattcagcatcctctcatgataaaaacctttgacaaactaggcacagaagaaacatatttcaaaataataaaagccatatatgacaacccataggtaacatactgaatggggaaaagctgaaagcattccccctaagaactggaataaaacaaggattgcccactttcaccactcctatttcacgtaccactggaagtcctagccaaagtaatcaggcaagagaaagacagaaaaccaatctaaattggaaaagagtaagtcatttaatatctctgttttctgacaatctgatcttatacctacaaatccctaaagactcctccaaaagaatcctagatttgacaaatgacttcaataaagtttcaggattaaaaaaaatcaatatacaaaagtcagtagcatttctatacgacaataatgatcaggctaaaaaccaaatcaagaacacaatccaatttatagtatctacaaaaaaattaaaatacctaggaatgtatttaaccaaggaagggaaagatctaaccaaggaaaattatgaaacaataatgaaagaagttgtagatgacataaaaaaaatggaaaaacatcccatgttcatggatcggcagaatcaatattgttaaaaagaccatactgcccaaagcaatctacaaattcaatgcaatggctatctaaatactaatgtcattttttgcagaatgaggaaaaacaattctaaaattcatatggaaccaaaaaagagcctgaatagacaaagcaatcctaagcaaataacaaagctggaggcattacattacctgacttcaaattacactacatggctatagtaaccaaaacagcatcgtactgatataaaaatagatacacagatcaatggaatagaaaagagaacccagaaataagtcacatacctacagccaactgatctttgataaagtcgaaaaaaacatacactggggaaaggacatcctattgaataaatggtgctatttaatccatcttgagttcattacctgagatctccagagatccataacagattctaataatagccattctggctggtataagatgatatctcaccattgttttaatttgcatttctagaaatcactggtgatttcaaccacaggaggcaacctgaaaaagctccaagtggtcaaagtagaaataacttggtaacaaaataaacaatgcaatactggattataacacgaagtataaataaatacatatgagcccatactgattataaaatggatagtaagtgacaataaggagttactgttgtagatagacactgataaatctatgggtgatatgacattctccagcaaaaaataaaagggaaagataaaacaggaacagcagaaagttgataactgctaagacagtatggatatacagagtctatggcattatttacttttctatgttttttaagttttcaaaataaaaagtttaaagtcataggaaaacaaataggtcatccaaattatgtgtatgttgggggaagggtggagaagcagaaattatccatttaaactatcagtcaattttcattaacagaaaaagatgtaaaatgaatgttaaaactgaactgaatggtgggattacaaatggcatcctactaagtcatttttgtcacatatctccctcagtttggtggattagatgatatcttaacaaaggacataagcaattttagaattaatcaattttctatgttttatacatttttgaagtatatggacctaacaaatatatacacgtagactatgattatacagaacactccacccaataacagcagaatacacatttttctgaagtacatacagaacattttctaggatacaccatatgttaaactacaaaaaagccttaataaatataaaaatattaaaatcacacaaagtatctctgctgatcaaaatgaaatgaaactagcaatgaatagcagaataaaacctgaaaattccataaatatgtgaaaattcaacaatacacatacaaccaatagatcaaagaagaaatcacaggggaaactagaaaatatcttgggataaatgaaaacgaatccactgcaaaaacagtgctaagggggaaatctatagctataaatggttacaatgaaaaggaaaaaggtctcaaatcaacatcataaccttataccttaaggaaatgaaaaaagtaacaagccatcgccattaccaagaccaagatggctgcaagacttgctgccttcttcaggaatgcctgggccaagcagccagtgctggctgtgtccttcaccattgcaggccatgctataattctgcccccactcagcccctacaccaagtatgccatcatgatcaaccaggccacaccctacaattacccaatgcctgtctgagatgatgggagcatgccttatgtgtccagccacccccaggactcctagggcccaaccctggagtggctgaagaaactgtgagcatctccactgacagggaggaggaccctccccagtggctcccaataaaaatgtgaaaagcaaaaaacaaaaccaaattaaacccaatactgacagaagaaaggaatctaacctttttttttgagacagagtttcgcttttgttgtccaggctggagtgcaatggtgcgatttcggctcactgcaacctctgcctcctgggttcaagcgattctcctgcctcagcctcccgagtagctgggattacaggcatgtgccaccacgcccagctaattttgtatttttagtagagacagggtttctccatgttggtcaggctggtctcgaactcccgacctcaggtgatccgcccaccttgtcctcccaaagtgctgggattacaggcatgagccaccgcgcccagctggaagatggtattttaagaaagcctctcatgaaatgatttctgagcagaagcatgaatgaaataaggaagaggggctgggcgcagtggctcacatctataatcccagcattttggggaggctgaggtgggcagattgcttgagtccaggagttcaagagcagcctgggcaacatggggaaacctcgtctgtacaaaaaatataaaaattagctgggtgtggtggtgcacacctgtagttccagctactcagaaggctgaggtgggaggattgcttgagcacaggaggtggagactgcagtgagccgagactgtgtcattgtactccagcctgggcaacagagtgagaccctatctcaatcaatcaatcaatcagaaagacaaaggtttaagaaaaaacagcattccagccagagaatagaaagtaaaaggctgtgatgcagatgtcatatctgaggaacaagtgagggtggcagagacaaagggagggggaaaaacagaatggtaaagctaggtgaataggcaaacattatacagccttacaagctccttaaatacactggattttactcatgaaatgggaagccagtggaggatctgaagcagagagtgacatgatgtgacagatgttttcattctttttttttttttcctgagacagagtctcgctctatcacccaggttgcaatgcagtagcagatctcagctcactgcaacccacgcctcccaggttcaagcaatccccccatctcagcctcctgagtagctgggactacaggcacacctacatctagctaatttttttacattttgtagagacagggttttgctatgttaaagaccccaggctggtcttgaactcctgacctcaagtgatccacctgccaggcctcccaaagtgctgggattagaggcttgagccatcgcgcccaaccatgacagatgttttttaaaaaagtctctcaggtagctgagtggagaagaaattatcctgaataaaggaaaaataacagctgttaactacgattccggctgcacagtactcacctgaatgcttacctctttgggtttgaagctccttcatccaaagcttttcttccctctccaactgggatatcatatctggtttgaaggactgatgtcctataaaaagatagtatttaagtgaaaatgttaaaggcaaagagtactgaaaaaatctggttccaatcacatgatgtaagtctcctccctgccccagcatgcaatgtttagggaacatttttttttgtcatgacacattataagaaatacatttactatcactggaaatacattaccctgtgtaaactattgaaataaaaggttaaaggacctatttctaatcaatatctgttttcatcacatcccttacggcaagcagcagcagttattgccacaatgtgcaccattctggctaaggggctctgatattgttactctattttattacaaaaatgcttatgtaacttactaatttactgacccaccaatggatcatgacccacaagtttaaaaaagatatacgaaataaggaatcaggaggagccaagctcaactgttcttttatagttcatgtctaaaagaaaatcatctgtcttggaacaaaggtcagaaacatcttgtctctatgctctaaagagatagaaaaactctagtctctgagcagtcccaaagccttgaacaaggggacagaggccagggatgccactaaacatcccaaaatacacaggatagcctgatacaacacagaattatctggcccaaaacatcaatggcatggaggttgagaaaccctgctgaattacagagggtgcctgtccttacccactgaaaccaggttcctaaagttctccagcatcacatctcggtacagcttcctctgggcagagtccagcagccccagctcctcctcagtgaaggccacagccacatccttgaatgtcactgcctcctagaacatcaagcacatgtaacctcaatctcacacccaatggccactggcacctaagcaactctttctgtagagttactattcttccccttccacaatcacaccaaaaatgctagggggaagaaggaaaacaccttgtacatgtaacgtggtgccctttatatagttaaattcctagaactgtcattgttaaatcatggcatacacacattttaccatttgactgatagcaccaaatttgataagaaattttgcattaatttcttcccaacagtgtttgatagtactaccactattttgtcaatccaacaggccttcataaagctctggcacaagtacgcagttcactctctgggttctcaggaacatgctgtcttggtcaactgcagcagcatttagggtcaaggttaagagtacaggctctggagtttgactgccttagttcacattccaagggtctatccattgctagttttgtgacgctggtcacaaaacctcaatttccacatctgtataagaggacctatatcatagggtccttgaagggattaaatgagtgaatacatataagaacttaggacagtgtgtgacatacagtaagtactcaataaatgttgatcattaactcttattatcatcaccatcatctatttcatcccattcatagctgcatgatagtccataaacatgatctacaatatatttaaccattctaaataatgcacatttgatcattttaaatttaaaaatgacaatgccacaagaaaacatatttttacatagatcttagccagctcgtatggttatttccttaagataagttccagctgggggcaatggctcacttctgtaatcccagcactttgagaggtcgagacgggcagatcacttgaggtcaggagttcaagaccaacccgacaaacatggtgaaaccctgtctctactaaaaatacaaaaattagttgggcatgatggcacacatctgtaatcccagctactcggggggctgaggcaggagaatcacttgaacccggcaggcggaggttgcagtgagccaagatcatgtcactgcactccagcctgaatgacagagcgagactccgtctcaaaaaaaaaaaaaaaaaaaaggtaagttccaagaagtggtaattacattgtaaaaaaatatatatacctttgttttgctggtataatgttaattttctcaattaactcttcccgtaagagattataagtattcccgattctccatactctggccaaaactggacatttttttttttaaatcttgagtaatttggtgagtgatataaacagctatttaatttttttaaagatgatctgatattacttttcttcacatattgcctttccttaatcctactgggatttttcatgtatcagtaacattactattaagaatattaagtcattttctagaatatataaattcctaccccgcacctgtttcctacttgtctcataaagtttgtatatggtgtttttctgtatggaaattaacattttttatctgaagacactgcacatccctgcatttgttttggctggagttctgaacatctatgtaccaaacaactcgatgacacatgtggcaaagagccatgcactgagaaagggaatctggtgaagagcaatgtgatttctggagcccttcatccaccaggacatgccagggacacatacatgtgtagcatagcctcaagtccctgaatagtctcttttttttttttcttttttgagacagtctcactctgtcacccaggctggagtgtagtggtgtgatcttggctcactgcaacttctgcctcccaggttcaagcaattttcctgcctcatctacatgagtagctgggcttacaggtgtgcgccaccacgcccagctaatttttgtatttttagtagagacaggctttcaccatgttggccaggctgatctcgaactcctgacctcaagtgatccacctcagccccaaagtgctgggattacaggtgagccactgtgcctggccttcacccaaatggaacacctgaaacttctggcttaggcactggaagctttaacgtcagctgggcattgagtggacttcaataagtgtctaaaggttcacacctgtctctttatgtttaaaatacagataaggccatctacatcctcacaaagctgttccatggtgcaaattcctggtgaatctcctagtgctataagacttttaaactaagtatgtgcatctttaaaatataataacatgttaatgaataaaacagatacttaactataatacaaggttttacttagaattaaagaaagaaatctagctcgtttgaaactaaaattactttctctgagtttggcatcagtcagatgctactgcactaagctatactttattctctccataaaatgaggtgctgtgtatgagaaaatgagtctaaaactttaaagattaaaaaaatggtagaattctcagaatccttatttgggaagagaagttacatggggaaaaactgctattgtcaatgtccttaaaatggcaaaattcatagattacataaacatggagaatgaggaaaaataaaaacaagtaaatgatggaaaatgatgtgatcatttaaaaagcaggtgatataaaattaaatttaaaaaattcgaaattgtacctaaagtatgattatatatgttgagtgcaaatgaaaaggaatgtgggaaatgatttgtaaacatatttgtaatgtgagagttgttttccatttaaaaaatatatctgttaggccacggcaggaggatctcttaagcccagaagttcaagaccagcctgggaaacacaggaacaccccatctctactaaaaataattagctggttgtgctggtgtgtgcccgtggtcccacctgctcaagaggctaaggtgggaggatctcttgagcccaggcccaggctgcagtgagccactgcactccagcctgggaaacagggtgagactctgtctctaaatatatatagagatttatatttacatatatatatatatataaaactatatacttatatatgagtatatatatacttatatatatataactatatacttatatatgagtaaatatatacttatatatatttgtatgtgtttatatatacatatttgtatataaatatatacgtatatatttgtatgtatttatatatacatatttgtatatataaatatatacgtatatatgtatatatttatatataaatatatacatatatacgtatatatttatataaaatatacgtatatattgtatacatttatataaaatatacgtatatatttgtatatataatacatatatacaaatatacgtatatttcttataaatatatacatatatatttgtatataaatataaaatatatacgtatatataaatatataattatatagaaatatattttagaaattaacagatatatatatatctctctgttaatttttatactattatattgaaataaaaggcaacaacctggcatataacaacattccaagtgcctttcgttcccttttactgttcccaaacaggaaaaatgtgtccaatctttgtgaaatgagatgtcattttaagaaacacaaaggcaaaccaaacttacctggaacttggtcatttttcccctcctccttctgggaaaaggcagagttccggggaagtgaacctgagggagggaaaggcatcatgagataggttagggatggcattagtcaccatggcacttttatgtgacacttcagagaaaggtccccctgtctctaggcagacacagttgcacacggcttagtgaggagaacgggagctagctcccagctacccctcggccccctcaaccagctgcttttgttcatgaacatttcatattaacagacctaaatcaaatacagctctctgtgtactccttctgaactttagtttccaaggaaatgagacacagacaggcaggggaatgtaacagagccaaaatgcctggcttcaaattttggcatttctacctattttcaactgatcagcagtataaaccttaagcgaattattaatctctctgtgccttaattcagttacctgtgaatggggacaataataatgcctgtattctctatttcctgcagcttctgacaagcaagtgctattatgcttcataaaactgcccttttgagtatgctttctagaaaatgaatcttttaagaaacccagaactcaaaaataattgctctgtcctgtgagttaccattaccctcagaaaagtctgtaactgtgattggttgtctaacataattagttccgttggtaatgatagttaaactgccacaggtttttttttcctccaacagatgtaattacttgcaaatgttactaagctggaggagcctcaagaaagtctctttttccacatgcatgaaagcaatgactaataaaaacctaaaactctctaagaaatggtgttacacttaagttaaccacacgggattattggttataaccacattatactgaacatttattagggcctcaggacacctctggcactctgcaaatccgtaatgacgatcgcttatctgagataaaacacacaggacattccccaggctccgctggaactaattcctgtctcctaaacaagaggctagaaaagtccaagaatccaggaacggccccacatcaggcaaggattagagaagggacagcggctccgtagctggatctcctagactcagaggagtttccaaacaacaggcgtctttttcagtattataacagaattaacggtggcatccaacattttcctatgcactggttttaagcttatttctataaaacctcatttaattctcacaagaacatcactgggaacgcactaaccctttacaggcacgaggaaactgagacaaggagagattaagtaacttgcccaatattttactgcgaggagcaggcaggactggctggtaggtgcgtgaggacggctagggcagcagaccctcaacctcgaaggacgacgcgagcccgcctcccacgcaagaggttctgccgaggggacgcaaactcccgcagcctcccaaccccgccctccagcgctggccgcggcttctcttccccaagccaaggacgggttcattgctggccccacgcctaggcaaagagggctcggagaagtcttggagacccggagctgactcacctccctgggagatatctcagatccgacctcgccttcctggagcggaagtgcctccgagtgcccacggttcgtggactccacttcccagaattcctaagcggaagcgtctcagagttctctcactcctggactacagttcccagaatgctccaagggcagcgcttcccaccagctgggctttgttttgactcaagccggttgggtttgagccacttctctggtgctactactgtgagattcgtttttgttttattcatttttaaaagctcatgagaaaataattgtaaaatttttaaagtgatgacatataaaaatgaaaagtgcagcttgtattattaaaataagttagaaaccaaaatttttcgcagaagcagagggtaggctaaaatgggaagcgtaaaagtgacttaggctgagctccgatggacgctgaacgttaaggaacaccagatctcaaacttgtgtcaaatgccggctccccaaatatcatcaactcaacctgttgataagacaaaaaacagaatttattgttgattgcagtaatggagaacaacacttcgacggagcgttggcaccttcacagagcaaagtgtcaaggcaaggttggaactgattgagaactggatgtttaaggcgggtctttcaatgcaagggattttattagtattgcataatgatcatgatactacagtccaggattggtggatatagcaaggatttttgaagcaaagaatcttaaattgcaatctattgacactttctttggaagagattgaaaatttgatgggtctctgtggaagttcccataatgaacaattaaacagtttgcttgggcaggaatctcctggaataaaggcctgctgatgaagacagctgaacaatcatgttagtgccgaaagtaaattgtgatgaaacgggaaaagttcacttctccctctcccagggcatgtgatggggtgtggctcgcttcttcgtgcccagccgctcaaacctctaggggagcatgcacacgggcaggttgtagggctccaaccccacggcagtgtctaggggtgaatgtttacagctcctgaagccccagtgggcgtgtgttatagggtgcttttttagttcagccatctgtaggaggcttgtgttagctcaattagacccctgacttatcgcaagcaagagagggctttctgtatcccagaggttcttgccttggtgtaccagaagaatcgcatcacacataggcttggagaaagagtgcaaggattggagaaaccttggagaacgatttgtaagtagctctcagcagaagggggagccagaagggagatggttttcgcctggagtcagcctctcagcggcctgggcgctcctccgactacccaggccaaactgcgttattccaccggttaatggcctgctggcctgccggtctcttcagtgtgctcttttgccgacccgctcccctcgacagcctctcgacagccagctgtttgtgtgtccgccaatgctctcctctcaacgtccagcagcttgtgtctctgcctgctagggtatcagggtttttataggcacaggatgggggcgtggtgggccagggtggtcttgggaaatgcaatatttgggcacaaaggcaggaatgcctgtcctcacctaggtccgtggccacaggcctgggggtagagccctagtcagggaccacacccttctcccctccagcacttccattcccctcttccgtatcagtgaggggcagggaaagaggatggagttttagtccttagtgtccaagttgtgtatatttaggggtcggtgacaaggagagaagggagtaaagtgtttgactcttttccctccattattcctcaaggtacctaagggctcatgacagtgttttgtttaatgtgctattcgttctaatatactaagaacccacaaaaaggcaatataaatattaagccagagaaatatcttgaacttcatttattttaaatgtgtactgttatggcaaacaaaagcagctccattggccgggaatctaagacaacgttgtaatatgggcatgtgtaaaatcttgaattgttttctaatttgtgttcggcttcaaatatttcattacatactttgatcctgatcctgacataaatgaaattaagtgtcttatggttgaataaactagatgaaacaaagaagccgtgatttttctcctaggcaggtataaatatacaggtgaccattgaaaaacacaagggttaggggagctgacccctgggcagttgaaaaatctacctgtaagttttgactcccccaaaacttaacttacttaactaccaataacctgttgaccagaagccttaccaataacataaacaattaacatatatatgtgtatatatatatatgttttttgttttgttttttgagacagagtcttgctcttgttgcacaggctggagtgtaatggcacctcccgggttcaagcaattctcctgcctcagcctcccgagtagctgggattacaggcataaactatcatgctcagctaattttgtattttttttttttttttagagacggggtttctccatgttggtcaggctggtctcgaactcccgacctcaggtgatctgcccgccttggttggactgtattcttacaataaagctagagaaaataaaatgttattaagaaaatcataaggaagagaaagtattttttgctatttattaagcagatcatcacaaagatcttcgtcctcatcatcttcactgagttgaataggctgaggagaacaaggaagagaaggggttggtcttgctgtgtcagggatggcaaaagcagaatacaatgtatgtataagtggaactgcagagttcaaacctgttttgttcaaaggtcagctgtagtttgttacattttattatcaaagttttcaaacatatatagaagtagagagaatagtaaaatgaactctatatactgatatcccaaattcaataattaacactgtttagcctatttaattcatctatcactgtttttttagttacaattctaaagcaaattcctgtaattatgtcttttcacctcaaaatgctttgctaaatatattttaaaataaaaatattttctttcaaaaccacaatactattatcacactgaacaaaataccagttatttcttagtatttcctaatacttgacaaccaaaatgagtgactcaggcataagtctcagtcattgaggtttactaagccagctgtaggacctgccggggaaaaacaaagccacagacacatctgtgactatctttccaaagaggttttcgggaggtttagtatttgtcaatttccttaaaggggtggggaagggatataggaagaggggtaggtatgcagttaggcgaatagttacattcttgtgagactttagttagtccccaataaatctacatttttacataaataaggtgaatgtcttaaaaggaaaagggagtaaaagaagagtcaattatgtagatgtatgtggaggtagaggagagtaggtggaggaatgagtcttgactttgttctgcacctgggaagataaacttgtaatcaacattattgtaatcaccgagggttcttcttactgcctagaaaagccagtgcgctgaggacagcaggttttgaagcaaataaatagtttaataattgcagggccagccaaatagaagaatgggagatatctcaaatctgtttccctgagaattcaaaggctgggatttttcaaggatagtttggtgggcaggggctagggaatgaggaatactgattgatttagttgggaatgaaatcataaggggtcgaagctgtcttcgtgcactgagttagttccagggtggaggtcagtttcttggtatgggatactggtctgggtgacatcatctggtccatcagaatgcagggtttgaaaaatacctcaggcaccagttctaggttttacagtagtgacgttatctataggagcaattaaggaggttacaaatcttgtgacttacagctttgtgactccttgtggacaatttgttagctttacgaaggcagtttcagtccctaagcaaggaaggggttagttccaggaggggacttttaccatctttgttttttttttttttttttttcagacggagtctcgctctgtcgcccaggctggagtgcagtggcgggatctcggctcactgcaagctccgcctcccgggttcacgccattctcctgcctcagcctcccaaagtagctgggactacaggcgcccgccactacgcccggctaattttttgtatttttagtagagacggggtttcaccgttttagccgggatggtctcgatctcctgacctcgtgatccgcccgcctcggcctcccaaagtgctgggattacaggcgtgagccaccgcgcccggccccatctttgttttaaagttaaactctaaactgaattcttcccatagttagcttggcctatgcacaggaatgagcaagtacagcttgtggggtgagaaccaagatggagtcacttatgtcagatttctccactgtcatcatttttgcaaaggctctttcatgatcagtgtggagttttaggagctagacttagattgtagaactaaagcaacaattggcatgtgcctgtttatgagaggtcagcaaaaattttacttatgagtaatctatggggaaagctcttcccaaatacctgaggcttttcacctttcatggggatctggctaatgcacagctgttcgtttggaagagggtattgcaatgactgaactccagggcttaatctccacacttgcctaagtttggaggatcctgagatgtttattttcctttacatacccaatctctattaaaattttcctgattacctaaaaatatctcatgactggtttgtcaaatcaatatctagcccattcattttatttatctacttaggtgtatttattattgaacactactacatcactcctttgtttcagaccctgacctgttgaaggaattaggtcagttgttatgatattacacattccggatttctccaacttttctggcctctgtccctagttcctgggaggtggcatctaaactcttaaaatatcctgaattatagaagctctttgttattcacggtgggccactcacactatacctgacagattgtgctaaagaggtgacacatgatgggcctctggataagttatgctagtgagattacttcagataggtgctagttacaccagacagatcgatcatgtgatttgaagtttgggactatgagccaaataacaccagcctgtgtagaggatgggggctagacactgagttacatgtcagttcaatcagtcatacctacgtaataaagccccaataaaatctatgaacacaagcttggatagacttctatggttggcaagtattctcatacagctatgtgctgggagggtaatgtgtcctgaccccaagagaaagaaccatggaatttttcatctggaaccctcccagaccttgtcctatgcgtttctacctttggttggttttgatttgtatcctttttttttttaataataaagctgtagttaataaatataattttcctgggttctgtgagttgtttcagtaaattgttaaacctgagaggttagtgatcagaagtggtcagctggtcagaagtgagggtggcatggaaacccttgaacttgcagtttggaatgaaaaaagtcttctgagcactgtgcacttgaactgtgaagtttgacctaacactgagtaattagtttcagaagtaattacaccacttaataatatgggctaatacctttacgaacctcagggcagaaagtattttgtttagagacagggtctcattctgttgcctaccttggagcgcactggtgaaatcatcatagctcactgtaattttaaactcctgggctcaagtaatcctcctgcttcagcctcttgagtagctaggactacaggcatgtaccaccatgcctggatcattttttaacttttttttttggtagaaatgaggtcttcctatgtggcctaggctggtctctaactctcagcctcaagcaatcttaatcctcccacctcagccttccaaagtgcagaggattacaggcatgaccaccttacttgatcaaagttttcttaatatgtgcatacctgggagatattgcaggtttgggtccagaccactgcaataaaatgagtatctcaataaagtgagtcacatgaattttttggtttcttattgcacataaaagttatgtttatactatactgtaaacataccatttacctgtgtaatagcattatgtctagtggctcatgcctgtaatcccagcactttgggaggccaagacgggtggatcacgaggtcaggagatagagaccatcctggctaacacggtgaacccccgtctctactaaaaatacaaaaaaattagccgggcgtggtggcaggcgcctatagtcccagctactcgggaggctgaggcaggagaatggcgtgaacccgggaggcggaggttgcagggagccaagatcgtgccagcctgggtgacagagtgagactcnntctcaaaaaaaaaaaaaaaaaaaaaaaaaagcaatgtagataccttaatttaaaaatactttgttgataaaaaatgctaacaatcatttgagccttctgtgagttgtgtaatcttttatctggaggaaggtcttcccttgatgtttatggctgctgactgatcagggtggtagttgctgaaggctggggtggctgtggaaatttcttaaaataagacaacaatgaagtttgcccccgtgatggactcttcctttcatgaaagatttctctgtagcatgtgacggtgtttgatagcattttacccaaagtagaacatctctcaaaattggagtcagtcttctcaaaccctgccactgctttatcacctaggtttacatcatattcgaaatcctttgttgtcattttaacagtggtcacagcatcttcactaaaagtagattccatttcatgaaaccactttctttgttcatccttaagaaacaactccttatcctttcaagttttatcatgaaattgtagccattttgtcacatcttcaggctccacttcaaattatacttttcttgatatttctaatacatttgcaccacctgagtgctactgtccatttcagagtctacttcccagggaatgcaacccgcaacaatgcttctctttgggcagcaggctcctttctctaaaggctgctaatctttggtgcatcacccagtcagtgcatatttctcttggtaccacgcttagctaagctatacttcttccacgtattctggattgagaaattgcattttccacttctatgatatcactgggtatttgttaactcaatttcccctattagtagtaatgatattattagtattaatatttttaaattataaaatcataatctactattttcttttaaataatactaaagataacagctaaaatctccttcgaccaccacagctgcccagtactcttctccattccctgtctttaaggtagagaccattatcagtttagtatctattcttatggactcttttttgtttgtttgttttattgtatttttatttattctggactctttattctgtattttatttatttattctggactcttttatatgtatttaaatgtgtagaatgtgtgtccttgtaagacttaaagaacatcattcatcttacatgctatataatattttgcaaatgtgcttatacagtttatatgaaagacacagaaattgttttcaatttttccactattacaacaaagctgcaataaacgtctcattcatgccctcctatgaggtgtgaccattctccatgggagaggcagaaaaattgcaattgctaggtcatgtggtaagcatatttaaacatttgatagctactgctaattaattcctcaaagcaattgcactagtttccactcccacaagcagtttatgagagtagcaaattcaccacattttcttgaaaaaattgagacaacctggcagggtgcagtggttcacacctgtaatcccagcactttgggaggccgaggtgggcagatcacctgaggtcagaagttcgagaccagcctggccaacacggtgaaaccccatctgtactaaaaataaaaaagttagccaggtgtggtggtgcatgacggtaatcccagctacttgggaagctgagacatgagaatcacttgtacctgggaggtggagattgcaatgagccgagaccatgccactgcactccagcctgggcaagagagtgagattgtctcaaaaaaaaaaaaaaaagaaagaaaaaaaagaaaaaactttgacaaccttaagggataaaaatagatctggctgtagttttgacttccctagttactaacatggttgggtacctttacatattttcactatcaatttgaacttttatttaagtgacttgcctgttcattatgatattttttctattatatatattttttattttttgcaatatgtattgttggggttgcctctctctgatttctaatcctttggttttgttcacacagtgaaacattatttatgtcacatatcgctgatagggatattcagctgtgtgggcacttttgttgtctccaaggaggtaaaaccttaccatagtcctaactgcagtatcacataaagggtctgaacacacacgtgtatggattctaatgttaagactcttgctattcttcaaacccttagatccctgtgttgggttggctgttattattgacttggcatcacaacaaccccctctaacaacttgtctgtattgaagaagaaaagcaagcatctacccatttcccaggatctccctcccaatatggttttacattacagacaacaatggaggagactgttatataatatttagcatgtggaagacaatgagaagaaaagatccaacttaaaatgggcaaagaatttcaacaggtagtcctccaaagaagtgtccggtacacacaaatggctaatgtagggtcctccagttaccctctctttctgtgtcctgaccaaaaatcacagagtgccttgaccactctgtgacccagccagctgcacattttttttccagcaggcttgaacccaaaccggggccttaaacattcccagacattgataaaggcatctaggttgttgcccaaaatactgaaagaaactggccctggccctggaccaaattccttaagcccccataaaaactccataccctgattccctcgctgtgaacatacctaggtagaatgacccttttctttcactgtccatcacaagaattgcttgcagccctctttaagttccactactaaatgttttggactgatcacactggcatttagtgtttctttctttagaatcccaaccagccccatctcaggatggtttgggggtactccatggtgggaactcccctgccactgcttttggggcaattccagccatgggtttggtgggatgaaccagctaaatagcacatgaaaacacgctcaatataatttcattagggaaatgcaaataaaaattgcaacgtgataccacttcacacccactagaactcctgtaatgaaaaagacaagtaataacgagggttagcaaggatacagagaaacgaactgccatacattgttggctggaatgtaaaatggcgcaactcttttggaaaacaactttctcatatacaattttccatcagtctttccttttctctctttttgccctccacagacttccacctcacatctctaaactctaccctctgtaattcccacctctcttttcaggattttaggatcaaatcaaccatgcttttcttacacccctaaaagaaattacattacctagacccaaatcagtctgaaatagaaggcactcgaattgttgtttggagagatctcagagtggattcctatagccatactcttgcttttactctcaataatcattattagtttttggcagtacttatggtaagacaagtaacttttaattctgttgaaaccttaactctgggcctctatagggcatcattgtctttgcaaacatttactgtacacctgtaatgtataaagcaccatatttactcttaaggagttcccactctactgagctaaaaatgctataggactgtgaggggaactaaaaaagcaaaacaaaccaaatccaaaattagtaaaaagaaagaaataataaagatcagagcagaaataaatgaaattgaaactataaaaacaatacagaggataaaatggaaagattttttttgaaatggcaatgttcataagcctttagctagactaagaactgtgagaaataaggacaaaatattagccatatctaaactgctattaatcccatctgttaattttttttttgagatggagtctcactctgtcaccaggctggagtgcagtggcgtgatctcagttcactgcaacctccgcctcccaggttcaagcgattctcctgcctcagcctccctagtagctgggactacaggcacaagccaccacactcagctgattttttaatatttttagtagagatggggtttcaccatattggccaggctggtctcaaactcctgacctcgtgatctgcctgccttggcctcccaaagtgctgggattacaggtgtgagccaccgtgcctggctcccatctgttaaattcttaatgtcagtcattgtgttgagctttctaggattttaaatttttatataaccattttttaaaaatggatcttttaaatgccacactaagcataaacttttcaaaaacagaaccaagtgattacttttagttttcatttattttctttaatcagttgttttaaagtttgtgcccgctaactccaatatctggatcatctggaagtccgtttcaactattagaatatcatgcttatgtacagtttcttttgcctgcagtcttaaggaatctactcattccccaagtttgaatgtttatattgtcttttgtttttgttttggcatttggccaattttctggcaagccccattaatttttgttgaatgccaggtattttgtataaaaaatggtgttgactctagataatgtaatcttccttcagaggatctaagttttcttctggcagacagaggacaggcatatcacaaactttactcacatgatgttgtgatccattatttttgacttggagaatatgaggattttcattttcggcaggacaatgagccaatatagataaaatttaaaacacgtctattcactcaacaaccacacatttaaatgttctatggagatgatgaatataaagagatgaaacttatttttctctggtttttattgcattgtggtttagaagagtgaaaaacagtaaacaggccttcaatagtaagaaattggttaagtaaaaataacacattaatacacaagaataccatgcaggcattaaaaattaggttgtaggtcatttaaatttttttctcagtttattgttttgtttcttatttttatgataatttaatacatttatgtaatttgtaaaaatcaaatcagtgtacttggaatatccatcacctgaaatatgtgtcctttctttatgctagcaccattctaatgcttctcttctagccattttgaaatatacaatagattactgtaaactatagtcaccctactaatctactgctaggtcttatttcttctatcaaaccatatttttgtacccattaatcaacttctcttcatccctcctccctactacccttgccagcctctggcaaccagcaatctactctctatcttcatgagatccactttttttagcttccatatataattgagaatatgttatttgtccttctgtgtttggcctatttcatttaatataattactcccggttccatccatgttgctgcgaaagatggtatttcattcttttttatggctgaagaatattccattgtgcatatatacaattcatccattaatgggcagttaggttgatttcatattttgcctattgtccatagtgctgcaataaacatgagattgcaggtgtctttttgatatattttctttctttgaatatatacccagtactggaattgctggactgtatggtagttctatttttagtttttaaagaaacctccatactattctccatagtgattgtaccaacttacatccccaccaacagtgtacaagcattccccttttgccacaccctcaccatcatccattattgcctgtatttttgataaaagtaattttaactggagtgagatgagatctcactgtggttttgatttggatttctctgatattgatcatttttttccttatacctgttggtcacttgtatgtcttcttttgaaaacatctattcagatctgttgcccattaaaaatctgattatttggcttttttgctattgagttgtttgagctccttatatattctgggtcttaatccctggtcagatggtcagtttgcaaatattttctcccattctgtgggttgtctcttcactttttaaattgtttcccttgctctgcagaagattcttagcttgatgtaatccaatttgttaattttcactttggctgcctgtgcttttgaggtgctactgaaatctttgcccatatcaatgttgtgaatcatttccccaatgttttcttctattaatagtagttttatagttttaggtcttatatttaagtctttaatcaattttgatctgatttttgtgaaggtgagataagggtctagcttcattcttttgcatatattcagttttccctgcactattaattgaagagactgacctttcttccattgtatgttcttggtgcctttgtcaaagatgagttaactataaatgcatggatttatacttgagctctctattcttttccattggtctatgtgtctgtttttatgccagtactatgctgtttcagttgctgttgttttgtagtatattttgaagtcagatagtgtgctgcctccagctttcttacttttgctcagagttgcctttggctatatggcatcttctgtggttccatataaatgttagaattgtttttgtctatttcagtgaagaatgtcattagtattttctttttttaaattaaattaaattaaattaaattaaatttatcactattatttttcttgagaaggagtcttgctctgtcgcccaggctacagtgcagtggcgcaatcttggctcactgcaagctctgcctcccaggttcacgctattctcctgcctcagcctcccaagtagctgggactacaggtgcccgccaccatgcccggctaattttttgcattttttagtagagacagggtttcaccatgttagccaggatggtctcaatctcctgacctcgtgattggtctgccttggcctcccaaagtgctgggattacaggcatgagccactgtgcctggcctgtcattagtattttcataggaatttcattgaatctgtaaattgcattgagtaatattgtcattttgacaatattaattattccaatccatgagcatgggctatctattttttgtgtccttttcaatttctttcatcagtgttttagagttttccttggatagttctttcactactttggttaaactcactcttaggtattgtatattctttgtagctattgtaaatgggattgctttcttgatttcagattgttcactgttggcatatataaataatactgattttttatgtttattttgtatcctgcaacattactcaattttcttatcagttctaatggtttttgatagtctttagtattttccatttttaataacatgtcatctgtcaacaagactaatttgacttcttcctttccaatttggatgccctttaatttctctgggaactggagtgctaaagttttctcagtgttcctcccacctaattgttctatgcaggatttccagtactatctatattgaataaaggtggtgagattaggcatccttgtctttttcaagatcttagaggaaaggccttcaattcttccctgtcagcacaatgttagctgtgggcttgtcatatataacttttattattctgaggtatgttccttctacacccagtttgatgaggatttttatcataaagggatgttaaattatattgaatgtttatttttagcatctatcaaaataatcagatggtttttcttcttggttctgttagtgtgacgtatcacacttatcaatttgcatatactggatcatccttgcatccttgggatgaatcccatttgatcatggtgaatgatctttttaatatgttggtgaatgatctttttaatatgttgctgaattcagtttgctagtattttgttgaaaatttttgcatctatgttcaccagtgataatgtcctgcagtttttttttccattgtgtccttttctggttttggtatcaggatactgttggccccatagaataaatttggaattattcccttctcttcaatttttgtgaagagtttgagtagaattggtattagttctctaaatgtttggtagaatttagcagtgaaaccattaggtcatgagtttttccttgataggcgactttttattatggcttcaatttcattatttgttactggtttatcgaggttttctatttcttcatagttcaactgtggtcgattgcatgtgtccaggaatttattcattacttctaggttttccaaagtgtatcattgttcatcacagtctctaatgattcttatttctaatgattcttatttttgtggtctcagttgttaagtctcctttttcatttctgatgttatttacttggatcttctttctttcttggttagtttagccaaaggtttgatgatttctgtttatctttttaaaatcccaacttttctttcatttatcttctgtattcttctttcattatcaattttatttatttctgctctgatctttatttattttcttctactaattttggatttggtttgttcttacttttttagttccttgaggtgcatcattaggttgttatttgaaatctttttacctttttgatatatgtttgttgctataaacctctaagttttgctttggctgtatcccatagattttgccatgttgtatttctattttctttgtttcaaaaaatgtttaaatttccttcttaatttcttcattgcctcactggtcattcaggagcatgctgtttaatttccatgttgtttgtgaagcttccaatgtcctttttgttattgatttctagtttaattatactgtggtcagaaaagatactgaatataatctctcttttttttttaatttgttgagatttgttttgtggcctaagatatagtctattctggacaatgttccatgtactgatgaaaagaacatctattctgcagcaattgggtgaaatgatctgtaaatgtcagttatgtctattaggtctagtgtgtgacctaacttcaatgtttctttgttgattttctgtctggatgatctgtccattgctgagagtgggatgtcaaagtctcctactattattattttgccatatatctcttattttcgatctattaatgtttgctttataaacttcggagttctggtgttgaatgcatagatatttataatggttatatcatcttgctgaattgacccattaatcattttatagtgaccttatttgtcttttttacagtctttgatttgtagtctatattgtatcttatacaagtatagctactcctgctcttttttcgttgcctgttgcaagctatgtctttttccaccccttcacttttagactatgtgtgtctttacaggtgaagtgggtttcttgcaggcagcatatagttgggtcttgtttctctatccattcagccactttatgtcttttaatcagaggatgagtcaatttacattcagtgttattattgattagtaaggacttactactgccatttgttgcttgttttctggttgttttgtaactcctccctttctttcttcctttcttactgtcttctttttttgcttaaatatttaagagtcttcatttttctgtcttcctttgtggttaacagtatgttttaatttgttgctttttacttttagtgaatctattataggtttttgtattgtgtttaccataaagcttacaaaatacattttatagatataacaggttattttaaagagatgacaacttatcttagattacaagtaatagaaacaaagaaaaatgaaaagaagaaacacttctacacttaactcccatccgtcccaccttttgatttttggttgtctcaatgtacatatttttatattacctatttcttaacaaattgctcttgctattattctttttgatagatttcttttgggctacatactagttatgagtggattgcacatcacaattacaatactattcttggtttgtctgtgtacttaactttaccactgggttttacagtttcagaagctttcattttgcacattagtagctttttctttcacattggaaactcccttgaacctttcttagaagtctgttgtggtaaattctctcatcttttgtttatcttggaaagactttatctctccttcatatttgaaggataactttgctagatacagtattcttggatgatagtttttttttttttttaatttcagcactttgaaaatgtctctgcacttcctcctggcctatatggcttctgttaagaagtcttttgccagatgaattggagctcctttatatgtcatttgcttgtttttttttttttttttttttttttttgctgcttttataattctttctccttgacctatgagagtttattatatgctttggggtagtcttagttgggtcaaatctgtttgctgttctatgatttccctgtccctggatattcatctctttcttaaattttggaaagttttctgttattttgttgaatatactttctactccttgctcttgctcaactccctcctgaacagcagtaattcttagttttggtcatttgagatattttctatctctttcagtcaatatttgctctttttctttctctgttctcttctgactgtgtattcacaaatagcctgtcttggagctcactgattctttcttctgcttgatacattctgctgttgagagcctctaatggatatttcagtgcagcaaacatatttctcagttccaagatttctgtttgattttaaaaaattattttattctctgttcaggttctctgatacatttctgaattgcttttctgtgttatcttggagatcactgagtttccttaaaacagctcttatgaagtcttggtcagagagttcacatatcgtcttcctgttaggatcagtcactggttccttgctttgtccatttgtgggatgccatggctccccgtttgctgttgttgcttatggatgtgtgtctgtctttgcatcgaatgattatacattccactattctctgtctggctggttttgtttttcattggatatggctccctagagattctttatattttacctgttgattttcttctttcccgttaggttactgactcctttttggtactagatagcctattaactccaggtttgcctcagttctagtaaataatcatagtgccacccatcccaaaaggggtaggtcccataggggatatcctagttgtaagaaagctggctagtggttcatgattggggacctacagtatagtgatgctgaacagccactctgattgttgtctcctttggctgagttgcagagtagagtttccatgacggggacagtattcccacctccctcctttgtctctggctgtcctcagggatatttctctcttcagttactcctgatgctttctgtgggttgagtcagggacaagtctcctgccaggaaacccaagatggggaggaggctggttgtccaccttgattaactttttccagtatagaaaccgtgagacgggaaaattttccacagtcttggcaccaggcagattagggggaagggcactgtggataggaaagtccacttctcttatcatctgctcagttttttccacttatttgtgtcctcaggaactgtctccttctatttgagttctgggatattgctggtgataatcttggtgctgtatatttgtctttagttttctattgaaaggagtgaagccagcttgcttctacattgctatttttggaaccagaatttaatttctactactgacttatgagatgtactttaaaaaattcttaaatggttactctagggcttaaaatatattcctgtattttttcacagtctatcttcaaatcatattatgccaattcatgtatagagtacaaccatatacctctaatttctgctagtatatttctaatttctgtcttccctgttttgcagtgttcttacgaaacatcttatttttgtatgtcctctaaattcataaaacctcattcctaattttgctttactgaattatattttggagtaataaaaataaaaattattttacacttaaaatgattgaaataactattttcatagttatgtcttttggtagatccaagtctatttctggtatgctaaatatctcttacagtgcaggtctgctaacagtgaattctatcagcttctgttcatctgaaaatgcctttattttgcataccttctgaaagattttttccaccaggcttagatttttgattgatcattttttttattgttgtttctaaatgttaaagatgtaactccattgtcttttgcttgcatggtttgtgatgataagtctgatgtttttctcactctgcttcttatatgtaatgtgtccctttcctctgtctgccattaatattttctttgcactgtccatccatttttagctattgggcaataatacctctagttttgttctttttttaaaaaaatactgctttggtattctgacgttcttgaatctgggtgaagtcttattatttttggaaaattctcagccattatctctttaaatatcttttcttcccattctctcccccgaccctgggtttccaagtatgcaaatattagatcctacaatgttgtcctatttgtattgttttcttcacactttttctttttgtgttttagtttgcatgatttctattgacctatattcaagttctgacacttttctcaactatgttgagcctactcataagtccttcaaaagcattctgataaaagtaaaagcagtagcataaattttcttttcctagcatttcccatttgactattaaattttactgaaatccctatctgctcatgcatattatctgcccttttcactggagtcttcagcacatcaatcagttatgtaaaattccctaatagttccaaaatatggttatctataagtgtggttttattgattggtctgctatctattggcagaagattgttctcaacttttgatcttgtgtttttaaaataaaatgccagataacatatacaaaacagtagagactgaagacaacattattttttgcctaaaactgggcacacatgttctgctaggatgtcagggtggagtgctgaattaatctggtcaggaatcaagctggaattgggttttgttgttgcaatatttatcttagttgtaccatggcttcaaatttctctagtgttaccttgtgcttagggtgggaactggagtgctaaagttttctcaatgttcctgttgccccatcctcagcttttggccatcccttggcaccagggccaagaaagattctccatgttcttcccttttctcacggtagcctgctgttgcttctcactaggaataggctaggggaccagcggtgtcctttgttgtcttggttagtctcagttgttagtgggaattggagtgtcagagattctatgcattttggggagccagaaccacacaggactaaaatggtacagaatatctcttccttcggctgtgaaaagaaagcaggtgatgctgctatattgtgaacaacatgaagacaagaattcacaagaaaagagaggtgagagaattaaaagaaagcaatataaaatccccctaccttacccagaccctagtcttacactatctgtatcttttcatttatatgaactaagaaacagttttggtttaggcaactctaaattttctgttacttagaactaaaagcattccaattgataaaaccaccatgagctctcccctgtaagtgatgatatcaaagacatgctttagaagccctggatttctgatgatactgtgcaacttgaaccagcacctcaaaagccaagttatgccagtgctttggtcatcatattcatccagcaaggggaaatctgatggaaaagccgtgagcatcaatttataaaactggattgcactaggacatcctaggcaacatggattttgagacctaaggaaatttcacagaaatataaagttatggacacctaatttatctgtattcttaaaaatccaggaaattttaagaactaacttcagggggtttattctttactgttgttggtcataatgtcatacagtgaaatcaagcaatcatatcatgagttcttaagtataagagataatatatcaatagctgtttactgctttggtgtaattggtaaatgtccattataaatatttttaaataaagcacagaaaaactaagccaaaaatttctttccagagaaaactactgtggatataataatgagtaatctttcacacattatctataagcatatatttgaacatacatgcacacaggcttaaattagctggctattatgaacgtacagtccaggtttttactaaacaatatgcatgatccattcttgtcattttagagctaaatcatactttctgtagatccatagtatagaacatacagaaacttacccaaattcatattgatggacatttacttccagcttaaaacattactatcattgtaaaatcctttcttactgctaaaattgcttaattataaattactgttctacgatttccagatcggtatgcacattttacattccgatatatatggggggcttgataagtattttgatatatatagaacgacaagcttgtatttttcactttcgccaacaaaatgcatcattcttgaagacagacactagcaagtaaatggcaaccctatcctgctagtcaatacattgataaatatgcttagaaaaattcaagattttccctttttttgtgtgtgagtgggagaagtatgggaatggaaaacttgacaaaattaaaatctttcaaacttgaccctgcttaaggaggtgtggattggacaaaggctacaacatttagaaatcagtcagatcaaatggacttttagagaaatatggagaataaaaaaaccccaagtattgtgattttgacatttattaaaaagtatttgtcatcagtaaccattttggatacttgcaaatattacagtaaaactctgccttaattcacagggcaggagtagaaaatcaattatgtaaaatacagtgttccatttttgcaacattaaccagaaacattgtttatcagtttgtactgatatttcaagtgcacacatgggtacatatacacacacacaaagctaaacttcagcagatggtataatgtatagagaccaaacgttaagaaatgcagcacatctctgctcaagatggaacaaagggtgggaactaaccccaatagggttacaatcaaattaatgttatttcagatcatcataatgcttattgttctacatttcaaatatttacttgaaatgattttattaagattacttgcaggatttctcctccaaatacattttaagttttaaaaaatgcgcttaaaaatttcaaaccttttacctttacatacttttagttatttagcaaaaagtactgagcacctacattgcgttatgaaatgtcctagttttgtagactagcaatgaacaaagtcccttctttcaccaagcttacattctagagaacatggatttaggcatgctcatcactgtacttttattaaattcctgaccatactcatattttataagccttagctcctgtgcaatgactgatgttaaagttctaacaaaatccctcgtgaaacccctctcattaaatgtctctgttgtgtggtctcctggccattatgaatgttgaagttgggcagcaacattacattttaatttttaaaaattctttttctactgaaagaactctagtgactggaaaatttcagctcccatttgaggacttcaaaacaaaacagaatcttcatttctgtgtagattctctgatgaagggtagtccttaccatagtcttcgcttttatagaatttatcactactatggactctttgatgaatgagaagacctgagctccaacggaaacccttaccacatgcatcacatttgtatggtttctctcctgtgtggactctctggtgagcctgaagatttgatctctgactgaagccctttccacatacctcacatttgtatggtttctctcctgtgtggactctgtgatgggcttgaagacttgaatacccactgaaacccttaccacactgttcacatttatagggtctcccttccacatgaaccctttggtgtgcttgaaggcgtgaactctcactgaaaccctttgtacacacctcacatttgtatggtttccctcctgtgtgaaccctccgatgtgcttcaaggcgcgaactctgactaaagcccttcccacacatctcacatttatacggtttcactctagtgtggactctctgatgaccttgaagatatgctctctgactgaagccctttccacatacctcacatatatatggtctttctccagaatggacactctgatgactctgaaggtatgatctctgactgaaactcttaccacactcatcacattggtatggcttctctcccgtgtggaccctctgatgggccaaaagtgttgaggccttactgaagcctttaccacattcttcacatttatagggtttttctcctgtgtgaaccctctgatgaatttgaagattaaagctccaactgaaccccttcccacattcctcacatttgaatggtttttctccagtgtggactctctgatggccttgaaggtgtgaactccgactgaagcccttcccacactcctcacacttgtatggtttttctccagtgtgaactctctgatggccttgaaggtatgaatttcgactgaaccccttcccacattcctcacatttataaggtttttctccagtgtggactctctgatgggcttgaagatatgaactccgactgaatcccttatcacattcctcgcatttataaggtttctctcctgtgtggactctctgatgaacattcagaactgatctatgattgaaacctttgccgcatatattgcatttgtatggcttctgtccagtgtggactctctgatgatctttaagttttgagctccagttgaagccattcccatgctccttacgtggtttctctccaatgtgaatttttggatgaccttgaagatataaattatggctgaagctgttactacacacatagcgtttatatggttgttccttagtgtggactatctgaaggtcctgaaaatgtgaggccagactgaagccattaccacactcctcagaattatatgaattctcttccatatgaaccctatgctgaatgtcaagatttgaactacaaatgaaactctttccatactctatatctgtgtatagtttctcttcagtgtggattttttgatggacttgaagacatgaactctgattaaagacattctcattttcctcatattcatggggttcatccctagtatggaccctaaaaatactattaaggtctaagctatgactgaaggctttctcataaatgttgtgcctataggacatctcacctgtgtggataagttcataagtgttaagaggggaacagtgattgaagttctcaccatattcaccacatttgcatggtttctcctctgtatgcactctctgataggatttcagatgtgaattctcaatatcatcttctctctcaatattttgatgaatatgaagaagtgaactataattacagccctttccacatgaactgtatgtatagggcttcccttccaagtggaactgctgatgaacctcagagctggagtcattactgaaggcttttctatacccagtacatggatagggcttctcctctgtttgaattgactcctgattaagtaatgataccttcatgatatcttctccacagtcatggcagctgtagttttcttttctgtgtacttccagtttatcattgtgatgtgagagccaactgacactgtcacacttacagaaatgatttttcatggaaatttgctgacatctacactgataattatgtgactctttcagatacattttcctccaagaatgatgtgccctccaagatggatacccttgactttttatataattggagccattccctatatgagtgaatatatagttcttatcttcagaaatctgaactggtattcctgcccaaacctggccgagggaattaccttgttcttgcaactgagaattcttcccttgaaaaactttcaggaaatcttgacacctgattaacccacctgcactttgttgccaggtctgacgggaggaaagctctttgggggaaaagtagcttactgttacttcctgaatactctccatcttttgttgattcttccttcctataaggataaagagaattcagatgtgcacgagtgaatgctttattcaagagatttgaagattttacacttaggtcataacatgaaacttgaatgaaccagaggaaaattcatgccactatttctaagaatacttagaaaatatctcctctttggctataccagttacaggttgagtattctcaatccaaaaatctgaaatgtgaaatgctccaaaatccaaaacttttttaatgttctacatgatgttcaaaggaaatactcattggagtatttcagatttctgattagggatgctcaactggtaagtataatgcaaatactctaaaatctgaaaatatttgaaatacaaaacacttctggtcccaagcattttggagaagggatatttaacctacatacaaatagcatctacataattcaggatatctgatgcctcaaaatcaggactttgcagcacgacctggacatcgaacatgatggctgtgttcaaaaggcttagtaaaaccataaacatggctgggcatggtggctcatgcctgtaaccctagcactttgggaggccaagtcgggtggatcacctgaagtcaggagtttgagaccagcctggccaacatggtgaaaccccatctctactaaaagtacaaaaattagccaggcgtggtgttgcacacctgtagtccccgttactgaggaggctgaggcaggagaataacttgaacccatgaggcagaggttgcagtgagctaagatcatgccactgcactccagcctaggcaacagaatgagatcctgtctcaaacgaaacaaaacaacacaactataaacatgttatcatggattaatcatgggtttccaggagatctgaaggggaaaagaggatgttcttaaaactggaaaaatatagttgcaaatggacaaacgccttttgtcctaataagtttttcttttttgtctggcacataaacatgataatgttgttcatttgtaagtgtactgtgtgcgttaaatgatatgctgaagaaggtaaatacagacttttactttatgtttgaggcatcacatatcctgtcactaatgagctatttatcctcatgagaataataagctcttcttcagattatgagactaacgcgctgccagctgcgctaagagggcttagagaataataagctcttctaagtccctgtaggccattacagattttaactcttttcaaaagatatttcacaattatcaacggccatggtgtaggtcaaaatgtgaaagactgtgacagaattcaactaaaaaaatcagaaaaaaattatggcacctgtaggtgtcctctgaggtgctcattagccaggaacagaactcaatgaatactgacttttgcttgtgccattttactggaaaattatgttagtgtttaggaaatttgaggcaccagaaagggttgaagacaggatatttgggtagaaatagttacctagttattaaagctcagattataagcagacagcagatcttcatatactagtgacaaatatcctccctaaggacaactggttaaacagggttgaattaataacatgcattcttctaacacttagaagtagattaagtctctataatatccagaagaaaagcagtaaaagggatgttttttcatgaatattaccctcaaacataattctgccttatttctttgtgtttgtctgcctctccacactggaatgtattatccatgaaaacaaacactgttttgtgcactgcattcctttcactgccaagtgaacagtagttgctcaataaacattgatgaataaatcatagtttgagttgctctcactcatagaactaaaagagcatgtaatgtagctttttaaatgggaaaggaactggtgatggtggcaactttgctggaaagctgaaaggctataggagacgtagggcgacaattcagagtgatactgctgatgagaaaagcaaaggtcacaagaatctactgtggatgaaataaaaatgtaagatcaaaaagacccataggcagggcctgtggattgagtctttctcatttttaaagtaactttttaaatggtacaactgtgagccaggcatggtgacgcaatcctgtagacccagctactcagaaagctgaggcaggagaaatgcttgagcccaggcatctgaggatgcagtgacctattaatataattgcacctgtgaacagccactgcaactccagcctgggcagcatggcaagactctgtctcaaaaaaacccaaaatggtgtaatttttcttgaacaaaatcttacccgtaagccctaccctatcccaacttttaaaaaaggaaaaaagaaaaggccacactgatgaatctgtatcactaggctctggggcagcacactgattgtgggataacacttcaaggtatatcagtaggtatgcatcttggtactttaaaagcacatttactgatgtctttgccttctcaaaagtgaagctttcagttattataatgatattttatcatataatgatgaaatgaagggatatattataggaggcatatcagataaagtatatagcttatatgtgagaagtttgagcttccagctagggttaatcataatccttgtagttttgttttactattataaaaaacactcaatatacatccataaagatacagtttaatatgtcctgtcttttgggactgatgtagtggcttgagaacatgaaagtagcttgttagtcaaaacccaatttctcacaaagcaactgtttcaatgcaaattagtacataattcatgatataaaaatctctcaaatatatgagattaaagtttctctctgagcagtgggttttgcaatgttaaggacatagaggaagaaaaaaaataaaaggtcatttcactttgtttcacactcttctaaaaaagaccacacatgtaacaacattaatttcctttagtcaatggtatagaccgaaacaccttgttactttatttaaataactcaacatttaagttctatttcaatatcaatggtagaatggtaataagaaattgtgttaagtttataaatgaactttatttgatggagaaactaagcatgacaaaagatgccgaagacatcatttgaggtaagaaggttgagaatttattacatcttcatagcaatcctgctttagcacttagaggttgagaaagtcaatgattcaagcaacccaaattgatcaattcaataacaaaggtgctatatttgtcataaagacaagtaattcctttgaatttaatagttagctataatgaactcagagaaaaaaaatctttgtttatgtcttcttcttcttcttctttaataaaagctaagcgagaacatcagctcaggttacccaggctgagatcaccttccgttcttacttcgcttttagatagagacaatacaaggtatagtggtgacaatgttttgatcacaaatatttaagctgctgtgctgactcctttcttaaccactgatatggtttcgctctgcgtccccacccaaatctcatgttgaattgtaattcccagtgttggagttgaggcctggtgggaggtgattggatcatgggggtgctttctaatggtttagcaccatcccccaagtgctgtctcgtgacagagttctcaagagatctggttgtttgaaagcatgtagcacttcctgccctctttctcttcctctttctctgccatgtaaaacatgcctccttccccttcaccatctgccatatttataagtttcctgaggcctccccagccatgcttcctgtatagcctatggaaccatgagtcaattaaacctcttttctttataaattacctggtctcaggtagttctttacagcaatgggagaatggacgaataaagaaaattggtaccagaaaagtggggcattgctataaagatacctgaaaacgtggaagtcactttggaaacaggtaatgggcagaggttgtaataatttggagggttcagaagaagacaggaagatgagggaaagtttggaatctcctagagaattgttacatggttttgaacaaaatacggatagtgatatggacagtgaagtccaggctgaggtggtctcagatggagatgaggaagttattggggactggaactggtgatatatttagatatatttaggtttgtaaatgcatttatacattttcccaacattggtgctatgctttagcaaagagactggcagcattatgcctctgctccaaagatctgtggaactttgaacttgatagggatgatttaggttatctggtggaataaatttctaagcagcaaagcattcaagatgtggtctggctgcttctaacagcatatgctcatatttatgggcaaagagattatctgaaactggaacttatatttaaaaaagaagcagagcataaaaatttgaaaaatttgcagcctgatcatgtggtagaaaagaaaaaccaattttctggggagaaattcaaggctgcagaaatgtgcctaagtaaagaggagctgaatgttaatagccaagaaaatggggaaaatgcctccagggcatttcagagccagtcatgacagtccctcctaccacaggcctgaaggcctagggagggaaaaatagttctgtggctcaggcccagggccctgctgttttctacagctgaaggacacggcaccctgcattgtagctgctccagttccagccatggctaaaaggggccaaggtatagctcaggccattgcttcagagggtgcaaaccccaagccttggcagcttccacgtactgttgggcctgtggtgtgcagagggcaagagctgaggcttgggaacctctgcccagatttcagaggatttatagaaacacctggatgtccaggcagaagtctgctgcaggggtggagccctcatggagaacctctactaggtcaatggagaagggaaatgtggggttggagcccccagagtccccactgaggcattgcctagtggagctgtgagaagagggccaccgtcctccagaccccagacccaccaacagcttccaccacgtgcctggaaaagatgcaggcactcaacgccagctcatgaaaatagccaagtgggctataccctgcagagccacagaggcagagatgcccaaggccttgggagctcatcccttgcatcagcatgcctggatgtgagacatggagtcaaaggagattattttcgaactctgagatttaatgactgccctgctgggtttcagattggcatggggcctgcagcccctttgttttgcctgatttctccctttcagaatgggggcatttacccaaaggctgtagccccattgtatcttggaagtaactagtttgtttattagagtattatgcatccattacaaaaacaagagttataatcttagactgggagggatttccccaaggtaacggcaaagaagaaaaattagtatattaaaaacaagaatgtacataacaaatttttacattaatatgaggtatatgatcatgttagtataggtaaaaaaattaaggtattttaaaaggtgacattatgttccagctgacagtatcaggaaggtagactggcacagcatggcctcggcctgtttctgtacaacccaggagccaagaacgctttctacatttttaaagtggtgtaagaaaaacaaagactgtgacaaagagcacatgtggccaggaaaatctaaagtatttactacttggacctttagagaaaaagtttaactcctactctcaagggtaccatgtaggaccctgaatcttaaccaagatggaaacaaaccattatagaaatgagttaatttgttttgaattttctgttgactctttcttcttatccagcagcatccttagctacacagttgcgacggtggcttttgatgtcagtcttgaggactcaaaaaactatcaaaatgtttggattcacataaatgtccaacttgaagattctactttaagactgtggctatgtcaagagattgtttgggtgcgagagtatgggacagaatgggaggataagaagatggacatatgaatacaagggtgtctcacttgaaaatactgcatgaggaagaccagttataatgttggcattggtcatttttgatacttactttagctgattggctattcttatcttttaggattaatggctacccatctatgaatactcaaggacagctaagcagttaaaacaggcatccatcagatgagaaacagtattctagaatacccttcaattacacagatttattctacccctattagctgcctcagggtgaattgaagagagcaaagatcatgcatctattacccaattcattcagagagaaaagcaagtcaaggaaattgacacagaagcataattgagaggtctgagggggcaatcatggggcagtgcctctgaaacagactgaatgagcaaaaacaaacaatggtaggtgaatatggaaagtgagaagaggttgaggggacagataccttaggacctaatagaccactttaagtactttaaacttactatgtgtgaaatggggagccacaggaaagcttaaacagagaagtgatgtgttctgactcatgttctagaaggggctccctggctgctgtgttcctgcagcacagttctcacctgaacatccatctcttggggtttctgtctccaccatcaaaagcttttcttctctctccagctgggatattaggtctggcttgaagggctgatgtgctgtaaagaaggaaaggacagcaaaagtttttaagtttgatgacattcaattggtcaaaactagacaaaaaggtatacacagacaagtgagactctctcccacatcccttccaccctgttaccttccactcactataagaaactaacttcatgattttcttttttttttttttaaataggctctcacttttctgcctgtgccagcatgcagtggcatgatcacagctcactacaactgcagcctcaacccctgggctcaagcaatcctcccacctgggcctccagagtagccgggaccatgggtgtgcatcattatgcccagctaaattttttgtagagacagggtctccttgcattgcccaggctggtcctgaactcctgggttcaagcaatcctcttgccttggcctcccaaagtgctgagattacaggtgtgagccaccacgcctggccattattttcattaaaccttccttcttgtgtttcttcttataaaaataagtatatatataaaatatatattatttttatatattacatatatttttatatatattatatatatttcatatatgtataaaatatatatatattttgtatatgtataaaatatatatacattttgtatatgtgtaaaatatatattattatatatattttatatataataatatatataatatatattttatatataataatatatattatatatatatgtctgtacccacacactgtctatttacttattttaccttatttcttacatgaattgtagtatactattaatattcttttggacatggctatttttagggaaaatccccagaaatgggttgccggggaagggtaaatacctagctttgttagatattgtcaacttcccctccctaagggttgtatcattttgcattcttcctttcaacgcatgaatgttcttcattccccacagctttgccaaaaaacgtatagtgttacgtttttgaatttttgccaatttcatgggtgagaaatggcatttcagtataattgtaatgaacatttcttttgaaataaactgaacatctattcatatgtatacatatttctatgtgtgtatatgtgtatgtatatacatacacatacacacacacacacacacacacacacacacacacacaccctagctctatgtcctgagacaaagaaacatagatcatagatactacagtgaccatacctagcatccagactttggcattaaataccattccccagttaaaaaaaaaaaaaaaaaaaagataattccagagccaaggcaaagtaaagatgagcacaaaatactgttctctgccaacaaagtaagaaagtgctcaaaaaaaaaattggggacatgttacaaggtcacaggagccagcttaaagaggccaaacttgggacaattttaacatctaaaaaattacagtaataaactataaacctttaaaaaatttcacaaatccctacaaataacattgaaatgatgcttgagaagtggggggctcttgttgactgcaagtttatgccaggtgctgactgctaaatgggaaggaggtaaagttagaaaagtcatcattttgtaactgtcatggtaaggaccagataaggcaagatcatcagcaggtgcttaatctacaggaaaatacttgtgttacccgatgattacaaatggggaaaaaagcagtaattatatagtggggaaactgcataacatcgtgactgggtaatcaaagttaacaccacctttgagggacagatgacttcacgtgcctccagatgtgattccctcaaaagtgcacactctacctacatagtgttcctgctgcatggatcatctgaatctaattttgtggaatcattaggaatgttctattaaaaataagggaagaggtgatagcgttcttcaaaaatgttactgtcataaaagagaaagaaatgctgtggaaatgttctaaattaaagaaggctaaagagacagaacaactatactagactctagatcctgttctggagggagaaaaatatgctttaaagaataaaattaggctggtcgtggtgactcatgcctgtaatcccagcactttgggaggctgaggcaggtggatcacctgaggccaggagtttgagaccagtgtggccaacatggtgaaacctcatctctaataaaaatataaaaattagctgggcatggtggtagttgcctgtaatctcagctacaggtggctgaggcacgagaatcacttgaatctgggaggcagaggattcagtgagctgaggttgcaccactgcactccagcctgggcaacagagtgagactctgtctcaaaagaaaaaatatatatataaaattggctttatggataaaatcacagcataaatgatagataagataaaaacattatatctgtcctgagaacaggtaagagaatattcctctttttataaaacagactgtgcagtaaaggaaagagttagttttgtttaaagagagatctggattttgcctttggcttctggagaaggtaatcgctaagtccctggaatatactgcccgattagagtgtctttcgtttacccagaagccttgggccacacaccagatagttaaacaatgtgatttatagtaggggctttgagccatgtggtattagcttaacctctggagaaactggaatctaagagcagccacccaggtggtcaatcatatctaggtaactaagctccagtaaaaactctggacaccaaggctcaaatgagcctctctggctggcaatgctccttacgtattgtcatacttcactgctgggaagtcagtgctgtccacaactccacggaagatgacaagtggaagctgacatctggaacgctcctggactctgcctcctgggcctcttccctaggctgactttaatctgattcctttccctgtaatgaatcattaactgtgaagacaactgctttcagtgagttctgtgagtccttctagtgaattattgagcctgagtgtggggctcagtactcttgggtcttggggactcctaatcttgcaattggtatcagaggtgagagtgaacttggggactcctgaactctgtatatacactgaagtatttagagaaaaacggccatggtatattaacttaccctcaagtcgttcagaaaaagatattatgactatatatattttttcatatacatacataagtatgtatggagagggaaagaacatgaacataaatgatagagcaaatagggtaaaatgttattagaggtgaatccaggtagaatcttggcgaatctatatgggtgttcttgtccttttgtaagttttctgtgagtttaaagttatttacaaatataatgtttttttaaaaaaacccctctaaaaagtcaagttcatcaacagttactggtgccctgaaaaataaacttactaacctggaacaacttactaaactgtttgatggcaaatcaatgaagcaggaccatatttactattccaaggatagactggacaaaaccatcagaaacatcttgtctgtgttgcacggggattattaggactctcgggcacctaatctcagagaataatttcaggggcttcagagtttctaacaattgagcacacaaagacaccccaggaggctgccattgagtaactaagggcacctatcctcacctactaagagcaggttcctgaagttctccagcatcacatctcggtacagcttcctctggacagagtccagcagccccagctcctcctcagtgaagaccacagcaacatccttgaatgtcaccatctcctacaatgccaaacacatgcacactaagtttacagaagaagggcagtgctgagaaggtgtaaaggactggaagctgttctggagtctgggcaacttgagtcacatttacatagttctcttctgtttaccttctgtaatgctaataccattcaccaaaagggctgcaagaaaagaaatccttgcactttgaaattacttccttttgttagcacttataagtaagcctctggaactctgttgcaccctaggttaccaatattttaaattgtaataataatgtcatttgctccacaaaagctttagttctaacagtgactgatgctacctgtttctcctcatttacacacacacacatcacttatttaatttgtcaaatttacagggtatcagtcatccttactgctcaaatatgtagctcatcctctgtgctcatctggagactgctgcagtgatgggcacagctctggagcctgactgcctgtgtctggatctgggcgctctgcccaatgctagctctatgatcttggacaagtttcctatcttctcatttgtatggtgaaacttataccatacagtcctagtaataaaatgagtgaccacatgtaaagcatggaaaacagcacctggcacacagtaagtacccaacaaatgttagctacattattaatattttcattatatcttctatcccatttctgggctgcaaagtaattcagagaactaatggtctagaatataataatttgatccaactaatgcacacttagtttgaggttacctatacgaacaatgttgcaaaaacaatcttttgcattgacgttaacctctggaattctgttgattatctcctcaaaataaataccaaaaagtaacaatggcaatgctgaagaataatgacctttaaagttctgaaatcataatggcaggtgttttcccaaaacagactttcgccttccatcttagccttcttccaagaaagtataaatcatagtcaacactggatatgaaagctttttaaaaaaatctttcataatctcacaagtaaatttgggaagtaaaaatcatttattaaaaacattctcacaaacttattggtaataaagttcattctctttacacacatttgctgttcatctcgatttcttgttttgtaataataattcatttggaggacaccgaggtcttttcttccatggacattgtaaatatttttcattccactttgctgtcttgtaactttttgctgtagggtaattttaaatttttaaatgaacaactgttcagtcccatatttcttctggctgcagttctgagcataacagcttcagctctgaatgcagaactctgctttggtttgctttgcttttttgtaagtctttccacgcaagtgatatgcctgaaactcttggcccagaaagcaaaggctttagagttggcccaatgcttatcttcctgtatgaacatgaacctcttaacagtgcaaacgactctacagttcccctccaacagtcatctggggccatgaatagtgtgacagatgcaaagtgcctatatatcctatggtatgactaaaaactttaaactaagtacctgtattactctaataaaattaatacatgaataatgaaacacacacagacatacaaacatatatagataaacacatagctataggtactgagaagaatctagctcttcttatataagaatctagctcttcttgtacaaaaacatctatttttcccccaaccttagcttcaatataatcttgttagacaaaatcatattttatgtattccacctgagacatcacttaggagaaaatatttttagttttgagtctctagaacattatggacaaataatatcaaaattctctcacactggtttttgagtcaagattatttgtaggaaaactgatactgcaatgtaaaactgcaagaatcctcaggaacgtaaaagcttgtgagttggaaataatttaaagaaaagggccgggcacggtggctcacgcctgtaatcccagcactttgggaggctgaggcacgtagatcacgaggtcaggagttcaagaccagcctggccaagatggtgaaaccccatctctactaaaaatacaaaaaaatagctcggtgtggtggcaggcacctgtaatcccagctactcgggaggctgaggcagagaattgctggaatccaggaggtggagggtgcagtgagccgagatcatgccactgcattccagcctgggcaacagagcgagactccatctcaaaaaaaaaaaagaaaaagaaaaagaaaagggggagagggataacaacagtttacgtcaataatattagatgataaaaattaactgctaaaaattaagcggataaaaattcaaaattgttatgtattaatgcaagaacagttatatttaaaaaaatgaccatggacaaaaacagatttgtaagcagggtaataaggtgtaggattttaaaatttctattcttctttgtactattatttatgaaataaataataaaacacatttacaactaaaaggaaattttagaaaaggacaaaaacaaaaagcaagagcctgatacataaatgatactaaatgcctgttgtcattctttacccttggcaaagaagggggaaaaagatatgtccactcactgcaaaatgaggtcacatgtaaaacggcataaatgaaaaccagctcacctggaatttggtcatttttctctttctttttctagagaaaggcagagacctgagaaggcagaacagggtaatacgaaagaagccatgattaaaagggaaacgtatctttgtgcaaattagaaaaaggtgtcccttcccccagcagatgtggccacacaccggcgttaaggagcaggtagcatgggttggattctagctaccacttggctctcctggcagggtgcccgcatgcacggagcaacctgcacagctgtacccagtagcctcacatgccttacagctcccagcatgctcattctgattctgggagaggtgggaaaggagaggtagtggcatgtcatgtactggttaaaagtggactctggggacaaaatgtctacgttcaaaacctggtgctaccatatacttgctgagtaaccatggttaaattcatgaacctttctaatgtttcagttctgtcatctgcaaaatccagaccacacagtgccaacaatatatgattgttattaggattatctgtgtgcatagaggaaacctattataactataccagggatctctacttccttgcaactatagagatgcagataccattctgtatcacaaaattgccctggcgaatgtattttgtaagacatctggacagcagagattactgctctgtcccgggaaagtcacccgtaacttcggaatgtctgtagctctggcttcttacttttgttgccacagtatatactatatacatcgagaccacccttatgaaaaatgcagtggctagtaaatattcttcctgagctcaggggaagttcagtggtacatccctcttcccacagggtacaacaaaagactaatgaaacctgtgagactactacatttctcatgttaaacaaaaatgtgatcctctgtctagatatgacaaaatctcattggtgatgagaacacctagcctgcagggttgtttgtggggctgcgtgtgctcctctgtgaaaagcagctcagtgcttgaccctggggaggactggacaccaggagtttaatttcatggttcttcctcaaggtttgttactttactttacttactgttctcaggcaacattaaggctatctgtggaagagaaagaactgaaaaaaataaaaaaggaactgaaaatgaactgtgggtaaggcagagccttctagcaccacctcaaagagaggtgcactactccagtaggcacctgctccctcctgccccacctggcctctgctgtagaatccacaggatgtaagcacaactaccaagaacaagtatgaacttggctgcgtaatcagcagtaaaagagctgagttttctttcactcatccaatatttatggattgccttctaaaagggatacagtgcccagatagatgccagggtagagggtgcacggagtcctttgagagagcatggaagggccctcaaatccatacatgatgatggaggatggatgaggatggagaaaatgagggctgatcttaatgttggaaggtgactgacctatatttgccactcaaagagaaaggagtcatcagactattgaaacagaatgagagttagtgggtatctagggcaagagagaaggcagaaaatgtaagaagaccaactcacatgctttagaggaactccctcacttaatcccacaaccacccaagaagttgggacaatttgtaactctttttacagttgagaatactgaggcattaatattttaagctgctttgtcattttagctagcagaatggccaggactattagtccagggtctgtgttctcagttactaggacagtggctcttaagctgccagctcaccggtatcaatggggagctttaaaaaaaaccaatgcccagacccaagtccaggctctataaatgaggatctgtggaagaagagtttttatgaaatcccccaggtgactacagtgtgcagagaggattgcaaaccacagaccaggacatacatagagacagtttgcaggataagcccatgcaattaaccactaggccatttggcctctcaagaaaattgtcagagaacactcaagccaggaccagagaagggcctgggagccagtgcctcttgattcccagatccccatttctctcttttaaatgatgttcttggagctgtcactaagaggaaggagcagtaacatgcgctgtgggtgtctgcagtcacgcactccgtgtgaggacagccttccagtttagacctctctgatcacctttatcaagcagggggtcactaatcagccaagggactttgagaattcaaaagaaaagggaatttctgttaaatatgaaatcacacagtggtcatcctatagactattgttgcttcttcatgtttgatagaattaaagcctgattatgttcctttcttggttaaaacaagtgcatagctgcctttgggataaagtctagattcttagcaagccacacaggaatctttcatgtctgtctgctcattttctctgcaaatcttctctcccctttgatctccagccgtgtcaatcacttgatctcataaaagagtctccaggcccttgcatgtgccacccctcctgcactcctttctcttttcacttagagcaggggttggaaagctttcataaaaaggacagatagtgagtatttcaggctttgtgggtcacatgctgtctctgtccaatattgttctttcttttcacaacccttcaaatgtaaaaatcattcttagctgaagaagagacacacaaaaacaagccacaggcaatttgcccactcccatcacagatcctcttagcttttaacactgagcttgtatgtgccccgctctgtgatacctttaagaaggtttcgctgaagcctcattagctcctaaaacccattttgccagcctaatgaaagcggaatgctttggccaagagcccaggctacagaatcaagctgccaagcttcaatcctgactctaccacttactggcagcataaactgacacacattaattaacctctcaatgcctctgttcttcatctgtaaaatggagataaacgttgggttgttatgttatgttatgtgagttcaatgcatcataatattagaaagtcagtgtgagtggtaataaaatctgatcaatgttagccattgttactaccatcttcattatcatcactatgaaataaatctagaagctgctcattagctctggtttgttgcaaagtatgtttattttaggtcagtaattaaccatataggtgtacatcaccctttcaacattctgaaaaatctattggcttcagcatcccaccaaaactgatcagagataagggacagggaatattcacatcttttattctcccacatctattttcagaaaatttgaatatactctcactgagttgaaggtccccattcctgctgcctgctggaaagctgcaccaaccacagagagttaccaaataattcctctctgccaatccctacgtttggtaataagcaaatggagaatttgacacagttcccgctgcacagaaatctgtagccaaatgggaaagacagatcagaaataagcagcagaagcatctgcgagctcaaagacaggtcaacagaaacaatcaaacctgaagcacatgaaaacaatgtgcattctgttgttgatagagtgctctacaaatgtcaacgaggtcaagatgttaatagtattattcaggtcttttgaatccttactggttttcagtcttcttgttctactgattactgataaaagagtgttgagatttctacatagaactgtgggtttctctatttttttcttttaattatatcagtttttcttcatgtaactgttgttttgtaggtacacttttaggattgttatgtctactcggggaactgacccttggcatggtgtccctcggcatccctggccttggtctgaagtctactttgatattaatatagccactccgtagtacagctccttttcactttttcactttcaaactatttatgtccttgtatttaaatggagttattttagaccacatatacttggttcttgctttttatccaatcttacaatatattttaattgatgtattcaggccattagcatttcctataattattgatatagctgggtttctgtctaccattttattatcttttttcctgtttgtcctccctgattttgtccctctattacccctttttctgccttcttttgggttgatttttttttttttttttttttactattccattcattgtatctattagcttttggctatatgtcctttttttttttttccagtggttgctctagggttgtaatatacatatctaatctttcacagtgtatttagcattactgttttactactttttgtaaaatgcagatgccttaccaacaaatagtttcctttatctccccactttgtttcatttgtatatactactctatatacacaaaaacctctagccaagaaagttataatttttatttaaacagtcatgcatattttaaagagtagaaaaccagtattttatatttgccaaaaaacttactatttctggtgctctttcatcatttctgaagttcctagtttccatttaatatcatttctattcagcctaaagaacttcctttagtgctccttttagcacagatgtggcattttttcatttcattcctgaaggacattttcactggatatagaattttgtactgacaactcctttaagaatattaaagatgtttttccaatgttttctggcctccatggcttcccatgagaaatccacgtatatctgaatcattgttctaccagatatataatatgtcattttctctagctgtattcaagaatttttgtttatttttaattttcagaagtttgattatgatgtatccagaagtgattttctctgagtttatcgtatttggtattcaacgagtttctggaatctgtaaatttatgtctctcaccaaatttgggcaattttcagctagtacttccaaacaaacacttctctcctctcctcctgagactccaaagacaggaatattagacttctgatattgtcccacaggttccgaaggctctgctcatttatttttcaattttttttctctctgttgctcaaattgcatttttatactaacctatcttcaagttcactgattcttttttctgtcatctccagtctgctactgagcccatcgaataatttttttttacttcagatgttatctttttcataaaacaaatcttaatttcctaagaattcaaatcaaagtattttctctaactataacagatttaaagtagaaatgaacaagaaaaaatatctggacaatctccaaatgtttggaaattaagcagcatacttctaagcaaccaatgaaattagtcacaaaagaaattagatgcagtgaagtggaaatgcttcttagaaaataaattagagcatattttaaatggaatcaagacttaaatgcaacatatcaaaatgtaagagatgcagctaaagcagatattatagggaaatgtatagcaatgatgcatatattagaaaagaggtcttaaaggcaaacagaaaaaaaggacgtagtaaacctaagacagaaatcaatgaaattaaaaacacaaaaacactagacaaaatcaagcctatcaaaatatgctgggccaaatccagcccactgcttgtttctgtacaggatgtaagctaagaacggcttttactttttaatggttgaaaaaaatcctgaaaagattattttgtgatgtgacaattacatgaaactcaaatttcagtgtccataaagttttactgtaacacagccatgctcatttgtttacgtacggcctatggctgcttttgcattacagcagcagtgctatgtagttataacagagttcataggtggcactctcatttcttcatattgttgctaagcacaatttaaaccactgtgactcagcattaggttaactcaattgggttaaatgctgttaattgaacagcatttcaagtaacatatgtattgctgtaccacaacattttaatttttgtattactaatacacactcttcaagccaaacacaagaaaaaaaaacagaaaaacagactttgttacactttgaaggcacaatggaggtgaaatattttgtgaatgaattagatggcaaagcttatcatgcttattgtgcttcctatgcagtgacaacgtatctatgctaaactaatcaaacctatgtcaacactgtcacgctaagcactcatcacaatattctcaattcacaataaatggtccgaaaaattagaaaattttaaataaaatgtctcatcagagcagaatttcttcacaaaaaaaataatgaaaatgaggtagcaactacagtacattttgatattcagatattcagcttctatttctgccccaagcaaggaaagtaatttaccagtgatgaattaattaaatcatgtttgattgcagaaggcaaagaaatgtatccagataaaataaatttgtttatgattagtagactttgggcaagaccaactgctctaagagttgaggacaatgggaacaacattatggtccattaaaatacaagggaaatgattctgataaatttatttggctcttgatttcacagatgttactaatgttgctcagatattgtgtattcaaggaatcaatgccaagtttgagtggttgaatggttagcctctaggaacagtcgatatggaacaaccacaggtgaaaatattaccaaagaaggtacaaatactaattcagtaaacctgaggcagtacaatctgctaagaagtgttaaaattgatagtggtaaaagatatgttggagcagaaaaaggcagaggttggatttataaaaacatgtatttaaagcctatggttactcattgtattcttcatcagcaggtactttgcagagaatattttaatctatcatgtgctattgaaccactagtggcaacagtgaacttcattcaaactcaaagatttaaccatcatcagttgcatgaatttcatgagaaacagaaaaattctgacttgccctaccacatgagagttcaatgtctgagcagcaatgaagttttattgtgattttttttaaatctcagggctgagactgaaatatttctgaataagaacttccctcaagcattactattgatataatactgaatgacattggaaattagctttagctgcagacttgataatgcttcttaatgaactcgacctaaaattaaaaggcaaaacagtacttatttgtgaagcttatagtgtaggaaagttatttcaaagacagttaatgtctgaatcacaggtaatgctaagccactttacaaatttccagtgctgtcaaaagttaaaacaagtaatatctcaattcccacacaaatttgtagtatatatgttatctgagcccaaacttcagaattgtagcagtgttttcagaccttgatgcaagcgcaaaggacctttctgcatttcaaagtccatttcattgtacactgcataattctcctaaccttccattgaaagtgattattctgaaatgtagtgacatactaaaaggtaaatatcaagagtctacagtaattctttaaatgtcttctgtattagtttctattgctgctataataaattaccacaaacttggtggcttaaaataatgcaatttattctttattagttatggagatcagaagtctaaaatcagtttccttgggttaaagtcaaggtgtcagcagggctggttgcttctcataggaatccatttccttgccttttctaacttctagaggctgctggaattccttggcttatggctgcagcactccaatttctgcttctgttatcatgtcactttcttctaattttgatccttctgcttttctcttataagaatccttgtaattacactgggcccaaccagataatccaggataatctacacatcttaaactccctaagtttaatcacaccagtaaatatctcataccatgtgaagtaacattcataagctctgggaattaggatatggacatctttagggagccactattcagtttaccacatctttcaactcattgatattcacaattaaaatcatttgcttatggattagtatcagtatttcataggacctatttgtttaaaaaatttcttttcaaagataaaatacataaaatctcattacaaatcagcattaacagatgaacatttacagtcaattttgatgacaaggaatagcaaccttgaacttcaattaagttgtactcaatcattatatcttaaattttgtcaattaaagtttcctctcattatataaatacctaaataatagtactgatatttctagttaactggaaaaactaaaatatttacaatctgggcctaaaaaaataggtttgctggctcctggacaaaattaattcaacccacaggcggttctttgcaaagattagtaaaaattaaactcctgatgaagaacaaaagagaaaagacacaaattaccaaaatcaagaatgaaagaagggatatcactacggacttaacaggcattagaaatataaatgaattaacattaatgaattcaaagtgatagatgaaatggtttaattccttcaaagacacaaaacacaaaatactgatgtgagaaatcaaagagaaaaatgaaaaaaatcactcaaaattctacatactgcattgatttgttcacgtgatgttatggaaaaggcaatggggttggggagtgaaccaggggtttcctggggttaagagttggggaagagtttgactacaaaaaggtaccacaaggggatgtttctgggcgatggaactgttgtgaatcttgattgtggtggtgaagtctacatgacaatgcaattgtcaaaactcagaaatgtacaccaaaaagaataaatttctactataagtagataagttaaaaaataaatgttaaaaaattaaataaggctgttctacaggtacttgtcaaacttttaagtgcacagcaatcaccagctccagtaaaagtgaagcagaaaaagcatttgacaaaatacaacatccactcatgacagaacttttgcagactaaaaatataatggaacttataaaaatgctttcccctatgatcaggaacaaggcagagatgtgtactcttgacataactattcaacactgtactgaaaatcagccagtgtagtgaggcaaggaaaagaaataaaaagcatacagattagaaaggaagaaataaaactgaccctattaatacacaacatgtgtctctgtggaaaatcccaaggaatctaccaaaaaacaaaaatttctagtgagtatagcaaagtcagagaatacaaggtcaatgcacaaaaatcaggtgtatttctatacactaacaatgtacaactggaaaccaaaattttaaaacaatatgatttaaaatagctctagaagaataaattatatattatactcgggcatatgtctaaacaaaacatgtatagatctgtatgcagaaaatcatgaaacactaatgcaagaaattaaagaacacttaaatgaagggacatgttatatcaatgaactggaaaactcaatgtgataaagacggatctactgattttacataatgtcaatgaaaataccagctgaatttttggtagatataaataagctgattctaaaatgcatatggaaaggcaaaggaaccagaatagctaaaagcaattttggaaaaaaagaataaatttggaagaatcaaactatccagtcttaagatttactatcaagctacagtaaatatgatatcttggtactggtgaagagatacacacatagatcaatttagcagaacatggtacagaaataaacccaaacaagtggtgttgggatggttggtcattcatatgtaaagaaataaaacccaacttaaccatcacatattataaaaaaagttaaaatggatcacagatttaagtgtaaaaccataaaacttctagaacaagagaaaatcttcacgacctggggctaggcagacttcttagatatgacatcaaaagcacaatccaaaaaagataacattgataaattagatgtaattaaaattagaaattttgttctgcaaaagacactattaagagaatgaaaagacaagctacaggctgagaaggaatatttgcaaatcacacatccaacaaaggacttatatccagaatatataaatagctctcaaaaatcaacaataggaaaaatataacccaatgtaaaactgggcaaagcatgcatacagacacttccgcaaagaagatataaggatggcaaagaaacaataacaaaaaaagaaatatctgctgaacaccattagccattagggaaatgtaaattaaagtcacaatgcttagaatggctaaaataaaaaaaaataaggaaaatactaagtgctgatgaagatgtaaataaactggaactttctacatcattagtgagaatgcaaaatggtacagatactacagtttggcatcttataaagttaaacatacattccccatatgatccagtaaccacactcctggcttcgtaccctacagaaataagcacaaaaaaaactgtacatgaatgtttatatcagctctattcataaatgccaaaaagtggaggaaaaagtctatcaaccagagaatagataaactgtgatacatccataaagtggacacttctgttaaccagaagtaaacagaaatgaagtattgatacgtataacaactttgatgaatgtcaagagcaatttgctgagtaaaagaatccggtctcaaatgttaacatatagcatcagttcatttatacgacattctcaaaaagacaaaactatagcgttttagtggttatggtagttgccagtggttacaggtatggtgaggggtaattatgagggaagacatgaggggagtttttggggtgatggaactgttctttttctgactacggtagtcgttatacaaactatgcctgtgttgtaatagaattgtataccaaaaataacaaaatagtcaatgtcactgtaaaaacattttttaaaaacctgttttaaaaacctggaaacacaacctcagttataaggcatggtctataaatgttgttaccatttctaacaatttgtttcttaggaatttttttagattatcaaaacataaccaatcattgctcttcaactcttcaatactctgaaatagttggtggattatataacctaccaatattaagtgagattaaggaatatatccaggggttatttctattctattttgatacctaattccaattccacactgcaaatccttgatgccagctgtctgttgagtagctactctaaccataaacccttaacaaccttgtacgatgtgctgggcacatggagaaaagtatgacctggtcccagaaatagaagaactttcagtgtatggatttagataaagagaaataagaaacaaagagctataagacttaggcaaggcaaactctatactggaacacaaaattcatcaccatccttctccaaggtacaattctcttgcatcccctagcttcctcaagtaaggaccattctgtaagcttcaacgaatgaaaaccttagagtagctgctggcatttccctttcaaagtcttggatataagcaatttatgatcatcaacgtttggcaattatgacaatcaatcaaacgatattatactaagtcgatgttagagatttgctttaaaatactgaaacaaaaaaaaaagggacagggagttgatacaagactggcaaatgttaacaaaggttgaagctgggtgacgcttccacagaattattttagtcatattacatttggctatgcttacaaatttccatagtaaaaacttaagggaaaaataaaagctatgaagcctatttggttaaacatgggtgaaaatccaaaaagaagtctactggaagaggaaaacattgaaatattaatattgttactgttatatcttgtggttagcataatttttttcttttacactttctatactttcttaatcttttacaatatgcaataatttatataatcagaatatgaactataaatatttcaaataaaattaaattacagataattttaaaaaatcaaaaattcaaagcttattaaccttgctttcacggtcctctagtaaaatccaaatatgtgttctgaagctgatactaaacacatcaagaactaaggcaatggatggaaactatttgaattcaaatcccagctcaggctcttaccacctgggtgacctaaagataaaccacctatgctctatgtctgtttgcttatctttaaaatgggaatggtggtacccaacccaggctcaaagggctcttgtgaggattaaagatgttaattcatatcaaactcttagaatgatcagcactaaatgtttaaatactatctttattactcatgcccaagtactccctcatccgtttctgcatttattgaacaaatatcagcgcatcttcgagcagaatttgccagtgaatgatggaaatatcgtcttccctgaaaagaaaggatgataagtactactcaggtgagactccgctgccaagtgccaaagggtcattccctccttctccctgcagcctttttcaagaagtcaaggctaaagaaggaaaggaggatgggggaaatcagaactcctgcatgaattacaatggactacccagacagccaggagtgatcctgtcctaaagaaaaatctctcagtgatcagaaaagggccagggatactctgcagctggagctctgaccccatcctgggttcacagaagctttcagggaactgagtccttctcagaaaattaaaaagtgctaataacaagagacccatcttctaccacctgtcaggctctgttccaagtctttttatttaactctcaaaagaactccattagatagatactagtaccattttaaagaaaaagaaacataggcagagagattaagatactcgcctgttattatactgctaggaagtggcagagctggttgatggtcaggggaaagggctggggaagtacagaacccaggagatccccagtccctgcgatgtaggatcttggacccccggcgctaagtggggatgcgccagctgccccacactggagaaggctcattcaaagataacacaaatcccgcccttcgccgcaagtggattatcctcccctagagctactgcccggttgctactggaccccaacaaaacgaacatcagtatggacggaaggagcaggaagcagggcggggagcgctcacctttctgggaggaacgaaggccgcggcctagcgtacctggggcggaagtggctctgcctaccgagacctcctggactacgcttcccagaattcccgacgggatcagggagacggcctcagcctcctagagcggaagttacccgactacacggggctcccaaactacatttcccagaattcctagaaaaactctccacttatctgcctgcctaggacgcaagtaccgggtgccaagctgagagcctggatgatatttcacatgtgccggtcccaaaggaattccttaactcccccttcctggaaccgaaatgcttccaaagacagagagctcgtatatatatttctctgttttacccagcggaccgtgcatgaaaggcgcctttcctggcgcgtgtgtctctgaccctgtggatcttctggacaattcccggaatttcttgcagggtagcactttcccttaagtcgtctctttctcgtttggatagtcagtatttgtatagtcactattctcttttggttagccatccaattttatactgctagtccagttctactgccttccccctagagtttgaatttatttttcttcaaacgcgacacaaacccaaataaactcaaccaaagcggactttacctacctacctacctacttaccaagaaaatatcccataaaggagagaacagagaagcttgcaatacaggaagaaaaaagaaaagaattacagaatggaagcgatgtgtgcgctaaaaatgcaggtacttaaaggaaattgggctgatttgtactggacaccgaatttaaggaatacaggatctcaacctttctttgactcgattacctttttattccattttggtgtggacgcgtctgaaactgatagtgctgctgctacctaccataatgtgtttgttgcaagatccacaagaacgtggatgccaagaatccacaaaaaaacagatgcaaccgttgatgaggccataagcagaaacagtaaatggttcccacgtttcctctgctttaactactgatgatgaaatgcaagtcataaggcaaatagaagggctgtactgatacagacaaaatgttattattatgggaagggataagtctcttgtaaaacctcgaaatttttttcttctttgagaaaaatctatcacctattttcaccctgctcttgatatagcaaatattgtaagttgtcttatggaggacaggatgattcagggaggacggtgaatgggttgactcaatccagaaaaggaagaggaaaataaaaagacataacgaccaatctgtgaaaatgctcacggggtcaggagatcgagaccatcctggctaacatggtgaaaccccgtctctacaaaaaatacaaaaaattagccgggcgtggtggcgggcacctgtagtcccagctactcgggaggctgaggcaggagaatggcgtgaacccgggaggcggagcttgcagtgagccgagatcgcaccactgcactccagcctgggcaacagagcgagactccgtctcaaaagaaaaaaaaaaagacactattaagagatgagactatttgattctttatttaacaactcctttccaaggaaatgtttctgaaaatacatacggtttacatattaaagaggatcaatctgataataggggatttttttttataaaatgaaaggaaattttaaaaataaaagggacagaataatactttgtgtacttccacttccagtaataataaaatgagtgatttggaacaaacatctggcagaggaaagatgagcaaactttttaaatgtcaaaaggcatcaaaagacaagataatggagaaatggtgggccaaaattcagaaacacttgggagagtcatgcatttggggctacttttctcctggggatgatggtctagtttaggatctgaaaagcctagaagctctgcagcacttttgacacctatatgaagctgggggaacaaaagattctagcaaaaactaaaattcgcatcttttcaagtgcacataagatttgcacaaattagcaaaatgatacgggatttcaaaatactgaaatactaaatatgcttttgaatacaatgaaatttggctagaaatcaataaaaatacaactaaatgattcatgtgtgcatttaataaatattgtctcatctccaaacccaccattcttcactctgctttatggggctggaatgggggaatctgcagccaatctttcccgacctccacacccccaatctggttctgtgttgggcaattattagcagaagcgtataggggtggtgggggcagggagatatactatatcctgtgcccgccaaccagcagtactttttcttgtagcaactgcctaattttcagtttttctaacacttgaataacctatttcatcatggctctttgtaaacattattaaacaacttcccaaagactgatccttagatgtctaagtcctaacactgcagggccctgcttttgagctcagagacagcagaaccagcccaacattgacctctcctcagaggtctgagtttcaggtgagcatgaccttccttcaagcttctaagttttagtaattccggtctcttcactttgtttcctcagacctcaggtggttgctgcttgctgcagttgctatttcctgcagttgctgcttccatcatatattagagttcttttttttttttttttttttttttttttttgagagtctcgctctgttccccgggctgaagtgcagtggtgccatctcggttcactgcaacctctgcctctcggcttcaagcaattctcctgccccagcctcccgagtagctgggattacaggcatgcgccaccacgcccagctaatttttgtattatcagtagagatggggtttcaccacattggccaggctggtgttgaactcctgacctcgtgatccacccgcctcagcctcccaaagtgctggcattacaggcgtgagccactgcatgtggcctacagttctttttctgctctttcagaaatctagctaccaactctacaatatgctaatttttcttttcaaataattgataaggtttctatcttctcagtggaccctaaattacaaacttgtttagaaattaatcaaaccacttttaagtaatccatagataaaagagtgtggcattgaaatttggtgtcatcagtgaattctaccaaatatttaaagaagaaaccatgttcatctcaaaattattcctgagaataacaaaataggaaacactttccaactaactttatgaggtcactgtaataacactgacaaaatttgtgagaggcttcattagaatggaaaatgacaggtctggccgggcacggtggctcatgcctgtaatcccagcactttgtggggctaaggcaagcagatcatgagatcaggagatccagaccattctggctaacacagtgaaaccccgtttctactaaaaatacaaaaaaaaaaaagccgggcatggtggcacgtgcctgtattcccagttatttgggaggctgaggtgggagaatcgcttgaacctgggagatggagattgcagtgagctgagatcgtgccactgcactccagcctgggtgacagaggagactccatctcaagaaaaaaaaaaaaagaaaagaaaaaagaaagaaaaagaaaatgacaggtctatctcgtcataaatatactttcaaaaatgctaaacaaaatgttgccaatgatatataaaagggcaacctaggtatcagagaaaaaaaaaagtttgattaatcacccatttatcataagaaaatttaggcaactaagcaatagtaaagatctacaaaaatggcaacaaatatcaaaaggaatagtgaaatattgaaaacatttcctctatgatggggaacaaaataatgatgtccaccccaatcatttctactaaataccacatttgctcctttatcctgcaatcttgccaactaatctaattaattttaatattttatgtgtagatcttttgaattttatatgcatgctcatgttgacttcagatctgcaacaaatgtggcgctgcagcaacatgggaacagggaaaatattcaatacatgttgctgttaaattgagtattgtgaaataaaactgaaattgacctatacctcccactatatgcaacaatctaaggctggtggattgtagagcccgatttgaaaagcatttcttatgacacttaaatctactcagtgtataaacctataagaaatgtgtaccaaaatacacatataagaatgttcatagcaggatcattcatcacaatgacatgctgagaataccccagatgtctatcgatgatagtatggataaatatttttgttatttacacaaggtaaaagcaaggacattgaacaaactttagctgtacatgcaataccatgatgactcccataaatatgttgagcaaaataactagacaaacccagtagatgcagtgtgattccacttgtacgaagttcattagacatgcaaaattcatcagtaggatgattttggacacttaaatagtaaaaatatgaagaaaagcaagggaatcttaaaacttagggtagtggtttctttttatggggaagaaagcatcatgatgctgtgagagtggggtgtttgcaattctaccatgcttcaattttttttgtgggtggtgattatacagctgttcattttatattcatactttcacatgtatatttatgattcagacacttttctgaatgtgagtgatatttcaatctgtaaaatcaatgatatatgaccaacaaactgtggtgcatcaatacaatagagtattattcagccataaaaagaaatgagatatgaagttatgaaaacacatggaataaccttaaattcatattgttaatggaaagcagccagtctgtcaaagctacgtactgtaattcaactatatgataatctggaaaaggcaaaactaaaggtcagtaaagtgatcagtggttgttagaggttcagggagattaattgatagagcacagggtatttttaagcagtgacactattctgtgtgatacagtatggttgatataggacattatgctttgtcaaaacccatggaatgtacaacacaaagagtaagccctaatgtaaaccacagactttaataataatgtatcaaaattggttcattagttgtaataaatatgccacacacatgcaagatgcaaacaatagaagaaactgggcaggggaaaggagagtatatgggaaatattaatactttctcagtttttctgagcagttttctgtaaccctaaaactgctcttaaaataaagtctattttaaaaaatcaatgatatgtttcaaaggaaactgaatatatggcatagaactttttcagaacttagagggaagggctaaaaataatgagaaactctataatgaatatgaacatactgatcaggtgtatcttataagctaatgagaaaaaatgaggattagagaaggaagcagattgtaataaataaatcattaagaaagaataaacaatttatccacatgggcaaaatctcatattggaaggaggagaagaagatggaggagaagggggaggaaggtgagggtgtgtaggaggaggagaagtaggaggaggaagagtaagagaaaaaggaggaagagactcgtagagatgcacttgcagacattgagaaattttttaatggcaaggctgaagactaaagaattgagtcaatttcaaaggaatgaaaaaataagctttgcattttaattattgtctgcaacattaaaagtactaataaaatataaaaataatctatgggatttttgaggtgaaaagattgatccttctatggtcagagaatgttttgttcatgtgcactattcttggcatacaagattcagttgtgaatcacttctaaattctttccggaaaatattcttcaagacatattacaggcctttgacaacaacacagataaagcgtccacagaccgtcttcctagtttatttacatagaaatgctggataaaatgtgaatgtgaaaatatcatttatttgaataggagaatgtttgagggcacacatattaaaaagaaaaagaaaaaaagaaacagatattatttatttgttccattatatcccccgctacccactctcattttctcccctgccgcatcagtaaccaggtcgatctgtttaatgtgtgcctgttgttggtatgtctttctggcaaaatgtgtggaatttcggatgcatatatatatatcttgtgttataaaactctgttaaaaattttcactcaaaactgtttttctcaatattttactaaaaaaaattttttttgaagacagggtcttaccttgtcacctaggctagagtgcagtggtatgatcacagttcactgcagccttgaccaactgggctcaagccatcttcccacctcagcctccaaagtagctgggactatagttgtgcccaatcacacatggctaatttttctttttttatgcaaagatggggtcccactatgttgcccaggctggtctcaaactcctggcctcaagtgatcctcccaccttggcctcctaaagtgctggcattgtaggcatgagccactgtgcctagccctgaaattttataacataaagaagagttggaagaattatacagtagtcacccatatattctcagcttagatactaaaattagcaacatttatgtcttagccatctatctagctatcttattacttatccatcagaacattaacattaccccacaaattccctcatgacactttccagtcagtctctaaccccttcccccagtggcaaccactgttctactttttcaccataaattttactaattttagaatatgaaatatatggaaccatacggtaagaactcttctgtattacaattctttgagtatagtgtttttcagatccatccatgttgatgcacatattagtcatttgatcctgaagtgatgttctattgtatgaatataagtctttggaaacttgcttacattttaattgtttaaatatttttatgaataaagatcctgcagcatacttataaaagtctttttgcgtgcatgtgctttcttttctctggaataaatatctatgattagaattgcttgatgtgtttaactgcttaagaaaccaccagatcatctcccaaaagattaattttacactgtctcccaaaatatatgcaatttctgattgttttgaatcctaataagcatttgctgttattagtatttttttttgagatggagtttcactcttgtcatgcaggctggagtgcggtggcatgatcttggctcactgcaacctctgcctcctgggttcaagcgatcctcctgcctcagcctcctgagtagctgggattacaggcacctgccaccatgcctggctaatttttgtatttttagtagagacagggtttctccatgttggccaggctggtctcgaacttctgaccttggatgatctgcccacctcggcctcccaaagtactggaattacaggtgtgagccaccatgcctggcctgttatcagtatttttaatatctgccattctggtgatcttgtagttgtatctctctgcagttttcatttgctttttcctgatgacaaataatgtcacacttctccatgggctatattaacaatttgtatgtcttcctttgtaaagtaactgttcaaattttgcccattataattgagatgttgggctctttaatattgtattgtacaagtctttatatattctgggtgtcagtcagtctgaaatttgggcagagtttaatgtagaataaggggcaattctttgcttgacatctttttccctggatttcttccctcactttccaggtcctgtggtcacctcaatctctgtcatctagatcttcaagccagtggatactacagaagcatccacagattcaatgaaacagggatcaaaaatattcagaaaaaaaaatacaaattagcaacacaacaataaaaataacacaaataaaaaacccaatacagtataacaactatttacatggcatttttattgtatagggatggaaataatttgaattatacagggtgatatgaaaaggttagatgagactactatggccattttacataacagacttgagcatccgcggattttgatttccataagggtccctgaaccaattccccacggacaccaagggactactgtattcaggattttttcacctagtgcatgaaggatattcatctgtagttttctttccttataatttctttgtcttgtttggtattatcagattaatgctggcctcatgagacaagctgggggtgggtgggtgttcccgtctcttttcgtttctgggtttatttaaaattcacatctttactctttaaatgtttagtagaatccaccaatgaattaatctcaatattggtttttttattgttgttgttggaaggctttatctattaatcagttttgaaatatatatcaggccaggcaggtgcagtgtctcaagcctgtaatcccagcactttgggaggccaaggtgggtagagcacttgagcccaggagttcaagaccagcccaggcaacttggtaaaaaaccacctctacaaaagatacaaaaaattagctgctcactgtggtgtgaacctctaggtccagctactcaggaggctgaggtgaggtgggagggccaactgaacctgggagttcgaggctgcagtgagctgtgatcatgcctctgcactccagcctgtgtgacacagcaagaccctctctcaaaaaaaattatatatatatatttatttatgtgtgtgtgtgtaaaaattgtatacacacacacacatacatacactcaactatctaggttatcctggatatttctttttgagtgaactttggtagtttgtgcctttcaagtaatattccatgtcatgtaaattgatgaatttatggacaaagagttgtttgtaatgttcctttataatccttttaatatctgcaaaatctgtaataatgttccctccctcctgatttttgttttcttctttttccccgttggtgagtcagttgaaaggtttataaactatattgatcttctcaaagaataaggttatgattttgttgatttttaaagattgtttttctgtttccaatttcattgacttatgtagctgccacaaaacttcactctatcctctccaggacccagctgggctcaagaattaaattaacataacacagattaacaggagaaaagcatgcaaatttatttaatacaagttttacacgtgaccagagccttcattacaaaatgaagctccaaagaaacagtcagttatgtatacactgtagtgaacaaagaatagtaagttgttaagaagcaattaggccaggcctggtggctctcgcttgtaaccccagcactttgggagacagaggcaggaggatagcttgtagccaggagtttgagaccatcctgggcaacacagtaagactgcatctctacaaaataaaaataaatttaaatttttttcttttttaaaaaagaagcaactaaatcatgcggagaggcttgaaagatgttattttaaggtggtctgtacagaattcttttgggcttgacttctcattttgaggaaaagtatattgctccttttttttccagtataaggaggggatcttctttcctccttcccaccctccctccttccttcctacctcttcccacagacgtgctagcagaatgtgctaattagtaaatatcttctgccctgagaagagagatgacacggcaagaagaaggatgctaagtcacactcagttaaggttctgctgctaggagccaaagagtcattctttcctcattcctgtgaccatctgcgagaaatcagaactgtgtctccctcctgcacgaatcacagaggacatccccatacaatagcctggagtgattcccgccccattccccccacccccacttttttaaaaagggaatccaggaatcgtcctgcttcctgtagggatcagaaagaaggggcaaaatagcactgcaggtggaactctgatttcttcccaggctcatagaagctttcaggtaactggggcttctcgggaaattaaaaaaaaaaaattaataaaatgaaccacacttaccaccttttacttgtgactatctcatttaattcttcactcaactgcatcagtttggtactactattccccttatgttacataaaaggaatgctaggcacatacagtttgaattacttcccaatttcacacccctagaaggtggcagaactgcctggtcagtcctggagtaggaacagagcgcacaaaatacaagagatcctcaacccgccaagaccaaatgctgcaaactcgacaaaggctcactcacctggggcccaaccccatcttccactgctagccgcggatgctcttcttgaagataaggagggccgccgccaggctaaacgaaacattgctgtctcaggcctcactcaacttcctgaaaggaatgatgacctcactttcatggagcggaagtgactgtagttacccacaattcctggattataaccccagaattcccaatgagataatcgtcacagccacgccctcctgtagcggaagcccggccgcctacacagagctccaaggttactgctcccagaatcctcgcaaagaattggcaatgtcgttgcctttctctggcggaaggctggctactaccctttgaatttggaatgtatgtcacacagttctagagcagaatgcaaactcagcactgtcctctttgaaccaaaatgtctccaaaaacaagattctaatttatacttaatatttcccccagaagcccaatcattaaagccacctttccaggaacagaagtggttttgacgccgtgaatcctttggaccagtttccagaatcctcttcaggtagtgcttctcaccagcgtttccctttttattttggataactaggttcagtccgaatcattctatctcactggtcaagctcagccttctttttccttattctcattttttttctttcacatgtgacaaaacaaatgcatttgaacgcccctcccaccctgtcccccacccaaatccctttagtagagaacacagtttgaaatgaaaaggaggcatagattataaaggggaagatatgtgtaagcaaaaaatgcagaacttagaaactgggcacgaatgtaaggaatacaagatctcaaacctactttgactggattttctactttattccatgtgttttggacgcatctagaactcttggcagtgttatctgatatatgctattcattccatgatacaagaaccacaagaaggtcatgcaaagtttattaaagtataaagcagaagcagcaaaagcttttgggtgttccttgactttaattgctcattgtaaaacgtggctcatgaggcgaatgaaaggaggtgtgttcatgtgaaggaattattataatatgaaaagagataaatatataaaaatttgaaatatctttttgttcaagttcaagcatcacatcacccacttccaccctattcttattatcataaatacaatgataactgaagaatatgaaaaccagtgagaccatatttcgttcaagtgagtcgattgagagttggacgcaaatccagaaaatccaacaaataaaaatacacgaaggttctgcttaccacttttcttctggacaagaactaaacattttcatacctttatgttatgaaaaatttcaaacattgatagaaataaagagtgaagtattccattgcctcatcacccagattcagcaattttcaacatgtgccacacttcctttatctatcaatattgtctttctgccctttttgttattgtaattttaaaacaaaatcatgacactgtattatttccccctaaacactcccatgcatacttcaaagaattacattttctaatataacaaaaatacaactgtcacactgaagaaagttaataattccttaatattattttatgccctaaaaaacaaaacttcagaatttccagtcatctcaaaaatgtccatcctttgcatgtgatcgttttgtctcttgagtctctttcaatctggaagagtatcccccctttgatccactttaaattcatgcttttggcatatacaagacatcaggtcagttgtcaagtaagatgtcccacattctggatttttaaaaatgtttcattatgctgtcagttaacattttcttgaatatcttctgtggctctggtaaactacaatttagatttagaaagcagatgagattaaggttcatcgttttcggcaagaatacttctccataggtaggtttattttggccttgttcagtagcatcaccttctccttagtgcagatcacagcacattcttgaatattactgtttcctacagcacctaagatactacacctcaatcatgcacaaatgtccattagaagaagaacaaggttaaaagagtttgagggaaagggtgaagactttaggaatcaaaattttttctctttcaattgctaatctcatcctattaagcatccatagtcttgcaaagtgtgaaagaaaaataaatctcgggacccccaaatcaccaagccagagggaaaagtcaagctgggaactgtgtcaggcaaacctcccatttgattacttaataagatagctgtaaagcagaaaaagctacatacctccttcacaatttgtccacaggggcctgtttgtgggcctgaacatctttatccaaaagcatttctgttgaatttcaccctggtaatgtaaattgatagcttatcttcacaggtgtgggataaaggacagacagaactcaaagtcattcctctgttcacctgaaacaaatgcatatctgattgcttcctcttccctattgtttatgtagtaatgcagattcactaagcaacattaagacctaagtcactattcgtctacccacctctcacttgtgagttttgtattcagtaaaaggctaatcagagcctcaaaataatgccactgtttgtctcttatctacctatgatatagaagctcccactcccattcgagattgtcctgcctttttggacttaagcaatgtataacttacacatactgtttgatgcctgatttctccctaaaatgtataaaatcaagctgtgccctgaccactttgggcacatgttgtcaggacctcctaaggctgtgtcacaggtgtgtacttaaccttggcaaactaaatgttctaaattcattgagacctgtctcacatacttttgggttcacaaaagtatgctttagtgaacacccatgtccacttgttcttgatctttaaatgagtgttaccataatataaattccttgaatggagacccttgaatctaagagtatgcacagtgcatagagtcatattaccaaacctatcccaaaacaagtgatctgattgactgagccaatagtatttgagagcattttccccccaaaatagatgccatgaattgaaatatcccctttcatggcatgtttaaaatacttctaccattgcacataccgacttatcaaagttatctggtctctcatctctgtacctctaaagcaatgcttcccagccaaggtcacatacactgagaaagtgtctcacaaataacttttaagtgataactgataccaaatcttatgttatttaaaaacaaaaacagaggcaagtcaatattcctcacataatagcatcactggtgcctgaactgaagttcactctctagagtaggagaccaaaagatgattttaaagctgctgggccaggtaatatacttaacctgtagcctttgggacatatgctattgactggctcacagagcatccattcataatccctttgaccctgcatgtctcttctataaaattatgggggaaaatcaaaatactttcttaatgttccttaagtctatggttgtcatgggacaatattttgaaacaattagatgtaagtgtcagtcttctgtttatactagaaagaagagaaaagatttggttggtattgaggatatgagatgaacaagggatattgaaaatgcagtaggatcaatgaattgtagaaattgatgaagtcaatatgacagtaaaccataggaagatctggcaagagaatatgtagagcagactgtaatgccttaaatggagactatggagggattgcagctattgctaatttaaggcctatagtatgaccatggaaatgaataccccaagtaggatagacaaaaaagacgaccagaggcatggaagtcagtatatatctcttaaatggtaaaacatttcatatatacataaaactatgagaataatttttaaacacatcccagatgcccaggtttaacaagtgcaaattcactcaatagaatacaacacaatcattaaagatgaacgttatgaagaacgtaggaaacagcaaaattaacttatggtatattactaactgaaatactaatttaaaatttacacattatttaataaaaagcacatctctacataagtataaaataaaccaaaatgaaaatgttacatgagggtggtgctagtaggattataggtaagtcctaacttagttctgaacttacttgtaatgaggtcctgccacttaaaaaaaaaaaaaaagttccagacacttttaaaaagccatatttattgaagtgcaatgtacatacattataaaggctactatttttaagtgtatagttcaatgagttttaacaaatatgtacagacatgtaactaccaacacaatcaagttgcagaatatttccaacgcttcaaaaacttcccaaggaagcggcaatgctgattggtgggtccaacagaagggctacgggagtacaggacccaagaaaccatcaaacccaatgatgcaagaccctgcctcattccccaacctgggactcgggaacctcccgtaacactggaaagctctactgagtcgagggaaacgcaaacatttccaaccctaatcctccaccggctgccacttttcctcctcaagacagagggccttgaccatctttggtccctcacccaggctgaggaggcgcagaagggtctctaaggctcaagtctcacatgcagcatgatggccgcaactttccctggagcggaagttcctgcgactcacttcccagagtcaggagtcacaccagagggccacaccctgtagtcccgaagaggaagtgttgtcgactatatgaaacgtctgacccacacttcccagaatgtttaagcggaacgacgacaaggactccaccagcctgggcgaaaatacttccgactacagttcccagaatacccagcacgctagtgcttccaccttcctacagctcattctgttagttaagtgcgttcaaactgaaggtcacttctgtggcgcgattagtgcttggactttttatttttgtaatttttttttcctcaagaaaaaacgagtatgtggaaatataaagaaagtatgactatttggggataaaagcaaaggctttagtatgaaaagaaacacgctttagcggaaaagtgatgagtatgagaaaaaacaagattctaaaagggagttgggctgtccactggacagaaccttaaggaatatggaatctccagacgtggtttaactccgttgcctctttatatgtgcctgtagtcatctagacctctgcttatgctatctggcatggacaatttatttcaagatgacaagaatccacaaggaattccaaggacaaatcagtcttgaaatcaagcacagaaagagcaagttgtatctgaaaaatgaaggaagctgtactggcaggaaatttagaaaatatgatatggaaaatggctcctttcttgaaattttttgagttcaaatcaggcttggaattggctattcctctgttgcccgttgacctcatatatttaacatgaacgtatcttttctacaaatcagtttaagccatgtgaatttatggttattcaggaagaggtgggtaggttgagatgggagacggactccagataactataacaagtcaaactacaggaagtatgtacttaccactttccttctgggcaggaaaaaaaatttttaatgaaactttcgatattaacacaaaaaggcggagcttgcagtgagctgagatcacgccactgcactccagcctgggcgacagaggagactccgtctcaaaaaaaaaatagtaataaataaaaaaaaaagaaaaaaggaaatgataacatgaaacaccaaatgcacctaccctaaattcaacacttcccaacattttaccacacaggcaatatctatgactattgaattttgttactgaaatattttaaagcagatccctggccttatcccttcccaatactatctgtatcacttaaaaataatgatgttttaacataaccacaaaaccgttaccttatgagataaaattaacaaatcttagtattatctaatatgcatgccaatttgaatctgttttttggggggaaaatgcttttacagctggtttattccagtcattatccgaacattttgatccattgtatttgattgttatctcaccagaaagtcatttactctaaaactatgcccccaccccgaccctcccacacacagcaccaccaccaccattttttatttccttgaactgttggggaaataaaaatgtcaaattaggtgtctaaattctggatttgtctaaaggcttccctatattttctcctctgctcttttaaatgttctgtaaagtagaaatttgatgtaaagtctagattaaatgcaagttattggtttttgcaatacttcatagaagggactggaaatatttgaaacagaaaccatattctcttcaactaaagtcaattcaaatcctcagcaagtttccctctgaagagaaagacaaaaataaataacagcaaatatgcaaaaagagacagattaaaatatggaaaccatcataacaaatcagattctagacttgagtacaatggctcatacctgtaatctccagcactttgggaggctgaggtgggaggactgcttgagtcaaggagtttgagaccagcctgggcaatattgtaagaccttgtctctgcaaaaaatccattaaggtaagctaggtatttgagaccacttttatctcaaaaaaagtttgaggtggaatttgccaattccttatggtaaaaacctgagaagctgatagttggagtctaggacctgccaaaggtggagtggataaccatggtttaaaaaatcacttgggcgcagtggctcacgcctgtaatcccagcactttgggaggccaaggtgggcggatcatgaggtcaggagattgagaccatgctggctaacacagtgaaaccctgtctctactaaaaatacaaaaattagccgggtgtggtggcgcacacctgtagtcccagctactcaggaggctgaggcaggagaatcacttcaacccgggaagcagaggttgcagtgagccgagatggtaccattgcactccagcctaggctacagagggagactctgtctcaaaaaaaaaaaaaaaaaaaaaatcacttgggttttgtgtatggaacaccaaagggctgcatcctaggaataaagctgaatgggaagtaggcccaacctggcagttattcaaacccaaatccaagtcaactcaatccctgaccctgtattgcttgtaaatctggcaaaaataaataaaatcctctgtagagatcctaagcatccaattattttttaaactttttattttaaaataatcacagatttatatgaaattgcaaagatagtagaaagaggtcccatgtacccttcacccagtttcacccagtgattatactgtccttaattaaaatacaacattgaaaccagggaattatattgacaccatgaatatgtgtagttgtatgttatcacttgtagattgatatagctactaccacaatcaagataaataagtattccatcactgcaaagccctccttcttgctacatcttgatagtcacacccagtcccctcccttccaccattcctgatatctggaagcaactaatctgctttccatttctataatttggtaatttcaagaatgttatacaactagaaccataaaatagattcacgtttttcacttagcataattatcttaagacccatctaagttgtgtatcaatagtccattcctttttattgctgagtagtattccacggtatggatgtaccacagtttgtttaacatttacctattaaggaacattttagttgtttccactttttttccattatgaataaagctactatgaacattcatgtacaggtttgtgtgcatttgtttgtgtatgtaagttttcatttctctggagaatatgtccaggagtgaagttatggggttgtaaggtaaggataggtttaattttttaaggaactgccaaactgttttctggagtggctctactactttacattcccaacagaaatttatgagacttcgagtctctttacatccttgccagaatttgacattgttgctattttttattttagctgttctaatagatgtgtagtgatatttcattgtggtcttgatttatatttccctaatgactaatgatgttgattatctttgcatgtgcttctttgtcatatgtatatctttttcattgaagtgtttgtttaaatcttttagcttaaaaaattggattgttttcttattgagttttgagagttctttatatgttctctatacaagacttttgcatatacatgatttgcaaatagtctatcactccctagctggtcttttcatatctgtgtaagagttatgattttattttttgaaaattatttttttaacagttttgggggtcccacagagatgccaaatagattcatgtaacgaatccaggtaatgtttgtcaccagaaaattacacctcagtgatggtcttaagcccagttgcattgtttcttggctcccagaggtaaatacaaagtgacaatagaaatttgttgatcctctgtttttcgcattttaattttcttctaattttgtgtttcatttttgttttgttttgtgttcacttatagctgataaattttcaccatcactggcaacaataattgggaattttttgtgatcttgtttttaaagtgactatcagtgctgctcccaaggttctcaagtttttaagaaactgtccttgtcaaaaggcttatagtcttagacaaatttatatggacacatttcttcagctgctgcaaaatatgattcaactaactcatcatcagtaaataacttttcttgcttgactaacagattagccactctaaaacttactttggttatagcctcattttcattcgctgttttttaaaagtaattcggctttgataagatattccattttggccataattatctgtgatttggaaatattgggaaaagtttctaatctggcagtattaatgttattatttttcttcttgtacagctatctgtcactgcaaaacaaacacaatagtcagccgtctgattctataacaaaataatctacactttactataccttaaaagcataacattcaaaatttgattttctcttcttgttttgacatgatggatatgcaaaataaatgaaatatcaagtagagtgatacatatggcactcaaaaatctgttaacttgtaataactgtgttactgaggtttatgatacactgagtagcagtatgaagtgatgagaacattatatatggtctctatcataagtactcaactgtaccaatataacatgaaaacagccatagacaatatgtaaacaaataagcatgactgtgtttcaaccaaaatttatgaatgctgaaatttgaattttacatacttatcatatgtcataaaatattcttcttttgatttttttgactatttaaaaatgtaggctgggtgcggtggctcacacctgtaatcccagcactttgggaggccaaggagggcagaatgcttgagctcaggagtttgagaccagcctgggcaacatggtaaaaccccatctccacaaaaatgcaaaaattagctggacatggtggtgcatgcttatagtcccagctactcaggaagttaaggtaagaggattctttgatcccaggaggctgatgctgcagtgagccaagataatgccactgcactccagcctgggcgatggagtgagaccctgtctcaataaaaaatgtaaaagccattattacttcatggggcatacaaaaacagtcaatacaccatatttagccattaggccagaatttcccagcaactggcttactctgtcttacccagaaccagaattccaaattgatctataaagtcaacacaatatcaatcaaatttacagcaggctttttgcagaaactaatattaagatttacgttgaaatgcaaaaaacaactaactaaaaaaactagaatagtcaaaattgttttgaaaaggaagaacatcattagaggaataacagtatcagattttaaaacttactctaaagctccagtagtcaagacatagtaatggcttaacaatatttatataaatcaatggaacagggtgattccagaaaatagagccaagtatatatgatcagtttattttcagtgcagccacaaagataattcaatgggggaaagttgtttaaaaaaatagcactagaacaactagacatctatttgaaaattatgaacctcaacacttacctcacatcatacacaaaaagaactcaaaataggtaacagacctaaatgaaaacctaaaactacaaatgttatacaagaaaacataggagaaaattttcaaaaccttgggataggcaaaaaaaagatttcataggtaggccaaaaagagcacaaaatctaatttaaaaagataaaccagaacttcatcaaattaacttactctcttaaagacattattaacaaaatgaagaggcaagccaagactaggaaaaaatattcataatgtatctatctgagaaaggattggtatctaggctatattaagaaatcttacaactcatcattttttatggctgcatagtattccatggtgtatatgtgccacattttcttaatccagtttatcattgttggacatttgggttggttccaagtctttgctattgtgaatagtgctgcaataaacatacgtgtgcatgtgtctttatagcagcatgatttataatccattgggtatatacccagtagccataaaaaatgatgagttcatgtcctttgtagggacatggatgaagctggaaaccatcattctcagcaaaccatcgcaaggacaaaaaaccaaacaccgcatattctcactcataggtgggaattgaacaatgagaacacatggacacaggaaggggaacatcacacaccggggcctgttgtggggcggggggaggggggaggggggagggatagcattaggagatatacctaatgttaaatgatgagttactgggtgcagcacaccaacatggcacatgtatacatatgtaaccaacctgcacgttgtgcacatgtaccctaaaacttaaagtataattaaaaaaaagagaaatcttacaactcaacagtaaggaaccaaaccaacaaaaaacaagcaaaactttcaaaagttcttttccaaagaagatataaaatgaccaatcagcacatgataaaatgactgataaccacctcattacttatcagggaaatgctaattaaaccacaatgagataacactacaaataatcccaatgactaaaaatcccaagtgttggttagcatgtagaacaagtgatcttgcattcactgctaatggaagtataaagtggtatagtcatttttagaaatggtaaagttaaacatacacttagcatattcactgttacttgccttgtaccaaaagtataattcttaaagctgtgagatagtggtttgagaataaacaaaaatgggctgggtatggtggcggctcacgcctgtaatcccagcactttgggaggccgagctgggtggatcatgaggtcaggagaccatcttggccaacatgatgaaacctgatctctgctaaaaatacaaaaactagctgggcatggtggcgggtgcctgtaatcccagctactcaggaggctgaggcaggagaatcacttgaacctgggaggcggatgttgcagtgagccaagatcgtgccactgcattccagcctggtgacagaacaagactctatctcaaaaaaaaaaaaaaaaatggtcagagatttcagtaataaacataaaagataggagactccaggaatggatatacctagtgtagtataaatgtgacctttaagatcagtaaataaaaaagggactcatcaataaatgttgaaagccttgactatccaattggaaaaaattaaaattagatttgtgcctgacaccatttaaaacatagtcttcatgttttgaaaataattagtgcctgggagtatgggaaagttttcttttaaaaaatcattatacaaaaatttcataaacacattgatattttaaccacataaatttttttagctaagttgcccagtctagagtgcagtggctattcacagtcacgattgtagcatccaatagcctcaaactcctgccctcaagtgatccttctgcctccccagtaactgggactacaggtatgtgacaggtatgtgccaccacacacagcccaaccacataaagattttaagtgaacaataaagtacctcattctttatgttaatagacaaggacaggcaattcttcataaagataacatacacttagcctatgacagcaattccactcctaggtatttacccaagagaaatcaaagcatatgactgcaaaaaggctaatacaagaatattcttagtagctttatccaaaatttccaaaacctggaaacaaatgttcaccaacataagaatgagcaaactgtggtaatttcctgattactctgaacataaaaagaagactgataagcataataatataaatgaacttaaaaacattatgttaaatggtggcagcttctatagaaaacagaatggcagatcctgaaaaaattgaaaatacaattaccatatgatccagcaattccacttctgggtatgtgtccaaaagaattgaaagcaaggtcttgaagagatatttgtactcctatgttcataacagcattattcacaatagccaaaaagtggaagaaacccaagtgtacaaaggaagaaaattctgacacattcgacaacacaaataaaccttaaggacattatggtaagttaaataagccagtcacaaaaagacaaatactgggctggtcatggtggctcacgcctgtaatcccggcactctggggggtcgaggcgggcggatcacaaggtcaggagatcgagaccctcctggctaacatggtgaaaccctgtctctactaaaaatacaaaaaattagccgggcgtggcggcatgcgcctgtagtcccagctactcgggaggctgaagcaggaggatggcgtaaaccctggaggcagagcttgcagtgagccgagatctcaccactgcactccagcctgggtgacagagagagactctgtctcaaaaaaaaaaaaaaaagaaaaagaaaaagaaaaagaaaaaaaaaaaggacaaatagtgtatgattccatttacgtgactcagagaagtcaaatgcatagagacacaaagtatagtggctgccagtggctgggaggaggggaaaattgagggttgctgttgaatgggatagagttgaatgggatagagttttagttttgcaagataaaatgagttttggagattggttttacaacaatgtaaatgtacttaacactactgagctatatacttaaaaatggttaagatggtaaatttcatgttatgtatatttcaccagaaaaaaattgtaaaaagccgaaagcattccaggtagctctagtttgcatctaagattaagagacatttatttccatcaaaaccaaggatctgaaaggaaccaatttacaagctcacaagttagcctgacagtctcacagatgctggcacaagacaagagactcctggctctgagacaaaggactttattagtcacaaccacagcagtagccagagtgtcatcctttgcaatggtttttaccactctaatcccatagagtgacgtgaaaggccaggtgctgcttgcatacctagcgggctgcgttgtaggaatagaactctaagcttaggaaacctgaatcttctatgataggcagtgggaacaaaaccactgcccttcaccccagagggagacactgtcttcactggagtggtccataaacaaatttgctgctccagaggaagacactatatttttgttccctaacgcgtacgcacctttgaaaagacagtggggaacaaaggtgaccagtgtctctactcaaagacatgcagaaaaagagaagtagatacttaagtaaccatagtgtctgcagaaaaataaaagaaaaaaaataagagaagcagatacagagaatgagtggggaatgaggaataataactaatgttacattctacttcaaagccagttgactacagaagaaaaaggccaattctggggttacatctcctttgtgagtggtatgctaataaatgtttaataaatggctctccagaaagaaacatacgtacattatataagtttactataaattttactaatatagaatgttttcagaacacaatttataaacaataataaaatatgcaatactctatttattataaattacaaatttagaaaaccatgttgaatgaaaaaaaagccaaacgcaagagtatattacagtatgatttcatttatataaagttcaagaataggcaaaaccaacatatggtgatagaaagcaaaacagtgattatatccttttttggaaagaaatgaagggaaaggggcacaagggaaattttggggtaaagaaaatgtttaacatgttgaatgggcattatttacaaggatatgtacatttgttaaaacttaaatgtagttaaagtctgcactttatgtaaattatacctgaaaaaaaagacaagacagatcagacatcttcggtagctgttattatgcttctatgggcagtctagtggaggcatagccactgggcccagtctgccagctgcatgctatttgtatttattgcctgtagttgtatgaagagctagtgttaagtagtgttaagtagtagttatcagtataactgataacccagcatcagttattaaaatgactattatttctccaacatatttcaaggctaataaactaactcactgtatacatgtggatctgtttttgggctcccaattcttttccattgatctattttttctctcctgagcgaataccacactgtattaattatagaaaatttataataaatgttgatctctggtagtgtaagtccaccagtgttgctcttcatcaaattttatcatcacacataagggactttttttttttttttttttttttttgagacagagtcttgccctgtcgcctgggctggagtgcagtggtgcgatcttggctcattgcaacctccacctcctgtgctcaagcgattctcctgcctcagcctcctgagtagctgggattacaggtgcctgccactatgcccagctaattttgtgtatttttagtagagacggggtttcactatgttggccaggctggtctcaaactcctgatcttgtgattcagccaccttggcctcccaaagtgctgggattaggactaagttttatagggaaaacatgtaagctaagggtctggaagagaaggcacaggaccacaatttctcataccacttgaagaagcaccagggcctgggtgaagcaggaaatagaccacacctcaccgctatgtttttatccttcttaaagagcaattgtgaaggcatccatgttggtgagggaacaaattgactatgcaggtaatctggactacttaactaaagcagacaatctggctttagttgtcagagcttcacagaagttgcatgagaaagccaggttctaacacctcccatcaggaagagaaagccgctgggaagttgagttcatgtaaagcccttcccactgaagaatgtgggagtctgaggccccagatagctcctcacctaggcatcccaaagggaactcccagaattacctttggacaattctggtcattgcacacaattgttattgtgaatgaaacattttggctacattttataaaagactcttacatagtaatgctatgaattttcacatgccaatttcgtgtgaaaccaatttgttgacccgataattttaaaacagccttcaattggtcaaattttacaggtggatttgaattttataagtaaataacattattctctagcataaaaatagtatcttccttttccttccaatgattatgtctcaacattttttattttgtcttaatctcaccccatgaatctgggccagtgttgtgacttgctttaatcattaaaatgtggtgaaagtatcattgagcctgttccctgatgaggccttaagagatcacagcttttgcccttgaaaccctggcactatgggaccaaccctcgattggtcttctggagggtgagagaccatgatgacagagagaacttcgttgtctcatctatgaccatcataaaacagccaggcccagatgaaccatcagctgactgcagatgcatgtacaaagcccagttaagataatctagcatgtcccacaccagaactgcccagctaagcccagttgaacttgccagctcacacatcatgagctaaataaatatgtatttagagctactcagttcttgtgtgtgttatgaggcagaagctgataagcatatttaggataaattatacatgagcgagtctgttacgcttttatcaaatcattggatttgacatgctcatatttatttaggatctctgcatcttcatttgtaaatgagattggctcccactgattgggagctagactaatttctgctttttccatgctactttgctacaagaggaaaagcaaacaattttgtgaagtagggagacattcctgttagcatcatatatttaaaaagcttaatgtgatatgcaagcgctgctcccggccaaactagaggattgcctgggacacctccaccaacactgagggctgattctgtcatgaaggaatgttgcacccattctaaaccccaaaagcttcctcaggataatgtgtatcccggattttttctctaacttaatgtttgcaagtaggagtactggagtatgtggtggacatggacaataacatgtggacatttttataggtctagatcattgttgatggagccatgttattccattatatgggatgccctaatttactcaatctcttatacatgaaccttcaggttgtttacagtcttctcattgcaaaattcttagaacatatttctttctgaaaccatattttccccactcatgtaattacatcctaaaaatacattctgagaagcaggatcattggctcaaagacaatgcacattgtacatatgatacatatagacaagatcctctccagcaactttgtacctgtttttctttcccccaccaacttatgtaagaacactcatttcctcatttctactgacatagaatttttaaaatatttcactattatccacctgatcagtaagaaaatgacacttcagggatggttttatttgcacttgaatggctgttctgtttacaaactataactagcaggaaactgtaatgcaagaaaaactaggaataaaccatgatccaaatgaagaaacctataagtcaattaaaacaaaaaaggacactgtttttgaaggaaaaaaaaaacaccttgtgggatgagtgcagtggcccaaacctgtaatccctgcactttgggaagctgaggtaggaggatcgcttgaaaccagaagtttgagactaacctgggcaacaaagtaagaccccatctctacaagtacaatttttaaagaaaacatcagctgaacacggtggtgtatgtctgtagtcccagctactcaggaggctgaggcaggaggatcactgaagccaggagttcaaggcttcagcgagcaatgatcaggccactcgcactccagccacctgggtgacacagcaagaccctgtttccaaaaaaaaaaaaaaaaaaaaaaagcaaagagatctcctctcgaattcatctattatccccaattaaatgacaaatttggggggaaactgacagaaagagcatcctttaaaaacccattattatacaggtctgctgagaagaagactgcatcagtctgcaatgaacactgttggttttttacatgttgttggtcactttagtaaatgttgattttattcaattaattttattaagactaaccacagaacacctattctagttaatttttaatcgcatttaaggtgtgagctgacaaacctattcagcatcccacattatagagtttctctattatatgagatttcttacgtcggtgggttatacttttcagtaaagttttaccacagctatatcatctggaacatttctctttggtgtactcaccaatgaatgaaggttatcactgaagaagtcccatccataccattttagatggttgcactgccacatcaagccttgaagatttaaaagttttgaactctgaattatgttacttctgtatgtggactccaatgacaatgaaacatattgctataaaatccctccatgctagtcaggatagcctaggcaatgctgcagtaataaataaaccaccaaaaatctcagtggtgagacacaatgaacttttatttcttactctaaaaagaaatccaacacagatgaagtagtgaccttctatcaacccagtctggaataagcagcctccaaggtcaccttggcagggatagagaagcctgaggatgtttgtaaaggctagacctgaaagtggcttatatcacttttgctcacactccattggctagaactcaatcacatgggcacactcttaactgcaagggttactgggaaatagacttcttatttgcaaggaaatggaaccagtgtgataaacacagcactgcctctgccacacccttcaaatgccacttctatggagcttcttgcctgtgtagagaatctcatggaaaacctgggtactaacgttctttcatagtaagagcatgggtttcatttttgagcacacttttgaatgttcttcatacagagagtatttttctactggggactaaaaaaaaatctaaagacgttggctgaactgaagaccttaccatgatcatcccaattagaatttccttcctggacacaccctttaatggaaatttgaccactaactacaaccactaccacaaaaccacccatttgtcaaaagtaacctctttgccattgtagcatacagcagttgatgggagcttcacagaagttcttgaaatccacagtccttgcctggcacacttcagtgctgcaggctgacattatcgatggcagtgtccctgtcttttgctcccctagccctcccacaggctgagtaagcctctatcatctggaatacagtgtggcttctgttttactaattgaaccctgacttactacatttataatgtttctctctgctcatgtagtctttgatgagtcagaaggtcctttccacgctcacaatgtgtgtactgtgtctcatctatatgcactctctgatgggcaaggaggtatgaattacgactgaagcccttaccacatgccttacacttatagggcctctctcttgtgtggactctgaggtgaacattaagatctgaattccggctgaagcctttaccacactcatcacatttatatggtttctctctgatgtgatctctttgatgtaagtgaaaatatgaactgtaactgaagcactttccacacacttcacatttatatggtttttctccagtgtgaactctctgatgagtgtgaagaacagagctatacgcaaaatcctttccacacacattgcatttgtatggtttctcccctgtgtggactctctggtgaatgtgaaggtgtgtacattggctgaagccctttccacactcaccacacctatatggtttctcccctgtgtgaaacctccagtggacttgaagaacggagcttgaactaaagcacttgccacactcactgcatttgtagggcttctctccagtgtggactctctgatggacaagaaggttggagctctgatcaaagcccttcccacactcttcacatttatagggctttttccctgtgtgtactccctgatgaatacaaagaagtgacctaaatccaaaccctttcccacattcatcgcatttgtagggcatctcccctgtgtggactcgatgatggttgtgaagggaagagctgcgcctgaagcccttgccacattctttacatttgtagggtttgtctcctgaggagactttctgatatctgggaaggtctgagctctgtttgcagcccataggccattcgtggaattcatagggagtcttgccagagtgagttttacaatgaacgataagatcttggctctgactaaagttctttccatactggtcacatttataagatttttctcctaggtgagtgctgtgatggacatgaggatctgtatcatctgcaaaggccaccccacagttattacatgggaaaggctgtggtaatacatgggccgcattacgtttttcaaccgttgatttcatacccaagtttttcccacagttgggatgtctaccagggtcctctcctttacattcttgggactcatgatgatcacatgaggtccaactgaggctgtcatcatgctgagcacgtctgtacaatttctcttccatgtaaattcccttatatcttccctgagagttctggggctcggtcattatgttggctttcctccacgattctggggtaagaacctgtgtcaggctttgccatgctgtgatatcttgatttttgataatggcatttactacatagttttcattttcagaaatctgaagagaaatgcctgcccactcttcactgagggaaacatcttctaaatgtggggaacactcttcttgaaggttcacgatataatcctgactcacagttaaatcccggatcctttgtttccaaatctgccagcaatgaagcacttcttgcgaaaggtaacttaacccctttgcctgaagattcaaaatgttgtttttaatcccgtctcctaggagaagaaagagaatttggctaagagaacaagtcaatcatccatccagaggttttgagaaaatgaaatatgatggggtgggaagttgtccctgggttctattgacgtatgaaacaattagagccacggtaattctaacctgtgagctgccaattagaaatcaagtgttgtagggaaattaaaagaaatcttggccaggtgcagtggctcatgcctgtaacagcaacactttgagaggctgaggtgggaggatcactcaagcccaggagatcaacaccaggctgggcaatataatgagattcccatctctacaaaaaaattaaaaattggctcagttttgcctatgatcccagccacttggaaatctgaggttggaggattgcttaatcctgggaggcacaggttgcagtgagccaagactgtgccactgcactccagcctgggtgacagagcaagacctttccacccccacaccgcaaaaaggaataaaaggaaatcttaggaaaattttatgaaggaagaaattcacctccctgctataagagtagtcgataaaaagcctttaataatcttgctacaaaaggtatgggaaaggctcccattttatgtagtgtgtgtgtgtatataaataatacatattgatggagtgttttttatatgttgggcagagtaagggacacaaagggtcacaagaggtttcagaaacaagcaacaagtcctatctcctgatggcttcccttccttcaatcactgtcatatggaggactatcacgtatgtttgtgtacaacctgcacaactgtacatggtgagcctaaaggggatggggataaaaaggcaatggggattgaaatggggtaaacattgtgaaatatggtcctggcgttgtgcggggatgcgtatgtaaacctctgagacaagctttaagagacatcctttttattttccccaaggttctttgtcttcatgaaaagatagggaccactcagatcctacaatccatttccttaagttctgtccttttaagttattgcagaatctcaaacagccatgactatgagaatggggaacagatactgtggcactgtcaatggcctggcacccagggaagcaagactgtggtatataacaaacagggggctgaggcagaagaggatgatcatattcttgggatcctaagatgggttccaaaatggcatgaatatcatggtcaagtcccactggatactgcttctggttcaaggtcctttctgcatttttttattgaaagtgactttagtttataagatagtatcaggaaaagggagaccacgagctgccctgaatgggctttaagcagtggtttcccaattgttttgattgtaacccacagtaaaatcagcattatgactcagtaggaataggcacaaacatcaacagagactgctcactaaaacagaagttttatcagctgatacttacatacgatgtgcaatacacttcgataaattcttttgttttctgttctattaatctattttctttctttctttctttattattattatactttaagatttagggtacatgtgcacaatgtgcaggttagttacatatgtaaacatgtgccatgctggtgtgctgcacccactaacacgtcatctggcattgctagttatgacacagtaatttgatttcaggactcaccaagagggttttatcctgcagtttgagaaacaactgcagggatatgcagatttatgcaaaaggtcctgtgtctacagtttacactttggtttcaagaggttatttattaaaaacacaggacctagggccaaattaggatggctcaaatcctagttcttcttataagctgtgtgatcgtgggcaagttattaattctgtgactcagttgtttcgtccattgatatggtttggctgtgtccctacacaaatctcttcttgaattgtaactcccataattcccacgtgtcgtgtcccataattcccacatgtcagagcccccacacagagtccctactagggcactgcctattggagctgtgagaagagggccactgtccttcagaccccagaatgctagattcactgacagcttgcactgggtgcccagaaaagccacaaacactcaacaccagcccatgaaagcagccagaagggaggctatactctgcagagccacaggggtggagctgcccaagaccatggaaacccacctcttacatcagtgtgatcaggatgcaagacatagagtcaaaggagatcacttttgacttttaagatttgactgccctgttggatttcagacttgcatggggcctgtagcccctttgtttcggccaatttctcccatttggaagagctgtatttacacaatgcctgtacctgcactgtatctaggaagtaaataacttgtttttgattttacaggctcatagatggaagagacttggcttgtctccgatgagacaatggactgtggacttttgagttaatgctgaaatgagttaagactttgtgggactgttgggaggcatcattggctttgaaatgtaaggacatatgatttgggaggggccagtggtgggataatatggtctggctgtgtccccacccaaatctcatcttgaattgtaactcccaaaattcccatgtgtcatgagaggaacctggtagggggtgactgaattatgggggcgggtctttcctgtgttttctcatgatagtgaatgagtctcatgagatctgatggttttaaaaaggggagtttccagctgggcacggtggcttgcacctgtaatcccagcactttgggaggctgaggcgggtggatcacgaggtcaagagattgaggccatcttggccgacatggtgaaatcccgtctctactaataatacaaagattagctgggtgtggtggtgcatgcctgtagtcccagcaacttgggaggctgaggcaggagaattgcttgaacttgggaggtggaggttgcagtgagccaagatagcaccactgcactccagcctggctacagagccagactccatctcaaaaaaaaaaaaaaaagatttccctgcacaagctctcttctcttgtctgccaccatgtgagacatggctttcaccttccaccatgattgtgaggcctccccaggcacgtggaactgtaagtccagtacacgtctatcttttgtaaattgcccagtcttggatatgtctttatcagcagtgtgaaaacagagtaatacatccataaaagggggataataacagtaactatctgtattagtccattctcacgttgctaatgaagacatacccaagactgggtaatttataaaggaaagaggtttaattgactcatagttccatgtggctggggaggcctcacaatcatggcagaaggtgaaggaagagcaaagggacatcctacatggtggcaggcaaggagaaagcctgtgcaggagaacacccatttataaaaccatcagatctcatgagatttattcactctcatgagaacagcatgagaaagacccctgccccatgattcagttacctcctaccaggcccctcccacaacatatgggaattataggagctacaattcaagacgagacttgggtaggaacatagccaaaccaaatctgtatctcataaactaaacttaggtaacatataactgtatatgaacctctgagaaatgaaaaggagtttagatatttatcaaaaagtaatcaaataagccaacacttagattacacttactacataccagtaagtgttggctattgtaactgccaaccaaaccaaagttctcccttggttcctttaacaccggtttatccaaaacgttggataaacattggtttttttctccagaagcaaccaatagatcaaggcccttggtgatgtgtgaattttatcagtctcattctgagaaatatgaggaatgagagcctaaatgtgtgagtaggggagggagggcttacttcctgcactgaatgcccacaggccaggggtatgagatttggggagagctccctcacaaacccatcacaaggggccagatctgtaaaagctcattaactgtaggtttctaacctgcacatgcatctcttaggagttttctttccagtggccaaagtttctctttgtggtctaactggaatattctatctggtttgaaatgatgatttgaggaaacaggtccagtggtctgatgctcagttactcactcactaacatgaggttcctgaagttttccagcatcacatcttggtacaggtttatctgggctttatccaatagtgccagctcttccttggtgaagacaacagccacatccttgaatgtcaccctttcctaaaacatcaaccacatgccacgtcaatcatccacacaaatgactggtcttagtctgtttgggctgccttaataaaacaccacagtctgattagattaaacaaaataaacttatttcttcctgtcctggaggttggaaagtctaagatcaagtaccaccaagataggtttcattcaggtttcttctcttggcttgcagacagctctgctctcactgtgtccttacgtggcagagggagaatgagagcaagctctgttgaggctctcataaggacactaatcctattggatcagggattcccaaaggacagtattaatcaaattataaaatatggcccaggaaataggcacagataaatctatactaaggtgttgtgctgatacacaagtctagtagcatttcatgagttcatttctcatcacacaccaagatttagtattttcactttttcatggcagattaatctatttgtattatgttaaaaggaactaagaagacagggtaactaaaagcattggctcctagattcaaaaaacacaaaagagaaatgggagattattaggataattaagaacacttggatatcaactaggtattaaaaaatagtggtatcaatgtgaaatttcttgagtatgttagcagtaatgtggaaatgtaggaaaatgctcttattcttaggagatacaaactgaaatatttagggatgaattatagtaatgcctgcaatttatccccaactgggtcaatcaaataaaatatagacatgtgtgtgtatatacgtatattatacatatgtttgtgggtgattgttaacaattggtgaatctaggtgaagattacacattatgctattctttcgttttcctgataaattgaaatttctcaaaataaaaggatgcgggtaatcatctggtattaataaccatctcctcatgtgtcttttggcagcacaaatgtcttctttcgagaagtgtctgttcatatccttcacccactttttgatggggttgtttttttcttgtaaatttgtttgagttcattatagattctggatattagccctttgtcagatgagtagattgcaaacattttctcccattctgtaggttgcctgttcactctgatggtagtttcttttgctgtgcagaagctctttagtttaattagatcccatttgtcaattttggcttttgttgcatcatcactggccatcagagaaatgcaaatcaaaaccacaatgagataccatctcacaccagttagaatggcaatcattaaaaagtcaggaaacaacaggtgctggagaggatgtggagaaacagggacacttttacactgctggtgggactgtaaactagttcaaccattgtggaagtcagtgtggcaattcctcagggatctagaactagaaataccatttgacccagccatcccattactgggtatatacccaaaggattataaatcatgctgctataaatacacatgcacacgtatgtttattgcggcactattcacaatagcaaagacttggaaccaagccaaatgtccaacaacaatagactggattaagaaaatgtggcatatatacaccatggaatactatgcagccataaaaaaatgatgagttcatgtcctttgtagggacatagatgaaactggaaaccatcattctcagcaaactatcgcaaggataaaaaaccaaacaccacatgttctcactcataggtgggaattgaacaatgagaacacatggacacaggaaggggaacatcacacaccagggactgttgtggggtggggggagtggggagggatagcattatgagatatacctaatgttaaatgatgagttaatgggtgcagcacaccaacatggcacatgtatacatatgtaactaacctgcaggttgtgcacatgtaccctaaaacttaaagtataataaaaaaaaagaagtactgaaataacctattgggtattatgctgattacctgggtgacaaaattttacaccaaacccccgcaacacacaatttacccacgtaacaaacctgcacatgtatcccttgaatctaaaataaaagttggaaagaagaaaagaaaattttaaaaaattaaaaaaaccatctcctcatcaagaaaccaatttttacataaaatatttctatggctgcatatatcgcactgctcagagttaagtatttacagatatgttctctcaatagactctgcatctctaaataaagcagaggtttcaaacaaaagttgtaagcagttacaaaggacttcacaagaacatgttactaacaattgtccaattaccaaaatctgacaatgattaaaaacaaaatctaggggagtcagcacggttgtcctaatagcaccactctctcagtaacactactgtatgccttcttctgtgggaggcaacaaaattgaattggagataatcattcaggaaatacagatacactgaagcctacttggggtgttccaatgtaggaagaaggggttaggaatagaggttcacacagcctactcctcattctcccttctctgcctcagctatagagcctgggaaaacaaaacactcatttctccaccacccttgtagctggatggatcccttgtgggaatcctaggcagcgattgtcataggatgcagatacaaggacagccccaaaatgttaagaaaccaaatttataaatgaataaacacatgcaaaaatctttaaatcttttcctctatgaagtattcttgtataaccatctatgaagtatgaatctattcaagcatctggtgcttccacttacaagaaatactgtggatagagtaacacattgaaagacaccaaaaggaagcaaacaaatgcattccaaatgtaggaaagaacacaggacaccaaacttggttcctgcaacaagtcaatagcaggagagaataaagtagaggggcagatttctctagattaaaagacattatgagatacaacaactaactgtatgatagtatagaccttgttaagatcccatttgaacaaaccaactgttaaaaaaatttttgagataatcagggaaatttgattattgtctgggtattagataataccaaataattattgattatttcattagtccatttttaaggaaatatatactgaaatacacagagagtgtggtaagttagattgctgtttagaaatatcctcttccatgctctccaatcccactaaaggaccagagtgtgtttccttacccctttagttttgacttggcagtgtaacttgttctggctaccaaaatgaagcagaagtgataatgtgccagatctaaacctgggccttgacagatctcacatgtccacttgctctcttgtctctctgtcttcactatgaggacacacccaagctaaccaaaacgagcagagtgctaccaaatatccatggcattggctttaggtcgaggccataaccattgaggacgctgttacaggaggctggaaaaatggtgacctgggtgatgcagtggtgaacatttcgtgaactgttgctgtaatttagaagatagaaaatgtacctaatgaatcttggacttgggcaagatggtttccaggcagcaggataaaagtgtgaactcattcattttagttgcatatataataaggtactatacaaaagtgatatgctcagagaaaaaccaataccatgtgaaataccatgcctctttcaaatactttgggaaagaaaaaaactgaaaaagagattaagcaattctctttggcaaaaagttaattgttgaaactgcatgatgggtactgcaaatggaggatcataataccatttgctctttttgtgtattttcataattaatttttttcatgattaaaagaaaatccttcctccacactgtgatggtctttctaatgtgtcaacttggctaagctacagtcctcagttattgaatcaaacactaatctaggtattgctatgaagataatttgtagatgtgattaaagtccataatcagttgactttaagggagattattctaactaatctgagtatgtctgattcaataaactgaaaggtcttatgatcagagctgaggcttccctgggagggggagaaattccacccacagacagtagcttcagtctgtgtccaagagttccagcccacccttcctgaggggctgccctgtggattttggacttgcctagttagcccccataatcatataagtcaattccttatgataaatctcttaatatatatctcttactggttctgccttgctgactgaactctgaccaatacatacccattcaaatcttgctacttattgaatgaggccagtgacatttagagtatggtcatgtatatgctgcccatgcactcggatgctgcggcaacaccaaatttccgtaaaagtttctgaacttactcttgattctttttccctcatcgggcagtgataagcagttcatggactggtactgatacatgaactacacttagagtagcaccaaagtagacatcttgaaatctgtgagtttgtttcttcacttctataaagggagtcaaaccacctgcctcacaaagtcattatgagcagataaagtacctaatacatagtagtcactcaaaaaatgctgacctcctttcagaaaacagaagtgtctggttcctcagaatgaacagcatatttaaagagaaagaaacccttaacttacctggaacttaatcataccgtcttccttttggaaagggcaggattctggaaaagcagaactgcaaagaagaaataatccatgagatcatgggttcaacaagttgtgaatgaacattggttccttccttatctgtacaagtttctcacaatttctcctctcactagatatcatctcttctcgctctgaacagactaaactcccacctcctcaagacttccctagatttgtccccagtccctcaatctcagaccactgtgtaactcctatctctctcctgaagcttttgggtcaaaacctgcacattcttttccttttctgagacttgtgaatgaactgacataatctacatctcaattatgctggaaaagaggctccagaattgctgagtaagggagcaatctcagggctgggcacagtggctcacacctgtaatcccagcactttgggaacccgagacgggtggatcacttgaggccaggagttcgagaccagcctggacaacatggtgaaaccctgtctctactaaaaatacaaaattagctgggtgtggtggcggatgcctgtaatcccagctactcagaaggctgaggcaggacaatcacttgggaggcagaggctgcagtgagctgagattgcaccactacactccagcctgggcaacagagagacactttgtctcaaaagagaaaaaaaaaaaaaaacagaggagaaaaaaaagagagagcaatctcaggatgacagggaccttctgctatttccactttcgcatgcaagacttgatcttgtatggccaagcctgtggtctaaagaacatgccgttagccaagatatacaaattaaatcccaatttttattattatgttaatcaataatacaaatttttaaacatctacaccttgactcttggcttcctaaactatctctccagcacccattctatcccctgcttttgcaaatattgatggcacacctatgacatataagacacattctctgttctggaaatgctcatggtatactgaactacacatgttctcagactgcaggtagaccaaagtaggtagacagaggccttctaagcttgccacttcatatacactacagccccttcctgttctgcttatatcagtggattcccttgccagttagcttccagttgggttcagccaatggggaaagccagcaagagatccagggaagggacaagagtgaagtcagaatatttattcccccaggtttttccctagaggttgctgtggaatggctatgttccatatccattgaccaaaggtcatggcctccatcaggcagctgtcatcccataaatctttcttcaggttttagcaactgcctcctcccttagcccttcagtcctaaagtcagtaagttaccctgctatcactagctctgaaatattgcagtatcctttgttgattaccacagcctgcctacaactctatagattgtccctttattaagctcttctcaaattacccaatttgagtgttctgtttattttttattgggattccatctgataaaccctgtaaacacaattgcctctggcctttgtggagaaacttattgtataaaattgccactttaagcactgtggaaacaccgaagatgaaaaaacaaaagcccaaagccacgtttctgccttctcagatagtgcttctcacactatctgtgataaaggactagtttttaaattattattactgttactttcagtctgtcacagactgatattctggtaagatacagtaacaagaaattaccagaaaaaggaaattaagaaggtatgcaaattaaagcccaattgttattattatgttaatcaataagacaaaattttcaacatctacactcaagttctcaaattatctggtcacagaccaatatcatttattggcactggtctgttggctaccctttgaattgcagctcacagggttatagaatcaggttaatagaatatgaaatgtctttttggtaaatccttggactctttttctctcctttcctacctttaagagacatcattaatcacttcttattttgagctccaacaaaggccaaaataaggagggttcaactcattagtacagcatgaattacatcattttacaatagttaaaacctaccaaaaaaacactcctcctttcccctgtcaaaaaactacaaatcctaaaaaaaaaaaaaaaaaaccaagctgtagtcttttatccactgtacttggtaaggatcttatcatttaacaagcactcaatcaatgtttctcaatattaacaaatgcacaaatagaattggcttggatattatacattagatgcacgtgcaaagacataaactcaccctctacttccagtacctgttctcactgaagagccaataatgggacaggtttattttgaggcacacatccacacacatgcactcacacatatatggttgggggtttggtttcctgaatttctggcttcagacactacctgcctgtatcaagtcagggccgtggcacgaaccagatggcacattgaaatttgaggggagtttaataaacagacggcttacaatggtgttggctcggggtaaggaaatcacaatggataaggctctatcctggggagtgacagggaggtgccattataatacctgggccttaagaggtaaggggagggagcagtccctggagcctggaactaagaggactgtgtggccagggccacctaaactatgacctgttgtttagaagggcagctaatctgtgacaatcctgcagagagagaactgggggacaagatactccaactcacacttcttcctctctccaaactttcctgttgagacttcccattggccaaagacaagcaaggccagaaggcaatggcggcctttcagggcagacagcagggtggaaaaggtggggagccaaaggcatgggacacatggcacctcaagactcttgttttttccctatctgccaaagtccacacagctctctcacacaaatgcctttctcatccctcaccctgacaactactctgatctgaggaatgcatcaggaatgagaccagatgcccatatcaacctcttcagggaatgaagacctagaggaaaagtgcagctgaatctggaactgcaattgcccagaaacacgatcagaaatgtaataaatgctgctattacacctaaaataattaacactaaatctctaactttatcaaatatacagagagtgttcaaacttcaaatttgttgagtgtaatttaacaacttatatttgctaatgtgctttataatactcaaagtccctactccctggctcacagcatgtgaggtgagaatggagttaataatttggggcagttcttttcttttcttttttctttgagacagagtctggctctgtcgcccaggctggagtgcagtggcgtgatctcagctcactgcaagctccgcctcccgggttcacgccattctcctgcctcagcctcccgagtagctgggactacaggcgcctgccaccgcgcccggctaattttttgtaattgttttttgtagtagagacggggtttcaccgtgttagccaggatggtctcgatctcctgacctcgtgatccgcccactttggcctcccaaagtgctgggattacaggcgtgaggcaccgcgccaggcctgggacagttcttttcaaaatgtattcggtgacattaaactctggagttattacagtattacagtctgagttgtttctttattgccaaaagccagaacctctgccttgaagtcataaatgccccaatggagtcagagctgccaaaatccagagttcagacccaagacaactccccatccaagaacctaggggtgctgagccagaatcgcccccaccaaactgagcgagaacagcccaagccatcctctatatccagagactagctgcttaagcaaatccctcatcccattcagggacgcacagtccagccattactccaaaaccctgagccagcgcccctctgccctcatccagagatgcacatcccaagactgaccctaagcttcgacccgaagaggcacagcgcaagtcgctgtcacgaaacgtgaagatgcactgttttgtcaaacccagggctgctccccaaaccgagcccacgctcgagcccacgctcttcccatcctatcccgggtaggtcgggccgctgaacttccctagtctaccccacctacgaggccttatcattggttaccagtcccctcttccactcctcctacttcagtccacagggacgggtcacagctgcacatcctacacccctactcctggctacgcctccaagaggggcgcggtacagacgggactcaccccagcgtcccaaacaatgtcgcccgcagcgtgcgtccagtaccacggcgcatgcgcaaggaggcctatggcctacaatccccagaaagccccgcgcgcagcagtggccattcgcaaggctaccctggtgaaggtggcctttgacttccgtgcatttggaagtcctttgacttccgtgcattcgtctaaaataacgacaatcataataacgataaaataatgaaatgttaaataaatcactatcaacgatgaaaagaagtttcaatattttactacttggaaatgggcactttaccgttttagtgaagacttttataggttcttattttataggcatgtcttttaacgttaaaaccacgaaacttttcaattaacattcacttaaataattccctccccgccccccccatgttttatttctgttgatgaaaactctggataatctacacttgcgatataacatagccctgtaatttatttcctagtctcagaagaagcagaaggaattaacaactattgtctgaatccttaataggggaattgcaggagtactgagagtgtcctaaaagagacacattacaacataacaagaaaacgcgggaagttttcagattctttttgaaaatttgcccttgttgagacttaggctttattttacttcatgttattgcatttaagatttaagatttctattaaagaaaaatttgggtaccctaaatggggtaagaaaattgaataagaattccattagaggcccacagttttagcctggaggaaagccctgataacgtgtgagaacaatctgtctcctaggaaaggtcacctggtcctgctggcagaggctctgtttggaatatctggctggcattcccttttccacgcaccctcaagctgtaggggtggtgaggcggttccagtcctagactagatagagaagtgaagacccccacctctacgcaatgggcaggaaatggttgaataatatccaactatagcttgacatcgcagcttagggcacataaagggacagtgcaattgttttggcttatctctgtcttttgatgtttacatgtttgatgttcttatatattgctctaagttgaaggattacttgatttaatttgacatacttgaattttaaaaaacgagttcaggaacatttttatttttgacctaatacaaggttaatttttgtgacatctgtgtctgttggaaaacaatgtgtcttctctatcagatggatatgcatacatttatattttccccagacttgctaactgtgctatttaaatttcctacatgcttatttgtgcttacttagattttttcattatgcatctgtcaacgattgaaaagtgcatgtcaaaaaggttcccagtctgggcgtggtggctcaagcctgtaatctcagtactttgggaggccgaggtgggcagatcacgcggtgaggagttcaagaccagcctggccaaggtggtgaaaccccatcgctactaaaaatacaaaacttagccaggcatggtggcaagcacgtgtagtcccagctacttgggaggctgaggcaagagaatcacttgaacccaggaggtggaggttgcaatgagccgagatcatgccactgcactccagcctgggcgacagagcaagactctgtcaccaaaaaaaaagaaaaaagaaaaaagtgaaagaaaaaaaagcctataatggtaaatttgtcattttcctctctatagcatttgctttatttatttatttatttatttatttatttcctttattttttttttgagactgagtcttgctctgttgcccaggctggagtgcagtggcgccatctcaactcactgcaagctctgcctcccaggttcacaccattctcctgcttcagcctcccgagtagctgggactacaggtgcccgccaccaggcccagctaatttttttgtatttttagtagagacagggtttcaccgtgttagccaggatggtctccatctcctgaccttgtgatctgcccacctcggcctcccaaagtgctgggattacaggcgtgagccaccatgcccagcctgcttcatttttcaaaagtcaagttactaggtatacaaatggctttactttttaaaagttgtgttgttaggtatggaagtgttgtattccttatctgaaatacttgggaccagaagtgtttcagatattttatttttttcagattttgcaatatttgcatatacgtaatgagatatcttgaggatgagacccaagtctaaatgcaaaattcatttgtgttccatataaaccttatacatgtagcctgaaattaattttatagaattattttgaataattttgttcacaaggtttgtatacaatgtttgtgtgcattgaaccatcagaagcaaagattgccttcgtcagatgaccaaagaaaaatcaatgaaaagaacagaaagaaagcaaatacttcaggtgtggaattttccacttgtggtgtcatgttcacattccaaaagttttagattgtgaaacattttggattttaaaatttagtgatgctgaccctgtgtaagtttcataatggtcatatcttcttgatgggccaaaaatttcgttaacaattttaagtattttgtattttcaccttgagtttacttttcagtgaagactgtacctgctttcttttcattagatttcatctagtatttattctttcattttgtcttaaaattagtatatttctttaccttattatttatatactctttattatatagttatttttaaatgttacttttacctaatctaagagcttgtctttagtctgaaaatacacacttaaatgggtgtgttaagaacaaaagagaaagctcttgtataattgatctaggagctgctcatacttcccaactgtagaacagtgaatctggcctgtaatcctagttgctcaagcagctgaggtgggaggatggcttgagcctggaaggttcagggtgcagtgagctatgatggtgctactgtactccagcttgggtgacagcatgagatcttatgtctgaaaaaatagaacagtgaccctcaaacaggaatgaaatagcctccctaagacttttttgaattgtgtgagtgatctttgcttgctccagtgactggggtatgtgtttagtatgcagaggtaaggaatgctaaacatattgcacttgtaaattaattctctcaacaaagaagtcatccattcaaaatacccaacagtaaccccttgaaaatcactgctctaaaggaaagaaaatgaacaacaataacctcaatcaaataaaaggagggaaagaaacaatcaaatcagtaaagagaaagtcaaactgctgctgtttgctgatgatatgatcatatacctagaaaaccctaaagactccttcaaaaagcttctagaactcataaatgaattcagcaaagtttcaggatacaaaattaatgtacacaaatcatagctctgttgtacaccaaaagcaaccaagctaagaatgaaatcaagaactcaaccccttttacaacagctgcaacaaaaaatacataggaatatttctaaccaaggaggtgaaagacctctctacaaggaaaactacaaaacactgttgaaagaaaccatagatgacacaaacaaatggaaacacatcccatgtttatgaatgggtaaatcaatattgtaaaaatgaccatactgccaaaagctgtttacaaattcaatgcaagttccatcaaaataccaccatcattctttccagaactagaaaagacaattctaaaattcatatggaaccaaagaagagcccgcagagccaaagcaagactaagtaaaaagaacaagtctggaggcatcacattacctgacttcaaactatactataaggttgtagccacccaaacagcatggtactggtataaaaataggtacaaagaccaatggaacagaatagagaacccagaaataaatccaaatacttacagccaactgatatttgaaaaaacaaacaaaaacataaagtgaggaaaagacctcctattcaggcggggcgcggtggctcacgcctgtaatcccagcactttgggaggccgaggcgggtggatcacaagatcaggagatcgagaccatcctggctaaggcggtgaaaccccgtctccactaaaaatacaaaaaattagcctggcgctgtggcgggggcctgtagtcccggctactcaggaggctgaggcaggagaatgatgtgaacctgggaggcggagcctgcagtgagccgagatcgcaccactgccctccagcctgggtgacccagcgagactctgtctcaaaaaaaaaaaaaacaaaaaaaacaaaacaacaacaacaacaacaaaaaccgtattcaacaaatggtgctgggataattggcaagccacatgtagaagaatgtgactggatcctcatctctcaccttatgcaaaagtcaactcaagatggatcaaaaacttaaaacttgaaaccataaaaattccagaaaataacatcagaaaaacccttcaaaacattagcttaggcaaagacttgatgaccaagaacccaaaagcaaattcaacagaaaaaatgataaataggtgggacttaatttaactaaaaattttctgcacagcaaaagaaacactgagcagaataaacagacaacccacaaaggggagaaaatcttcacaatccatacatctgaaaaaggatgaatattcagaatcttcaaggaactcaaacaaattagcaagaaaaatacaaagaatcccatcaaaaaatgggctaaggacatgaatagacaatccttaaaagaagatatacaaatagccaacaaacatatgaaaaaatgctcaacatcacgaatgatcagggaagtgcaaatcagaaacacaatgcaataccaccttacagctgcaagaatggccataataaaagatttaaaaaataatagatgttggtggggctgtggtgaaaagggaacacttttacactgctggtgggaatgtaaactagtgcaaccactatggaaaacagtgtggcaattccttaaagaactaaaagtagaactaccatttgattcaacaattccactactgggtatctacccagaggaaaagaagtcattatatgaaaaagatagttgcacacacgtttatagcaacataataagatgttttataaatataagtgatgaaatccctctattgaaagtttattagagttcatcagcattgatatcatctctcaaaattaaaaaaaaagttttcttttgttgtttgttttggtttttgtttgtttgttttgatgcatggtcttgctctattgcatatatatatatatgtatatatgaatgctattccacaataaagaggaacaaattaatgccattcatagcaacttggatggaattggagaccattattcttagtgaaataactcaggaatagaaaaccaaatattgtttgttctcactcataagtgggagttaagctatgaggatgcaaaggcataagaatgatacaatggacttcagggatggaggggagggaaggatgggagaggggtgaaggaagaaagactacaaattgggtacagtgtatactgctcaggtgatgggtgcaccaaaatctcacacatcaccgctaaagaacttattcgtgtaaccaaatgcaacctgtttctcaaaatcctattaaaataaaaataaatcaaaaaattaaaagccattgcaaataaagacaaaatcagatgttttataaatataagtgataaaatttctctattaaaagtttatagagttcatcagtgttgatattatctttccaaattaaaaaatgttttgtttgttgtttgttttggtttttgtttgtttgtactgatgcatggtcttgctctgttgcttactgcagcctcaacttcctaggcatgagtaatcctcccacctcagtgtcccaagtaagtggaactacaggtgtgcaccatcatgcctaactgatttttaaaaattttcttatagagatagagtctcactgtgttgcctaggctggtctgaaacatgtgtgttcaaacaatcctcccagcttggacagaaaaaatgttggaattacaggcacaagccatcatgtctggacagaattttttttttttttttttttttttttgagacggagcctcttgctcttttgcccaggctggagtgcaatggcgcgatcttggctcactgcaagctctgcctcccgggttcacgccattctcctgcctcagcctccccagtagctgggactacaggtgcccacctccacgcccggctaatttttttgtatttttagtagagacgggttttcaccatgttagccaggatggtctcaatctcccaacctcgtgatccaaccgccttggcctcccaaagtgctgggattacaggcgtgagccactgcgtgcggtgtaaaaatttttttaattaaaaattaaataattaaaaagtggatgaaagacataacaaggcagtgaaatgaaaaatgacgaaaaggcatcaactatgaccaccttgttatcacaaaaatgaaaaccaacatcatttttacatatcaagttcacaaagattaaacataaatcccttgatcctcaatagtgtgaaaaaatggacacgtttacattttaggctgacagaaaaaaacaaaaacagtttttcctccgctctcacatcacaacaatcaacacagaagatttctgtgacgatatgtctagggatttctctcggtcagtcaagcacacaatccattctgctgtggacagcagctgggtgtcttctaattcatttatgacacaatctaactggacatagcattagattccacagggctcagttccgcaagactggcctcccactctaataacaatggcaagccatacgttgttttacctatgctttcatcaactagctataaatcaggtttccaccgctccctattttagttgcattactttcctcgaacagctcacagcacgcagggaaacactgacatttacaactttaccatagcggatattgcaaaaaatccagaaaaaaagattcatgggtcctggcagggggaaggggcgcactactttccaggaagttttacccagaagctctctaaacccagtccttttgagtttctatgaaggcttcactctataggcatgataggttaagccatacgctattggtgatcaactcaaccttcaggcactcaaccctcctggaaaatggggttcaggcactgccattctcagtctgaataatagaatttacataaacagaattttacaacagattagcataactgaaaactgaattagatgattgaattatctggagccacaccttgatattcctaatccaatcaccctcatccaatgaatgctccacccaactggccccgaagtatctagatggttccagagcagaagaatgtttatacaacgcatatctcccctttttctcaaaagtcgtttcgcttacacgggtaattcttaaactgccatgcatcagggtcagggggagggcttgttacaacacagatctgtggatctccggggtttgagggttgcaaggatgctgctggtgtcaaaaccacaatgtgagaaccacagaaccactagatggttttcagtgtttcagtgcatttaattcataatatatttcaccaataaaacttgtaagttcttagattgtcccaaatgtggcgcatgaaatcaaatcaggagaacagtttcctacgcggtgtaacctgggaaagttgggggtgactgatggaaaggaggagtgaagctccgccctttccgctgccaggctgcgccagcccgaggctatttaaacccaccctggcgggcctgtactcagatcttcgcagagcggagcagcggccggagcgttttgcgggctctagcgtggacttggagcttacagcgtcttgcgacttggaagcggattcagaggacaggacagaacacttgggtaagtgaatctctgtctgtctgtctgtctgtttgtctcattggttggtttatttccattttcttaaggagcacatatttcacctcacacacacacggacacacacacacacacacacacacacacacactccttctttctgcgggttagaaaactggtaggcttctctgggagctacaggtttcctaatcatgtctgcacctaagaacagtagggtcttgtctggctcttcttatgaaccgtcccccagcccggactccccaagatccatgctagcctcacccagcttctccctctcccctctcagaaactcagacttaagaggaagctcctcaccagggatccggagctaccgttcaccctcccctagggcttcaccacactcacctctgtcatcaccagaatcccacaagctcccatttccctttcctcaaccgtgatgggcaatcaatgaagccattgggttctcccgcgtcctcctctggggattctttagaatcaccacgttcatcaataatataccacatgttcttactgccatcacccagcagctcacccccggctctctgggaatctcctgtgcctcccagccactctccgaacaaccccggatttcagctggagtcagccccccacacccaggaatcacctacaaactcacgagcctcacggtgctcctcccctgtgtctttcatctcttcacccccaggcctcagggactctcctgtgcctaccagttactctccagccatccccaggtttctgcgggagtcagcctcatgcacccaggagtcccccagagactcacacgtctcgggagattatgagcggtcccccagccctgactcctcaagattcatgcctgcctcacccagcttctccctctcccctcccagaaactcagacccaaggggcagctcctcgccagggatgtggaagtactctacatcatcccgcagggcttcaccactctcacatccatcatcaacagaatttcacaactttacatttccctttcctgaccaagcaggacaatcactgatgtcattgtgctctcccggacaatcactgatgtcattgtgctctcccgtgtcctcctctggagattcttcacagtcacctcattcatcaataatataccatatgttcttactgccatcatccagcagctcacccccagccatcaatgactctcctgtctgtcccagctactctccaactacgcccagatttcagcgggagtcggtctcccactccccagaaacacctacaaactcacagacctcagtgagatcctcgccagtctctctcatgtcttcacccccaagccttacggactctcctgtctgtcccagctactctccaaccacgcccacatttcagcgggggtcattttcaggaacccagggatcactaccaagctcaccactttcactgagttactccccagtctctagcaggtctttatccccaagcctcagggactctcctgtccgtcccagctactctccaaccacgcccagattgcagctggagtcagttccaggcaccctggaatcaccaccaaactcaccaatttcactcaattactccccagtctctctcatgtcttcaccagccctcagggactctcctgtgtgccccagctactctcataccacgcccacatttcagcaggagtcacttccaggcacccagaaatcaccaccaaactcaccaatttcactcacttactctccagtctctctcatgtcttcaccagccctcagggactctcctgtctgtcccggctactctccaaccacgcccagattgcagctggagtcagttccaggcaccccggaatcaccaccaaactcaccagtttcactgagttactccccggtctctctcatgtcttcacccccagccctcagggactctcctgtgtgtcccagctactctccaaccacgcccagatttcagcgggagtcagttgcaggcacccaggaatcacctacaaactcaccagtttcactgagttactccccagtctctctcaagtcttcaccgccagcctcctgggactctcctgtctgtcccacctactctcccgccacgcccagatttcagcgggagtcagcctcctacactcaggaatcacctacagactcacagacctcactgagatcctccctggtctctctcagctctttgccctcagcccacagggactgttgtgtctctttcagctactctcaaaacttctctagattcccgctggagtcagttccaggcacccaggacacaccagcaaactcaccaatttcactcagttactccccagtctcgctcatgttttcacccccagccctcagggactgttctgtctctctcagttactctccaaccatctccagatttcagctggagtcagcttcccacacccaggaatcacctacaaactcacggaccttactgccaccctcccccatttatttcacctcttcacccccagccttcagggactctcctgtgtctcccagcttctctctggccttccccagatttctgccgcggtcagccccaggcacccaggagaaccctagacactcacaggcctcacgagactatttccctgtgacctgtatctatacaggggtggctcccacgtatccctcagtgaccccaaacccatctccacttacactcagacactcccagggcctgacagctactccccgttattgtccttcagttggaagccctggccaatctactagccaacatgacgcagttacctggccatttctccacattcctggtgagcgccccacacccagccgcagaaaagcccctcctgcattccgtcctcacacacaggcctgtccatctgcttgctactgtcacactcttgccagcagaagaggcccctctaatggccgatatcaccgcccaggctatcctcaccccacagctgtgcagcgggaccctcctgctggcccacgtggctgccagagcccatgctgacaccaacctccagcatgtcggcatccctgcgggcgacactaccggtgacatggccagcatgaccctcctccctggcagtgacactgttgatgtgagccccagtttcagatctgtcatttgtaaataggaccattttcccttttctctctcgcttccattcacagggcttttcattctctctgtttctgcctccgtttcagatatttactcacctttttctctttcactatgtctgccgtggtctcgacgagagtgcgccacataagattcccccattaaaagtcatgaattgagtggcttttagtatacttgtggttgtgcacgttcaattttaattcgcaatccatttgagaacattttatcacccccgaccagagaaaaaccctctaaacgtcagtcactcctcattctgtctgaaactctctccctgaccctcaaccctaggtaacaactacatagagcgctcaaccctatctccttagatttccatattgtggacatttcctatcaacagaattataacatatgtgaacttttatgaccgactttacacttagcacaatattttcaaggttcatccacattgtagcattacccacagtgggaaaccatttttttttttttttttttttggttttagtaacaccaggtgttttctccttccttctttccttccttccttccttccttccttccttccttcctcccttcctcctatttctctcttactccttctgccctctctctttcacatgccttcggtgcatcctactttctgtgtgtttttgggaaatcctcgacagttgcaggaaaattgtgttattgttattatttaccggtatctctctttcatggttctccatcagttgtaaacatctactggtttctcccaagtcactaagtatattttaatgaggtacacctgtttttctttatacagctatttctggagtgtagggtcacatactgataaacccaatgtgacccaaaaacgcatctaataccccaataaacccatcataaagttgaaaaatcataaatcaaaccatcataagtcacggtttgtccgtggatatgggcttcatcaattccattgtattcaataatgctctgcacgattaacaatggcagactgatagggagtggatactgatagcattttaaaaatcagttattagagggatactttaacctgactgaataactgatctaattgtattagtacggtgaataattatgtgaaatgttttgagacagtgtagtacatttgtgaatgaaattttgtggcttttttccacttagtaggaacctttgtgtgtagaaaactgagaagattgctttctgctgtagagtctggcattcgttgtagattaaagcttatttttctgcgaataagccatagtcaataaaatactattctttaaaaaaataaaaaacactggtgatgtgaagtcattatcctcagcaaactaatccatgaacagaaaaccaaaaccacattttcacctataatgggagctgaaaaatgagaacacatggacacaggaaggggaacaacacacactggtgcctttcgggaagcagagcgttaagaaaaacagctaatgcatgctgggcttaatccctaggtgatgggtcgacaggtgcagcaaaccaccatggcacacgtttacctttgtaacaaatctgcacatcctgcacatataccccagaacttagaaacaaaacgaaacaaatcaaaaggaaaaaacaataacaaaacgctagtggcaaaataaagtttcaaactgagaaagcgatagagcaatttttggttgaaatcatggttctcaacccaggtgccataaggtcaggataaagaatttgattacgtattgtaaataagacgtacagcaaatgactagaaaaattattctcaacatatatgtgccttctaattcaatgatgacgctatctaccgggacatagcattagattccaaagggctcagtcccgcaagactggcctccctctctaataacaatgggaagccctatgttgttttacctgtgcttcttagcaactggctataaatcaggtttccaccactccctgttgtaattgcattaatttgctggaagagctcacagcacgcagggaaatacttccatttaccattttatgatagcggatattgcaaaaaatttagaaaacagattatgggcctggcatgtggggaggggcgcactgccttccaggaagtgttatccagaagctctctaaacccagtccttttgggtttttacggagacctcattctataggcatgatgggttaaaccataggcgattggtgatcagctcaacctgaggctctcaaccctccctggaaattggggttgaggcattgccattctcagtctgagtagaagaatttacacaaacggaattttaagacagattagcaaaactgaaaactgaattagatgattgaattatctggagccacaccttgatattcctaacccgagcaccctcatccaacgaatgctccacccaactggctcctaagtctccacgtggttccagagcaaaagaatgttcctacaacgcatatctcccctttttcttcaaagtcttttcgcttacacgggtaattcttaaactgccatgcatcagggtcagggggagggcttgttacaacacagatctgtggatctccggggtttgagggttgcaaggatgctgctggtgtcaaaaccacaatgtgagaaccacagaaccactagatggttttcagtgtttcagtgcatttaattcataatatatttggccaaaaaaactcgtaagttcttagattgtcccaaatgtggcgcatgaaatcaaatcaggagaacagtttcctactcggtgtaacctgggaaagttgggggtgactgatggaaaggaggagtgaagctccgccctttccgctgccaggctgcgcccgcccgaggctatttaaacccaccctggcgggcctgtactcagatcttcacagagcggagcagcggccggagcgttttgcgggctctgcgtggacttggagcttacagcgtcttgcgacttggaagcggattcagaggacaggacagaacacttgggtaagtgaatctctgtctgtctgtctcattggttggtttatttccattttcttaaggaacccatacctcacaccacacacaaacacacacacacacacacacaaacacacacccactccttctttctgcaagttagaaaattggtaggcgtccctgggagctacaggtttcctaatcatgtgtgcacctaagaacagtagggtcttgtctggctcttcttatgaaccgtcccccagcccggactccccaagatccatgctagcctcacccagcttctccctctcccctctcagaaactcagacttaagaggaagcttctcaccagggatccggggctaccattcaccatcccctagggcttcaccacactcacctctgtcatcaccagaatcccacaagctcccatttccctttcctcaccatgatgggcaatcaatgaagccattgggctctcccgtgtcctcctctgggcattctttagaatcaccacgttcatcaataatataccacatgttcttactgccgtcacccagcagctcacccccagctctcgggcactcttctgtgtctcccagctcctcgccagacaaaccagatttctgacccagtcagcctgccgcacccacgaagccgagagacacttacagacctcactggcatcctcccctatgtctcccatctcatcacccccagccccatgctcttaacactgaactatctatgtctcatatatacagcagcaaaacaaaaccagagaaagtggaaagcagataatacagaaaaaacagaggtgaatgaaatgaaaaatataattttctgggaatatatagagaacgcaaatatatttaacaagcagtataaatgctaaataaaactacaacctcagaagaaaccttaggttaatccccaaataggaaatctattctgaatgctctaagagggaaataacaccaaccttcaatgaggtgattattacaataaacttttccagagagcagaacgcgctaggagcttcttattatattactaccacaaatcctagtataattttgataaccaaattataccataatagaacaacaacaactacaacaacaacaaataaagccagaaaactaaaggaaaatgtttcaacgaataggactgcaaaattgtatgaaaagcagcaaacaaaatccagcaatatattgaaatttttacagtacaacagtaatgcatggaaattaatcattactacatttagcaatataaatcatcatattaagaaatattactttctaaaacatatcaccatgaaaataaatgtcaatcaacagtttgaaagtaattttcttgttaatatatataacaggaaaaaagatcaaaacctagaaaaaatacacaaaaagagttcatagataagatgaatacctaaacagaaagaaacaaggagtaaatagcaagggaaatacaaaggaataagcttataagaggatgaagagtcagggagatgtggctaacacccgtgatcccatcactttgggaggccaaggcaggagaatcacttgagcccaggattttgagacaagcctgggcaacatagtgagacctcgactccacaaaaaaaataaaagaaaattatcaggtgcagtggtgcacacctgtagttgcagctactcaagaggctgaggatctcttgaggctctgatccgaccatagcactaaagcctgggtgacaggctgagatcctttctcaaaaaaaaaaaaaaagaaaaaaaaaagaggatggccaatatctcctacctggaaaaattcacataacgtaatgccataattgttcacctgatggaaaaaaataaaaggattaataagagccaggtttttttgtttgtttttcttttcacatggagtcttgctctttcacccaggctggagtgcagtggcttccgcctcagcctcctgagtagctgggactacaggcgcccaccaccacacccggctaatttttctactatcagtagagacggggcttcacaatgttggccaggatggtctcgatctcttgatctcgtgattcacccgcctcagcctcccaaagtgctgggattacaggtgtgagccattgcgcccggcctaaaatttttttttaattaaaaattaaataactaaaaaatgggtgaaagacatgacaaggcagtgaaaagaaaaatgacaaaaacacatcaactatgaccaccttgactgttagcaataaaatgaaaaccaacatcctttttatatatcaagttgacaaagattaaacatttttattataaatcatgtgatcctaaatagtgtgagaaaatagacccttttacattttaggctcagcgaaaaaaacaaaaactgtttttcctctgctctcacatcacaacaatcaacacagaagattcctgtgacaacatgtctggggatttctctcggtcagtcaagcacacaatccattctgctgtggacgccagctgggtgtcttctaattcaatgatgacactatctacctggccatagcattagattccacagggctcagttctgcaagactcgcctcccactgtaataacaatggcaagtcctatgttgttttacctgtgcttctgaccaactgggtataaatcaggtttccaccactccctgtttcagttgaattaatttgctagaacagctcacaccacacagggaaacacttacatttaccattttattatagaggatgttgcaaaaaattcagaaaaaaagattcatggggcctggcatggggggaggggtgcactaccttccaggaagttttatccagaagccctataaacccagtccttttttgtttttatggaggcttcattacataggcatgatgggttaaaccatcggctattggtgatcaactcaacctcaggctctcaaccctccctggaaattggggttgaggcattgccattcttggtctgagtaatagaatttacataaacggaattttaaaacagattagcataactgaaaacttaattagatggtctaattatctggagccacaccttgatattcctaacctcaccaccctcatcctatgaatgctccacccacctggccccaaagtctctacatggttccagagcagaagaatgtttatacaatgcatatctccactttttcttaaaagtctttttgcttacatgggtaattcttaaactgccatacatcagggtcagggggaaggcttgagagaacctagatttgtggatctccggggcttgagggttgcaaggatgctgctggtctcaaaaccacaacgtgagaaccacagcactagatagttttcaatgcatttaattaataatatatttggccaacaaaatttctaatttcttagattgtcccaaatgcgtcacatgacatcaaatcaggagagcagtttcctaggagatggagcctggaaaagttgggggagacacatgaaaggaggagtgaagctccgccctttctgctgccaggctgcacctgaggctatttaaacccaccctggcgggcctgtgcccagatcttcccagagcagagcagtggctgcagtgtcactgcaatggccaccactgccagaatggtgttacatcagtctattcaaaaggctcattttgttaatgattggcaagccaattccacccaaatgtggaattctcaacaaggcattgatcaaaaattggctaatcaaattaattatttaagacagtctgttacttggcttggagattgggtagtgagtctcaaacatcgaatgcaaatgcagtgtgattggaacacttcagatttctgtatcaccccatgttcctataaagagactgatcattcatggtaaatggtcaaaggacaccttctgggtagggaagataatttatcatttaatttaagataaattaaagaaacaaatttttgaagcttctcaagctcacttatccattgtgcctggagctgaggtgttagatcaggtggcagaaaatctttatggattaaaccccatgacttggattaagtctattgggggctcctctgcagtagaattttggaaatatgtttctctgtttaatcagcttgtctttagtgtgtggaaccagtcaaagaatcctgagtcaaaattgagagaacgaacaagccttcatcaccttggcacatttatataaaaaaaaaaaaaaaatgggagagatgttgcgggaagtcagggactccgaatgttgggacaggctgaagccatggcagaagaacataaattgtgaatatttcatggacgtttatcatttccccaatcaatactcctgttttttcctatgcctgtctttaatctcttaatcctgtcatcttcgtaaactgaggatgaatgtcgcctctggaccctgtgatgattgcattatctgcacaaattgtttaaaaaatatgaaatctgggcaccttgaaaaaagaacaggataacagtgatgttcagggaataagggagataaccattagatctggctgcctgagagccaggcagaacacagccatatttctcttctttcaaaagcaaataggagaaatattgctgaattctttttctcagcaaggaacagccctgagaaagggaatgcgttcctaggggtaggcctctgaaattgcagctctggggacgtctgtcttttatggttgcagataagggatgaaataagccctggtctcccgttgcactcccaggccaattaggatgaggaaattcccgcctaataaattttggtcagaccggttgtctgctctcaaaccatgtctcctgataaatgttatcaatgacaatgcatgcccaaaacttcattagcaattttaattttgccccagtcctgtgatctcaccctgcctccatttgtgttgtgatattttattaccttgtgaagtatgtgatctctgcgacccacactctattcgtacactacctccacttttgaaaatcactaataaaaacttgctggttttgcggcttggaggtgcatcacggaacctgccaacatgtgatgtctcccccagacacccagctttaaaaatttctctctttgtactctttccctttatttctcagaccggccaacacttagggaaaatagaaaaggactcttgttgaatcatcatgggtgggttcccccagtgcataggtatacatgggccatggtgatttgctgtatgcatcaacccatcatctacatgtgccatggtgatttgctgcacacatcaacccatcatctacattaggtatttctcctaatgctatccctccccttgccctccacccaccaacaggccccggtgtgtgatgttcccttcccagtgcccatatgttctcattgttcaactcccacttatgagtgagaatatgcagtgtttggttttctgttcctgtgttagtttcctgagattgatggtttccagcttcatccatgtccctgcaaaggacatgaactcattcttttttatggctgcatagtattccatggtgtatatgtgccatattttctttatccagtctatgattgatgggcatctgggttggttccaagtctttgctattatgaatagtgctgcaataaacatacacgtgcattcatctttatagtagaatgatttataatcctttgggtatgtacccagtaatgggattgctgggtcaaatggtatttctggttctagatccttgaggaattgccacactgtcttccacaatggttcaactaattgacactcccaccaacagtgtaaaagcattactatttttccacattctctccagcatctgttgtttcctgactttttaatgatcgccattctaactggcatcagaatgtatctcattgtggttttgatttacatttctctaatgacccatgatgatgggctttctttcatatgtttgttggccgcataaatgtcttcttttgagaagtgtttgttcatatcctttgcccactttttgatggggttgttttttgcctgtaagtttgtttaagttccttgtcgattttggatattagacccttgtcagatgggtagcttgcaaaaattttctcccattctgtaggttgccagatcactctgatgatagtttcttctgctgtgcagaagctctttaatttgattagatcccatttgttaattttggcttttgttgcaattgctattggtgttttagtcatgaagtctttgcccatgcctatgtcctgaatggtatggcctaggtttatttctagcgtttttatggttttgggttttacatttaagtctttaatcaatcttgagttaatttttgtataaggtgtaatgaaggggttcagtttctattttctgcacatgtctagccagttttcccagcaccattaaatagggaatcctttccccattgctttttttgtcaggtttatcaagatcagatggttgtagatgtgtggtgttatttctgaggtctctgctctgtaccattggtctatatatctgttttggtaccagtaccatgctgttttggttactgtagccttgtagtatagtttgaagtcaggtagcctgatgcctcctctagctttgttctttttgcttaggattgtcttggctatacaggctcttttttgattctatatgaaatttaaagtagttttttctaattctgcaaagaaagtcagtggtaccttgatggaaatagcattgaatctataaattactgtgggcagtatggtggccattctcttgatattgattcttcctatccatgagcatggagtgtttttccatttgtttgtgtcctctcttatttccttgggcagttgtttgtagttctccttgaagaagtccttcacatcccttgtaagttgtattcctaggtattttattctctttctagcaattgtgaatgggagttcactcatgatttggctgtttgtctattgttggtggataggaatgcttgtgaattttgcatgttgattttgtatcctgagactttgctgaagttgcttatcagcttaaggagtttttgggctgagatgatggggtttcctacatatacaattatgtcatatgcaaacagaaacaattagacttcctctcttcctatttgaatatgctttatttctttctcttgcctgattgccccagccagaacttccaatactatgttgaataggagtggtgagagagaacatccttgtcttgtgctggttttcaaagggaatgcttccagattttgcccatttcatatgatattgcctatgggtttgtcataaatatctcactattttcagatatgttccatcaatacctagtttattgagatttttttttagcatgaagggatattcaattttatctaaggcctttcttcatctattgagataatcatgtggtttttgtcattggttctgtttatgttatggattatgattattgatttgcgtatgttgaaccagccttgcatcccagggatgaagctgactcgattgtggttgataagctttttgatgtgctgctgaatttggtttgccagtattttatggaggatttccgcattgatgttcatcagggatattggcctgaaattttctttttttgttgtatctctgccaggttttggtttgagggtgatgctggcctcataacatgggttatggaggaatccctctttttctattgtttataatagtttcagaaggaatggtaccagctcctctttgtagaattcggtagaatttggctgtaaatccatctggtcctgggctattttggtgggagactattaattactgccttaatttcagaaattgttattggtctactcagggattcgacttcttcctggtttagtcttgggaggatttacatgtccaggaatttttccatttcttctagattttctatttatttgtgtagaggtatttatagtattctctgatggtaatttgtatttctgtgggatcagtggtgatatcctgtttataatttttcgttgtgtctatttgattcttctctcttttcttcttcattagtgtagctagttgtccatgtaattttgttaatcttttcaaaaaaccaggtcctggattcattgatttttttgaagaatatttcatgtctctatctccttcagttctgctctgatcttagttatttcttgccttctgctagcttttgaatttgtttgctgttgcttctctagttcttttaattgtgatgttaaggtgttgataggaaggctgggcaccttcctatcaggtagatggtctagagctccagacagcaccaactcctcctcatggcctctttctcctcctacaactcttcattctcaagcctcagccctttcccgagataggaaggacaagaccatgtttcaggttggttgttttctcttgtgaaataccacctcaggcatcagaaagcaaacatacctcccccgctggtaaaaggaaaaagagtgaaaatgtattgtgtgaatacattacatttctatgtgaggcagagtgtgtgattctgttttagagatgaagaaaggaatggtggatctcagacttaaacccaggtcagtacgacttcatgatctgcctttctgctctgcttgctgcctgcctatgatagcttcatgcaagggcccatgcccagattatgcagagagatgactcttaatggttgcactcttagtggttaaaatagggtctgacatagtatctattgactggccaaatgtcagtagtagccattcgagaggctgaatgtgatatacagtcactcctgatggccaaattgcacaatcccatgttacactgtgactctggggttcagtgcaacaggcttaggtgttttcggtattcttagcaacacatctggatgcaagagattgctcaagtcatcttaaaggcatagtgttacttcacaaagcccttattatacttgagatatgtgcattcaggctgacgactgtcctgaagtctagttgcaacttgtttagatccacaaatgcttctgggatattggtatcctttgtatctgaacccaccttaccaaacggccacatcaacttcttggtaggacacaatgttactatcagcatgaaccttatattctgaccagacccatctcccctaccaacccactccagttagagacaacttgcttaatatctgtctctatgtactaccagattttatttccaatgttgtccccacagacgggctgcttttacaactctgcaaatccccttaaacttgtattaacctttctaccatatagcattaaaaaaaatgacaccagagagtaacacctcattttatctcatagaaggcactgaattcctacccctacagtaacccattgcacaacagttgcagctttctctccttaactgtctgtataccttactgccactgaaatcctagcagctgggtggcacctgagtaaactttaggcaaccccgtgagacctcaaggactgcagaccccaaagtagaaaagagacaacacaagtgcacaaggcagactcactgttggcatgtccatcctatccacattagtctcccatgattacataggtggtgtggttttaagatgtgacccctccccttaagtgtagcctagacttagtactcatgaatatagcagaagtgatggtgacttaagagactgggtcataaaaggcaccctggcttctcgcttgctctctcctttctgattacttactcagggggatgtcagttgctacaagatgaaggcctttagccctgggaggcccacaaggtgagaaactgagacctctattaacagccagcaaggaactgaaggctcctgcctgaagtgatcttgggagcagaccttgtaggccccattccagcattcagatgactgcagcccctgccaacatttgacagctgcctccagaacactgggggagatactgcccagaatttgaggagtctgctgacaacctctgggaatacagaatgagttaaacttttcagccacaaactttgaggtctgaggggtgtctgcatttgttctgttggccataaaaccctacatcccaagtgactctgctgcagttccataaattacttttcatccctaccccttgcccccttctgaaaccttatttcccacggtaaatactttggttatctatatataaagtgcctgttccccacctcttgacatgtcttctctctttggcagctccaggcagcagaaggctcagaccagagcagacccaggtctcctgagtcaccaagacagagagcttatcctggaggaacacatgatggtgtgctgccctctacaaaaccaggcttgtgggctcactagttcaagaaggcaggactgaaaaatggaaacaccgtggctcctaattatctagactgcctcatctcctaccagccagcaaaaatgatgtagcctctgagagtatttacatcactcatttgtatgccttatctttggtacagggagttgggtgaacaggagaaaaagccaaaaaagttatagaggttacaacatgaatctttaatcataagggattgttccatcaggctaatttataaaaaatagctctactgttattataaaactgaaagatactttgttacaaagtgaaatacataaaagtacaacatatgtattatacattcagaatcccaccactagagataagtagttatatgtcctctcccacatctttttttctctgttgctctaaacatacacacagaaaaacatactaacaaaatggggtcatgctataattgttgttctaaaactctcctggttcactaaatacttcatgagcaacctgcattgtcattatctgtgtgcctgaagatttctagtggctttccattgcatacatatgcctgaacttacctaaaaaatttcctaccaatggaaactggaatattaacatttgctattttaaaaatgttttaaatttaaaaactccgccttctgcatgcgtttttgcccaagtgggcaactatctcccaagtatcaattactacatatttactgccacttcaaaggttatagaaattgaattgatacgttaatgaattcttttgaaaacaatgcacggattttctctctcaccaataagtacataagacttattacgtccatttttgcactgctataaagaactacctgagactaggtaatttgcaaaggaaagaggtttaactcacacacagttccacatggctggggaggcctccgaaaacttagtcatggcagaacgcaaaagagaaataaggaccttcttcacaaggggacaggagagagacagcgaggaagggctacaccttaaaaccatcagctctcatgagaactcactatcatgagaacagcaagggagaaatctgccctcgtgatccagtcatctcccaccaaggccctcctctgacacatggggattaaaattgagatgggatttgggtggggaacagagccaaaccatatcagactgtttctacaacccccccccccgcccccactgatgggggatttgatgtttctattttaatactgctaacctgcagggtgaaatagcatttgtgatttttaagatacctaatatttgatatgttaaaccatgaaatgaactggagcaaaaccattatattcatgacagcaataaaacaaattcctagaaatatgcttaagatgactcagaacctatttttaaccatctctaagaaatattactgagggaccatatgaaatactatcagtggtaaaaaaaaaaaagtcatttttttaaagtgaaaaaaaatcagcatttcaaagacgccacattctttcaaaattaacctataaattcaatgcaatgccaattaataaatttatttaattaataattcaatgcaatgccaatcagattttgctttttgaacctggaaagaagacatatttctgtagtgtactacaactcctctgaaagctgtaaagcttacctgcaagataaaacagtcataaaaacatgataaaaatgtgagacacacacattacccagatctgccaagagaactttgttcctggtcttctcagagtgacttgtttcaataaatgttaatgttatctttttgtttttataaagcgatctttaaaaagatatgtaccaaactggttttagaaaggtggaaacttgtttctacactgtcccattggtagctatcaacccacacaaagaatctatgtccataattagcaccttggaaacattctcaccacttgtacattgtaaaagctccctcccaggcagattctgatggaagtgaggattattactgaaaccactgctgcactgtttctttaaagcctactccgctgcacaacagactcttaaagactgaagtttgtaactgaagtgctaacctatttatcacacgtccaggtgttcccttcctatgcagactagaaaatgtaaaatcatcagtttctcctatagccctcctacatgtcactttcctatggtttttctcctgtgttggctctcagatggatagaaagctctgagtcccagatggaatcctctatgtacatctacttataagggttctcgcctaaatgcactctttggtggttccgcagacctgaggtataactgaagcctttcccacacacaccacacgtatagggcttctctccagtgtggactctctgatgaacatgaagacaggagttgcggccaaagcccttcccacactcctcacatttatagggtttctcaccagtgtggaccctctgatgaccttgaagatgtgagctctgactatagcccttcccacacacgtggcatctgtatggcttctcgccagtgtgcactctcttatgactaaggagacctgagccatatctgaaacccttcccacattcacaacaagtgtagggtttctctcctgtgtgcaacctctggtgggtgcgaagattagagccataactgaatcccttgccacactgatcacacgtatagggcttttttcccgtgtggactcgctgatgtttgtgaaggcttgatgtgcacctaaagccctttccgcactcttggcatctgtaaggtttctcgcctgtgtggactctctggtgaatgagaagccctgagctgtaactgaagcctttgccacactcagcacatttatagggtttctctccagtgtggaccctctgatggataaggaggtcggagctgtagatgaaacccttcccacacacgtcacacacgtagggcctctctcccgtgtggaccctctggtggctgtgaaggtctgaattccgccggaagcccttcccacactcactgcatttatagggtttctctcctgtgtggaccctctgatggatgtggaggtcggagctccggccaaagctcttcccgcactcgcatttgtagggtttctctcctgtgtgcagtctctgatgcatgagaagccctgagctgtaactgaaactcttaccacacacgttacatttgtacagatgctgccccatgtgaactctctggtgagcttgaaggtacgagttgtgactgaaacctttgccacacttgtcacactggtagggcctctcgccggtgtgtgtcttctgatgactgctgaggtgggagctgcagctgaatccctttccacactcgccacagctgtagggcttttctccagggtgaatgtgctggtgtttgtgcagtgcagacttggcacagaagcctttgccacactcgctgcaggtgtagggcttctcccctgtgtgcagcctctgatggacttgaagcactgagctgtaactgaagcccttcccacactcgctgcatttatatggtttctctccagtgtggaccctctgatggacaagcaggtttgaacttcgaccaaatgccttcccacactcctcacatttatagggtctccttcctgtgtgcaccccttgatgaataagaagaaccgatttatacctgaacccctttccacagacatcacatctatagggcatgtctcccacaggggctctggggtggttacgtatgtgcgtgttctgtctgacgccccgaccacgctcaagactcttaacagatttctctcctgtgggaactctttgatgtctgttaagatgggcactgtgcctcaagccctcactaaactcatcatattgacagagtttctctttcaaaggtactcttggatgcgggggaaggtctgcatcgtccctgaagccatttctgtattcgttacttttcaagccattctctccagggttaatgcgatgaagtacagagtttttaatgcagtcttttctgcatttattgcaaccacacggcttgtctatttcagggaatctgtgatcaacatgacaagatatccagcaaaagctgtcatcatcccagttacatttatatactgtgtcttctgtgtcgagatttttacatctttcttgaacatcccctaactggttcacaaacgcttttgcccaagatccttgaatggggattggtcttatagctctccaggctggaaactgttgattttctagaccgataagcccatccccttgtagactgtccagggaattctcaattggaaaacacggcgtagatgctccttcccacccttgatggggagcagcatcttctgagaactggaagtcttttccttgcagatttactctacagtcttggctcccaggtaattcacctgccacctcttcccagattttgcatgaggagagctctttgtgtgaaaagaaccttaattcttcatcttgaatatactccgtatcctttccattcttgtctcctatgaggttaaagacaattcagagatgagaactagtaaaagactggctcagggacatcagactttcagacttgaactaataatagcctagagaaaaattaggctttatgtatcataactattagagcacttatgtttatgacaagaggaggctcctattaataagttttgaagctaaatgctagtatgatcctattagtaccaaactatgtctcatcatagaattgccaggcaaaaaaagaatttcggaacagatttttatagagaaagttcacttcttcgcttaataatgctgttataactaataatatctgacactattgtaacacttcctatctgccaatgatgtacacatattaactgacttaaacctcagaataatactgaagtagaaaccattatattaccttcattttccaatgatgaaaccaagtcagagagagggtaggtaacctagcacactattccaccatactgtgaggcagtggtggagctggcatttaaatgcaggaagcccacacggccttctccctgcactgtgtctcaggggtgactgtacttctgggtatttgtgagccatacttcaggagggtgccaaattttccaaagtgcaccacctgtgtcatcttgtgtgagcagatgcaataggaatccagaaaatactgttaaggcaggaagacacacaaatatttgacttatgactattacttatgccttgagaacctttggatcccaggctgcaaaggatcaaactgtcatatttaccatagttctggatgattttaaaaatttgcccatgttttctgatattctttattgcctatttttatctttcagggcttgggtaacaagaacctgtttataaccagggactagtacaatactagaagaaagtgagaaattcatctgaggactctcaatattctgggacagtctctgccactggcttgccttctactgcctggctgtttctattagagggacggaagtccagaggtccctcgctcattctgggtatgatattctgtgaaaggcatagagaaaccatgagaaggtaggaactgaacggaagaaatgaagttgcagaataatcatctacaatgctgccaacagtacccacaggcaagacaaggggtgaggaatgggacctcctgtgggcaagctcacttctcactgcccagcaaggctcttgtctccaagacctctaggcctcatggttctcacctggagatgcatttcttggagtttctccatctgttaccccagtcttcaaaaattcctatgttgaaatcctaaatcccaacgtgataccattaggaggtggggggtcttccggaggtaattaagtcatggaggtggaacccccaggaaagaaattagtgtccttagaaaacagatgcccagagagctcttctctgctacgtgaggacacaaaaggaagtcagctatctgcaccctgacagagggtcctcaccagaacccaactatgctggcaccctgatctcagactgtgccttccagaaataaacttctgttgtttatatgccactcagtctggcaattttttacagcagctgaaactaagagttctataaaaataggatttaacctgtgtaaaaaagccaaaaatatcttctctccaggaacaagaacactccaagaagttcagttccaattacccagaggattcctctcacccactgagagtaggttcctgaaattctcctgcatcacatcttggtacagctgcctctgggtagagtccagcagctctagctcctcctcagtgaagaccacagccacgtccttgaagctcaatggctcctaaaatgaaaaaccattaacacaaacatctactagatgaagacaaactggtgtccacagagcaggtttatagaaataaaaaaatttaaaaatctggattaagaaaatgtggcacatatacaccatggaatactatgcagccataaaaaatgatgagttcatgtcctttgtagggacatggatgaagctggaaaccatcattctcagcaaactatcgcaaggacaaaaaaaccaaactccgcatgttctcactcataggtgggaattgaacaatgagaacacatggacacaggaaggggaacatcacacaccggggactgttgtggggtggggggagtggggagggatagcattaggagatatacctaatgctaaatgacgaggtaatgggtgcagcacaccaacacggcacatgtatacatatgtaactaacctgcacattgtgcacatgtaccctaaaacttaaagtataataataataaaattaaataaataaataaaaatctaaacaataaagataaactgcatatctctaaaaaaagaagacaagatagcaggaagttgttcagcccggtgtgtcaactccagtttattaatgtttggtgccagtaatttcaattctaaccaactgaactaccccagatatgcagcatcaagcaagaaacacatcatatcctgtgctcacttggggcacttttttttggacacagggtctcttactttgtagctcaggatggcatgcactggtgcaatcacagctcactgcagcctcaatctccagggttcaagcaatccccatgcctcactcaacctcccaagtagctaggactacaggcacgcaccaccacatccagctaatttttatttttttgtagagatgggaccttgctatgctgctccggctggtctcaaattcatggcttcaagtgattctaccatcttagcctcacaaagtgttgggattaacaggggtgagccactgatatttggatatttgcccactgatatagtttgggtatttgtccctgaccaaatctcatgctgaactgtaatccccagtactaggaagtgggggtgggaggtgtttggatcatgcggtcagatccctcatgacttggcgctatcttcatgatagtgagttcttgtgagatctggtcatttaaaattgtatggcacctctacccccgccccccaactctcctgccacacttcttgctttaggcatataaagttcctgctctcctttcaccttccattatgactgtaagctttctgaggcctccttagaagcccagcaaatgccagcgcaatgcttcctgtttagcctgcagaactgtgagccaattaaacctcttttctttataaatcacccagtctcgggtttttgttttggtctttttgtttgtttgcttgtttttgagacagagtcttgctctgttgcccaggctggagtgcagtggtgcaatcttgactcactgcaacctttgcttcccgggttcaagtgattctcctgtctcagcctcctgagtagctgggactacaggcatgtgccaccatgcccagctaatttttttgtatttttaatacagacagggtttcaccatgttagccaggatggtctcgatctcctgaactcgtgatctgcctgggtatttctttgtagcaatgccagaatggcctaacacacctagcccactgtgagcacttcttcaggaaatttctctgaactggatcaggtgaatcacctgtctgcacattttataatctgactctgacttgtagattgccaaatttttctccaagaagtctgttacaatttacagttccaacagtgcctagtttactgtgcccatgcctgcatgtaccccgaaaacattctctctgccagaatgatggttctttcccaatcattcactacccttccatcaccaggtaggcaaatcctgctctttgctaccacagcccctcttcccttccacactctttttaagggacttccatgtcaacaactgacagaaatcagctaatttatgtcatgcaaccatctcctcaaccaggtgagacctcaaaagtagcattttgaaccaaggaatttcaaactatgctgtgtccccttcagctacgaatggtggcctgtgtttttaaagctaattgttccagttcagtgagaataaatggcagtcatgtattctgcaatacagtgatcatcaaaatattactgtaatatcattgctgtcttcacttggacagtggcaagctttcttgagaactgcatatgagggctctcagaattatactttgccttcagcatgtccctggagtacctgcgacaaggtattgcaagttaagaatgagatgaatgctttcacttgacttttttatttaagtcatgcatatatttttgatacgaaggaatggtagctatagaaagttttagtgcatattacatggtttgtctctgtccccacccaaatctcatcttaaattgtagctcccataattcccacgtgttatgggagggacctgatgggaggaaattgaatcatggggggtgggtctttcccatgctgttctcatgatggtgaataagtctcacaagatctgatggctttataaacaggaattcccctccacagcctctcttgcctgccaccatgtaagacatcccttgctcttccaccatgagtgtgaggcctccccaaccatgcggaactgtgactcaagcctctttcctttataaattacccagtctcgagtatgtctttattagtagcatgagaacagactaatacagaatgcataccatattactttttcaagaaatattcagtacctataaaataatgttaggcaccaggaattagagagatgagccaaaaagctagagtttcatggagctagtattggcagttcctaaaaccagatccaggtcgtatgattggccatgaggactcacaggagctgatatacagtgacactcatggctaagacttactacggtgaaagaaaataaaacacaatcatcaaggggaaaagacgcatggggtgaacttggaaagaaaccaggtgcaagcttccaagagtcctttcctactgaagtcacacagatatgcttaattcctccaaaaataaattgcaacaaggcctgtgaaatgctgtctatcagagaagatcagcggagactcggtgcccagggttttcattggggcctggacacataggtacctcctgacttcctgactagcacataccaaagtttcagacttccagaaaagcaggttttcagtagaaaccatattgtttgcagacagtccaggtactgtatgccattcttatcagaagcaatgtttacagaggcaaatgctttgtttgagaaagtaaaactggatctaaattctgaggcataagtagaaattaactgagggaaaacagaggagagaaaattccacacagtgggaacagttggtgaaaacccttaagtggtaagaagcacggcacatgtatcttagcctcaggcaatgccgctgtgaagtaggcggtggccagatcactcagggcctcttaggctacattgatgattttggtctttcccaaaagcaggaaacaaataaacactgaagggtagtttacagtgggtagtgataagattaggtgagctgtcttaaaattatgaacccgacacagcatggaaaaacatagcaatggatcaagtatagatacaaggagaccacattggaggccactgcaatatttacagggagacatgttggcccggactcggacatgggaggattacttcagcctaggagttttacatcagcctgggcaacatggcaagaccccatatctacaaaaaatagaaaaagtagtggcatgtggtagtgtgcacctgtagtcccagctgttcgggaggctgaggtggaagcctgggggttcaaggctgcagtgagctgagaacgtaccactgcactccagcctgggtgacagagagaaccgtgtctcaaacaacaacaactacaaaaaccaacaccaacccaaaaaccaccataaaaaaagggcaccattactaagttctagccaaactttaattccaacaccatttttttaatcaaatttctaaatttcaaaagtaggtgtttaagccaggcacagtggctcctgccggtcatcccagcactttgtgaggccaagatgggaggatcacttgattccaggagtttgagaccagccttggcaacatagggagacctacatctctacaaaaaataaaataagctaggtgtgatggcgcacctgtagtcccagctacttgaggtggaagaatcacttgagcctgggaggtcaatgctgcagtgagctgtggctgcaccactgcactccagcctgggtgacacagcgagactgtgtcttaaaaaaaagttggtattcaatgcagatgtacaagtaactcggtgaaccagagcacagaatgcaggagcagtcaggtccatgtgaaatatcaatcaattgctgtatttccttctgtctttgtatttgatatgtatacatacatatatgtgtgtgtatatatatatattttatatatttacatgtacaaacataaatatatatatatttacacacacacaaatgagggtggtattttggttgactcgaaaaagaatgattgatgtaaaaataacattttcataactggctatccatcttgaagaaatgaacttaaatgtcaaccttatgtcatttacaaaaataaattacagttatactagggataaaacattttttcagaccttgctgatgagaaaaacatttttaatataaatattaaagagccatttagatgactttttgattaatctgagaatggataaggtcttttgaaactacatgaaactaaattttcaaaagggaactaataaatcatttaactatataagaaccttaaacttctttacagttaccattaagaaagtaaaaattaagaagacatacatgcagccaacaaacatatttaaaaatggtcaacatgactacagaaatgaaaatcaaaaccacgagataccacctcaccccagtcagaatggctattattaagaagtcaaaaagcaacaaacgctggcaaggttgtggagaaaaaagaacatttatacactgctggtggaaatataaattagtttagacatcatacaaagcagtgtggtgattcctaaaagaacttaaaacagaactaccattcaacccagcaatcccattattgggtatatacccaaaggaatataaattattctaccataaagacacatgcacacacatgttcactgcagcactactgacaatagaaaagacatgaaatcaaactaaatgcccatcaacagtagactagataaataaaatgtggaacatatacaccatggaatactatacagccataaaatagaatgagatcatatcctctgcagcaacatggaaggagctggaggccattatcctaagcaaagtaatgcaggaacagaaaatcaaatactgcatgttctcacttataagtaggaggtaaatgatgagaacgcttagacacacagagggaacaacagacacagaggcctacttgagagtggatagtgggaggagggagaggatcaggaaaaataaataataggcattaggcttattgcctgagtgacaaaataatctgtacaacaaacccccatgccatgcaattcacctatataacaaacctgcctatgtaccctgaacctaaaatttttaaaaaagtaaagattgagagaaaataattataacccttttgataagtgtttagaagggcttctaaaaacatggtaaaaatgaattaatgagaaaataggcaaaagtatttcctaagcaatttactgatgagaaaatacaaatatagccaatatacatatgaaaaagtgcttatcatgtttacaatgcaggaaactgcaaaataaaatggggcatctttgccacatatcctccatcagatgagcaaaaatatttagtactaatcattcttgggattgaatgtgtgcagaacagcaaaaattgctatgatttcttctcaaatattgtggcaataatatattaacagtttacaacgaagtgtgtgacgctgtgaaatagatatttggtctctgtggcatataactccaaaagcccttagaaactccaccgtgatgtctttttctatgctaatgggttgactagtagctggcagctggcaggtagcttcaggatggggctgcttactggaaagaacaaggaaggattagaggattagacttatagtacttccccctcccccaacctccagtgaggggagaggagctgagggtgaagttgatcactggtgcctacctaatgaaactttcataaaaacctaagaggaccaggttcagagaaattctgggaaggtgacatgcccagagagggcatggaagctccatgccccttaccccatacctttgccccatgcatctcttcatctgtatccttttgtgatatcctttataataaaccagtaaacataagtgtttccctgagttctgtgagctgctctagcaaattaatcaaacccaaagagtgggttgtgggaaccccaacttgcagctggttggtcacaagttctggaagcctaaacttgcaactggtgggagggaggagcagtctcttgtgggacagaaccctcaacctgtgggatctgacactacctccgggcagacagtgtcagaattgaaccgaagggcacccagcaaaactgccacaaaactgattgcttacttgaggagaaacccacacacatttggtcacagaagtcttctgcctgtgattattgttgctgagtgtcagaatacaaacagcacttagagtttcagtagctttttccacactaagtatacccctttgggccagcaatattcagacatttacatcatagaatttaaagattaaagaacaggatgcaaaaatcacatgtgtttgtactgtttgtagtgctaaaactggtagtaatcagaactgaatatcttatggtagtaaaatacacactacatggaaagcatacatgtttccatttccttttttttgagatggagtctcactctgtcgcccaggctggagtgcagtggcatgatctcagctcactgcaacctccgcctcccaggttcaagcgattcttctgccttagcctcccgagtacctgagattacaggtgtgcgccaccatgcccggctaatttttttacttttggtagagacagggtttcaccatgttggccagggtggtcttgaacttctggcctcaggtgatctgcccgccttggcctcccaaagtgctgggattagaggtgtgagccaccatgcccagccccatttcctttttaaaaagaaggtaacatatattttcacatgacaaagatattgatggattcacacctctttgttaatgttgggcatattagcgaggacagttgggggaacctaatttatttcattatagaccttggtatggtctgtcttctactaaatctttattttaaaagttataatgaaatatatataaactagtattattaacatggctgagctacagaggtttaatactatgagtgagtatggcagacaacccaaaaacatctccatgggagtcccacagagtctcacagttgtaaactgcacagaccatcttaacacacaggactcaaaaagctacacccactcaatttttgtgtaggggggagcttgctagaaaaagaattaatcagaaattttttaagtgtaaaaaaaatcgcagctaggattggaagaaaaaaacaacttagagcttagcctaaacagatgaatgaacatccaagaagaaagaactgtaaaacaggacaggattctggaacacagtggaaaatggcaaaaagaaagaagaaagaaaagaaaaagaaaaggaagaaggaaggagagaaagagaaagagaaaataaagtgaaagaataggaaggacagatccagaagttacaccatttatccagtaggcattccaggaagaccaactggattaaataatagtaataattgacatcaggcacaaatagaattaatgcccgagagaacagagcaaggaaaataaagtgtgatccatgaaaatgccacacacccaagcataaacacaacagatgcttctagaaaaaaatgacaagaatgaatttagctcaccagaaggtgaatggagaagccacaatacaaagtcctacacaagacttaatacaagaagaaaatgacacaacctgtactgagtccagaaagtgtgaatgaagaattttaagccctggcaacttgcaatttgaacataaaaccaacattcttttttttttttttgagacagggtctcgctttttcacccaggctggagtagagtggcatgatcttggttcactgcagccttgatttccctgggctcaagcaatcctcccacttcaacccccaagtagctgggactataggaatgcaccaccacacccagctaattttttagtatttttgtagagacaagattttaccatgttgcccaggctggtctcgaactcctgagctcaagtgatccgcatgcctcagcttcccaaagtgctaagattacgagccactgcacctggcccacaacattcttaaacttggaaaaatgcagaggatactatagccaagtctttggcgtgggggaacaaaaagactgcatccaaagtctttgtagatgaaattgaggcaaccaacaaataaattcaagtaagaaagttgtggtaaaaggagaggcggtgagcaatgacttaaatacacagaagtgagtctcaactgggggaacttatggtgacgaatcagaagataacaatgacaataacaatataataacaatcagaagatggtaggaagtaaaaacgtgctaattgcttcaactttcacagcaggaagtaatcaataatatttaaaattaaggtacacagtaaaagaagtgaatcaaatcttcaaaattatttcacaatctcttttcataaaaagaaaggtttagaaaataatgtttcatgtgttgaaaaaacatacttaaaattctgcaatggctatgatttttttcagtttaaaagaaaattaagaaatatgtatatactaaaggatagcctatttccatatccctatattttcatttactttatatcgcttgatagcagcttagaatctagacaaaagaacgaatgaaactacaattcactaattcaatagatgaacatggaatccatatcactatatgtgtgtgtgcatatatatgtatatatatttgtagatatgtgtacatatatgtgtatatacacatttggctgttatgaatgatgctgcaattatcattctttgcacatttattctgacttagaaaaaattcttagagtgggaaatgctcgaccagaataaggagaacttctagaaaggcagaaatactcctgcagctgtgtggatgtacccatttctccatatcccagctaacagtgcatgttgacctttcaaatctttggctgtctgctagaataatcataaatcttatttcaatgtgtatcattttgattaatagaggcttatagtcttttcatatgattagtgggcattagtttttctctgctcccttcctgaacaagaatgctcaggtctttatgcataaccctcttctgaaaataaggatattaaaattttgtcatagatgaaacttttctaatatgtttttcctttttttaactttgtgcatggtatacttttggtagggtctactacatggagaacattacatctataaatgaataacgttccacagaggagaacaacccaggcagcgatgattcagtatttggagagtcatctctctgctaatctaggcttgggcctctgcgtgaagctattgcggtggcaggaaggcatagcggaaaggtagattatcgaatccaattgacctacctgagttcaaatcctggatcccccattcatttcttcatctctaaaacagaatcatactatctgtctcacatcactattttgtggataaatgcaacgagaaatgtattcacccaatacatttttcgctctttttccttttaccgagaagggacgtatgttttctctctgatgcctaaggtggtatttcgggagagaaaagaaaacaacccacctgagacatgatcttctcctccctatcttgggaaatggctgaggcttgagaatgaagagctgtaggaggagaaagaggccatgaggaggagttggtgctgcctgaagctctagatcatctacctggtaggaaggtgcccagctttacagactggtttcttctcacttgaggaaattcctcaacatccaactttttctcctccacactcagtttggattctccccccacccaccccctctattagctgtcacctcttttctcatgccttgaggtcaaagtctccatggtctcttctgctaggttttctgcgagcagcagcaactgtatttattctctggttttcctaagctggagacgcagaagatccaggcctttttcattccggaaactctccaagctctgacaagttcctgtctccacctttactgtccagagcgtgactgcttcccatggtcaggggacctgtaggttcgggagggaactttacttagtcctttcttctgggccccaaggctgtggttcacatcccctggatactattcattcagtagtttacaggacatttactgagtacttgttaggtttagtcccctactctgaaggggctcatagtccacaaagccaagagtgttgcagatgggtaaggacagtcacagaagagtctgtgaggagggtcctgcagctaaattctcagtaatgcacagggcccctcagaagggcagagagaccccacaaatatatgggacctgtgacctgtgaagaaacacctggagaggaaaagctttattaacgcaatactgtttgacttgcaaaaaataaaatacaatatatccccatacttagggattatagaaatcaggataaagattagagccatctttagtcagcgtttttaactttttttgtgccatggccccccttcactaatctgatgatacctaaagatccctactgagaataaagttttaaatgcataaaatgaaatgcaaagaattatatggaaatacaaccttcaaaactattaaaactctgcatggctcactgtgcaagtatagtgccactttattaatacattcaatataaacaataaatttaactacaatttcaaaagagtaatgagcataaacaatactctgaaatatttgcacaaaccagaatatgacataaaaatatctatgatgtatatggatgacaaagtcacaagtactgctaataatattgtggcttagcacctatgttcacaatgaaatgctacttgtgacttagactagtataatttttttcccattcaaattcatggaactcctgagttatgctcatggagcccagggcaagaattccttttcaaaattaagcctcttctgccccgccccaccccccagactgaattaattactctgggatccagcaacacatggtataaattgctggttaccacctttcacacggcctccatggtcagatctctaagtcatcaaaataattgagtcttctttttctttatttacctttcatggctctggcacacgggaagcacttaagggtcctaagcaattctatcagcaggaggtgatgcacacagattgaacaaaactcttacaatctgctcagagctactcgggaggtagtgcaaagacagtggacatgagtttccacccttccccaccttgcctggcctctttcctcttgaaattcaagtctcaaggtcaagttcagacaaacagatacacatacttgggctgtctactctaggacactcactggattttactgcttcaggaactcaaatctccttctttcctctaaccatctgtaccagccctctgcatggcccacagtgacaagcatctttctctctccctcccttcatgcactgccctgaactggggattgccctttgacccaggtgtggacaaccaggcaacacgctaccctcctacacaaaggacaaagggaagagtagaggccagatctgaaacaaggcctccaccgcaatgccacttaaactcaaacttcaggatcctctaggactgcgctttgcaaacttcagtatgtttaaaaatcaccatgagcaatgatgaaaacagactgctagagtccagctccaaagattctaattctgtatctctgcagtagagcccaggagtctgtgttttaaacgtttccaggggatgctgacaaagtgagtccaggggccacacctgaagcaaacttgctaagttaccctcacttcctctgactggctgattttcagggtttccagagacttccggtgggtaaaaattttccttgtgcttcctcctcctatccctgaactcttcaggtcaggaagcctcaagagtcagcacataaagttctctatcttctttcactcccttggtgaacatatccagcctcaggccttcaacacaatctacacactaatgactccatggcaacctgccatctccactcttatgtctaaaaagcaactcaaaaaacatgttcaaaagaaaagtccagatttgcccctagaggtacttctctcctttgaaatgaagaggaaatattctagtcatccttgatttcttcctcgtactctacatccaatccatcagcaaatacctacaaatcagaaccagaatcagattattcttgctgccaccgtccacaccatcatgtctcacctgcattaacgtgacagccccctaaatggcctctgcattcctactcctgttcgtttcagtctacttcctacacagcagctggagtgatcttttaaaaatataaactcatattcttctctggccaaaaccatcattttactcaaaaccttgcaccaaggtcctttcaatggcccaaagaccttacactatcttccttcccaatattcagtttcccacttatcctccctctttctcattctgctcagctctggcttccttgctgttcttcacatgccctcatcaccgggccttcgtgttgttctctttgcctttttcctcagatgcctgcaggcccctcacctgctttgggtccctattcaagcaccattttctcagtgaaattcatccctcattatccttctcaaattggcaaaccagcacttcctacaccctcctctgcttcatttttctccatgaaactgacaccctacctacagtctatttttcttgttgaccatctttctccacccacaagaatgtgaactctatgagggccagtatttcagttggcacctggcacacagcaggtgctcaacaaatatttaaatgggagaacgggagtaacctgaactcagcttgctgatatggatccttgggtcctcttgatgtcatcttcacagcagaagtgattttcttctccagttcatggacttagtaatttgggtgctaaggactatgctggctgtgttgggacccaagagtgaacagggcagacaacgactctgtgctcatgcagctgctaacattctaggtggaaatcagcagccatagtgaatatctactgtgttccatgtgcttaggatacatttctggactgcatggagctcacattgggggagaaagagggtgacagaaagagttggtacaaaggcagtgggacaaagaagtaatgggaataagagataattgcagaggtagaaataacaaaactaaaagaataattccatgtagggatgaagaggaggagaaataaatatgattctgaggttgaagtctgaggaaaacaggtaaattatgaagttatgataaaataataagatagcaaaagggaaagcagggttttgaaaattgcagctctagtttctcaaaactggagttgtcaaaaggtttaggttcgaattctggttcagccactttgtagttatattaacaccacaggagagacttaaccttttgaatgagtctgtacttctgtcaaataaagataatccttacttgcaaaactaaaataatttaagtttttctctctttcacacacacatgcctatgtgaataaacttcaaagcccagtacgtggtacacagaaaatcatcaatatactattaccattgacccaacccagcattaacctaggaatacaggaactcatgcatttagtaaatgtacattcagtgtctaacaacatcttaggagaataaacactagacatacagcagtaaattaagatggaaaaggtaattgttctcatagtgcttactttcaggtgggttaatctctctacaaattaggtgacctttggttgcaaaaagggctatgaagaaaataaagcaaacatgatagattcctgttttccaacaagaatgtaggtgctatcaggtgaaacatacgtggcagctgtggaaagagcaacattaaatcaggtggtcagggacagtctctaagagctgcctgacaaataaatcagctgtgaaaaaagctgggatgagacaagtccagaaggaagcataagcgcaaagacctggtttctgtttagaaggtctcctggccaggtcttacctgttaagtttttttaactttttaaaccttagcaactcatctgtgacatgggaataatagctaacatacaaacttgctcagaaaattcaatagaaatacattcatttattcaaatatttattggcaagcctggcactgtcctagacaccatggataaataatacctggcatatagtaggcactcagttaatatacaccatcacagttactctaattatttctaccctgcgtttcttccctagcatggcgctgaaacagtgtaagcctttactgacccagtgacacactactaggagccaagaagagaatacactaaataaagacactgggaaattcctcaaacctcccccatttctaggggaaggcaggtgtggctaaggggtctgaatgaacatttgtgatatcaatgggatgaagaatgaggtcaccaagagacctggcattgccacaaaagagaaccaaagttcactcacctggagctctagtgtcaagagatgtggggttatttctccttcttttatacaattatctccgagaaacgaacaattccaagaaggaagcctgtgaaagaaaaatgaacagcaggataacatgatttaatcccaattcccaccacgccacagggggaaatctctcagtgccagctggatgtaatctaccccttcctgtaatctaccctcgctacttgcttcaggagccgaggaaaagaacctctcttcctacaggactcagagtacaagggacacgccattcctgatgcccaaagaaaacgtctacaagcctactttcactgcccctttcaggagacaaggagaatcaagacaaaatctcaagattttaatccagagctgactgtcacatgctgtgggacacttacaagtgaaattctgcctgtgtgtgcttaggcggctacaaaaagcagagccagcaacgatacagcaaaccaactcctacgacttgcacagcgcttaatacatttcaaaggataaaattagaacacagggaatcaacttcctgtttacagaaatgacttcgcagaaaactctgaaattactccacaagtgggtgggcggctaccctgagaaaattcatgtcatcgatccgcaactgacacagtggagtctcccgcactgcagatctcatctcaaagccagagctggcctcaaactgcttttccaagcctggactgcgagggctgccgacccgggcccaccccgcacaggcgctcagaatgttcgatacgtgcgcctccttacacccctgcctcaccaggccgagctcatggaaatccgtgggcttcgaccctccgccgcacgttgtcccttcacactggtcctatagagccgatcctaattcccatggcctgacagtacaaccgcatggagatgcacgtctctaagacgcctcaccactgcctaagaagcaatcaaggtgacgcgcccaccggaaacggaagtagtcgactcgaggtgtgggactacctttcccagaaccctccgcagcgcagtccgatcctaggggcgatggtgtcgtaaatgcgcgtccacctcgagtcacgcccactgcgaggcggcgggaggcggcatgcaaggtgtttctgagttgaaaagaatgtctttactcagtactaacatattcgcgttgtagcaaacctgactatattctcaaacaagcccatcatcccatcaccagggatataaagcattattgattttctggtgtaaaagccaactaaatatttatttcaaaagtagttcatattacatgtaaagaatggtttaaaaaaaattcttacttaatccctggtttatgtgagtaaatatgaattcttaagaatcccatttcccaaatggcatcataatattttgtaatcatttcttgccacaggtcatatatcgtggatagttctgtatgtcacaaaagacgtagagatacatagagataataaaaaaacacaaattatttgcaatacttgcctagcattctttagtttttagggaagttacccctttgtcctgcattgaacttacacttctaattttatgatatcaaaactacacacaatcactttctttaatattttcccaatttgatggactaaatatcctgtcttattttcccaatttgacagagtaaatatgcttattaccgattgcatttcattgtcatcttttattgtcatacactctctgtgtatgaatgatatcgcttctaagtgatgaattgctcccccagtttcaacatttataaagtagtttagaaaaaaaaaaaaacaaaaaacttcatctgacaaggtatatcagtcttttcatttgtggcttcttttttttctccagtatgaccaaaaagacattccttagcctgattcccaataagtgcatatctatattcatttcaggctctttcatttttcttttgaatcaccgcgtgattcatttaagtgtatgatatgaaaggaagatggagtttcctgtttcaccaaaggattgtctacttttcttaacaaaatttacataaatattaattctttcctttctgatttaaacggcatcctaatcacttactacattactatatatataatgaaatattttctgggatacaagtgtgttctgaagatagagattgctttttctgtgccatgatgaaaggtttcagttacagtgataactcatttccttatctctccctccttgttgtgtttcaaaaatttcatcctagaagttctagaactctctcttataaacagattatcgaattgttttgataaattctaaaaaattgccaattgactccaaagcatccaagcccttcagatatttggttccaaacccacccctctttgcttgggtagacacagtcctacttcccatcctgtgtcctccagttttacaaatgtctgaatttgctgctattgttcttccctctgtaagtccatcctttcctgtactattaaaatcttactccatatttaagacacaacttgaatataatttcctctatcgagtgtttttgaactctatatcataattcaatgaacagatcagtctgtgattgggagaatttcatgcgagtgtagtggatgttaaataccactctcagaacattctcatttccccgagaaatcaataaattatattactctgggatccagcaacacatggtttaaattgctggttaccacctttcacatggcctccatggtcagatctctaagtcatcaaaataattgactcttctttttctttattttctttatttacctttcatggctctggcacatgggaagcacttaagcaattcaatcaagtgtcttggccgggcacggtggctcatgcctgtaatcagagcactttgggaggccgaggcaggcagatcacgaggtcaggagatcgagaccatcctggctaacacggtgaaaccccatctctactaaaaatacaaaaaagaaaacaaaaaaaattagccgggcatggtggggggtgcctgtagtcacagctagtcaggaggctgaggcaggagaatagtatgaacccgggagaaggagcttgcagtgagccgagatcaaaccactgcactctagcctgggcgacagagcaagactccatctcaaaaaataataataataaaataaacataaaaataattattttaaaaaggtgtcttgacctggaagctaagagccaacctgcacaaagtgtgggtagatgaatccattccaaggcccaaggtaaatattcagccttcatcctacctcatacaaactgcaaaacactgtagaaaccgtgtgtcaactgaatttgaaactgctgtaatttccgacaccctaacagttttgttattgttaagaaaaaataacccaattttaagtaggcaaggtatttcagtagacatatcttaaacgaaaataaacaaataggcaagagacacatgaaatgactctccacatcctcagtcattagggaaatggaagtcaaaacaatggtgctacttcacactcactagaatggtcaggattgaaaagcagaaaataggctgggcacagtggctcacgcctgcatcccagaactttgggaggctgaggtgggcggatcacctgaggtctggagttcgagaccagtctagctaacatggtaaagccctttttctactaaaaatacaaaaaattagctgggtgtggtagcatgcatccgtaatcccagctattcgggaggcagaggttgcagtgagccgagatcgcaccaccgcactccagcttgggcaacaagagtgaaactaaatcacacacacacacaaaaaaaacagaaaataaaaaatgctgacgatcatgtaaagaagctgtaacattcctgcactgctggtaggaatttcaaaatctacagccatattggaaaataatctggaagatcctcaacatgttaaacatcatagaagtctccaaatgatgcagcaattccacacctaggtatgcaccaagagaaaacatttgtccaaactaaatattgtacaggagtgttcatagcagcattattcaaagaagtagaaatccatcaccttaaacgggtgaatcttatccagggcatccacgtggagacaggggcagacacagggaaagagaatgaggaaatgtctgaaatggaggccgaaagagagacaatgagaaggcctgtgaatggaagaaaccgagcgcagggaaaacagtcatacgtatacatcagagatctgagaacgcgggatcataccgacagtgtcactgccaggaaagggggtcaagctagggatgtccccggtggcgtcgcccgcagaaacacggacaggtttggggttcacgctggcacgggcgccagcagccacgtcagcaggcaggagggtcccactgcacagctgaggggtgatgatagcccaggtggtgatgtcggccatcagaggggcctctcctgccagcaaatgtgtgacagtagcaagtaaaaggacaggtctttgtgtgaggccggaatgcgggaagggctcttctgtggctgagtgtggagtcctcagcaggaatgtggataaatggccaggtaactgcatcacgttggctaggaggatggcaaggacttcgagctgaatgatgataacggggagtgactgtgagaccctgcgaggctctgagtgtaaaagaagatgggtgcggggccccaggggagtatgtgggagccactgctgtgtagatggaggtcgttggggaagaatctggtgagctctgtgaatttccaggggtctcctgtgtgctgggggctgactcttgcagaaaactggggatggttggagagtagctgggagacaggaaagagaccctaaggaatggcggtacaaaggtcagagaggagcaggaggagcacggtgaggtctgtgagtttccaggtgagtcctgtgtgttaggggctggccccaggagaaatctggggattgttggagaggagcagggggatgctggagagtctctgagggatggggatgcagagatgggagacagaggtgaggagcacagggaggtctgtgggttgctaggtgatgccctgagcatgagaggctgactccaagagaaatctgcagatggctggaggggagctgggagacacaggagagcatctgagggctgcagatgagcaaatgggagacatgattaaggagggcaccgacatttgtgagattctcggtgacccccaggtgtggggggctgtgtgttgcagaaaccttgggataatgggagagtagctgggacacacacacaagtagccaagggcctggagtacagagttgggagacatggggatggagccccgtgaggacgctgagtttccaggtgtttctttggtatgggaggctaactagctgagaaaggtggggaggtctgaagagtaactgggaaacgtgggactgtccctagggggtgggggtgaagacatgggacacataggggaggagtgcagtaggaactgtgaatttctgagtgttgcctcggtgtgtcggtttgactgttgtagaaacctggggctggttggagtggagttgggggaaaccagagagtctctgggggatgagtatgaagagatggaacacattggggaggagcacagggagatcactgagtttctaagtgattgctgcgggagagaggcagaccccgatagatatctggcaatgctgggagagtagctgggacagacaggagagacgctgagggctggtgaggacatgagacagactggggagtaactcagtgaaagtggtgagtttggtgcagatttatgggtgcctggaactgattcccgctgaaatctgggcatggttgaagagtagctgtcacagacagaagagtccctgagggtttaagaattacccgtgtaagtgaaaagacttttaagaaagagtggagatatgcgttgcataaatattcttttgctctagaaccacgtagagacatgggagccagttgggtggagcattcattggatgtgcttggcttaggaatatcaaggaatatcaaggtgtggctccagataattcaatcatctaattcagttttcagttatgctaatctgttttaaaattctgtttgtgtaaattcttttactcagactgagaatggcaatgcctcaactccaatttccagggagggttgaaagcctcaggttgagttgatcaccaatcgcctatggtttcacccatcatgcctatagaatgaggtctccataaaaacccaaaaggactgggtttagagagcttctggataaaacttcccgaaaagtagtgcgcccctccccacatgccgggcccaaaatccgttttctgaattttttgcaatatccgctatcatacaatggtaaatggaagtgtttccctgcgtgctgtgagcacttccagcaaattcatgcaactaaatcagggagtggtggaaacctgatttatagccagttgctaggaagcacaggtaaaacaacgtagggcttcccactgttcttagagtgggaggccagtcttgcgggactgagccctttggaatctaatgctatgtcccggtagatagcgtcatcattgaattagaagacacatgtatgttgagaataatttttctagtcatttgctgtatgtcttatttacaatatgtaatcaaattctttgtcctgactttatggcacctgggttgggaaccatgatttgaaccaaaaggtggtctgtcactttctcagtttgaaactttattttgccgctagcgttttgctattcttttttcgttttgttttgtttcgttttgttttcaagttctggggtatatgtgcaggatgcgcagatttgttacaaaggtaaacgtgtgccgtggtggtttgctgcacctgtcgacacgtcacctaggtattaagcccagccatgcaaaagctatttcccttaatgctctccctcccccaaccccaccccatgacaggccccaatgtgtgttgttccccttcctgtgtccatgtgttctcatttttcagctcccattataagtgagaatgtgctggttggtgttgtgttcctggattagtttgctgaggacaatgacttcacatcactagtgttttgtttctattttaaagactagtattttattgaataagatttattcacagaaaaataagctttaatctacaatgaatgccagagtgtacagcagaaagcaattttctcagttttccacacacaagggttcctactaagtgaaaaaagccaaaaaatctcattcgcaaatgtactactctgtctcaaaacatttcacataattatgcacaacactaatacaattacatctgttactcagtcaggttaaagtatccctctaataactgatttttaaaatgctctcaatatccactccctatcagtctgccattgttaatggtgtacagcgttattgaatacaatggaatccatgaagcccatatccacggacaaaccgtgacttatgatggtttgatttatgatttttcaactttgtgatgggtttattgggacattagatgcatttctgagttacactggctttatcagtatgtgaccctatactccagaaatagctgtataaaggaaaacaggtgtacctaattaaattatactcagtgacttgagagaaaccaatagatgtttacaattgatggagaaccgtgaaagagagataccagtaaataaaaacaataacacaattttcctgcaactgtcgaggatttcccaaaaaaacacagaaagtaggatgcaccgaaggcatatgaaagagagacggcagaaggagtaagagagaaataggaggaaggaaggaaggaaggaaggaaggaaggaaggaaggaaggaaggaaggagaaaacacctggtgttactaaaaccaaaaaaaaaaaaatggtttcccactctgggtaatggtacaatgtggatgaaccttgaaaatattgtgctaagtgtaaagtcagtcataaaagctcccatattgtataattctgttgataggaaaagtccagaatatgcaaatctatggatatagggttgagcgctctatgtaattgttacctagggctgaggatcggcgagatggtttgagacagaatgaggagtgactcacgtttacagggtttttctctggtcgggggtgataaaatgttctcaaatggattgcgaattaaaattgaacgtgcacaaccacaagtatactaaaagccactcaattcatgacttttaatgggggaatcttatgtggcgcactctcgtcgagaccacggcagacatagtgaaagagaaaaaggtgagtaaatatctcaaatggaggcagaaacagagagaatgaaaagccctgtgaatggaagcgagagagaaaagggaaaatggtcctatttacaaatgacagatctgaaactggggctcacatcaacagtgtcactgccagggaggagggtcatgctggccatgtcaccggtagtgtcacccgcagggatgccgacatgctggaggttggtgtcagcatgggctctggcagccacgtgggccagcaggagggtcccgctgcacagctgtggggtgaggatagcctgggcggtgatatcggccattagaggggcctcttctgctggcaagagtgtgacagtagcaagtagatggacaggcctgtgtgtgaggatggaatgcaggaggggcttttctgcggctgggtgtggggcgctcaccaggaatgtggagaaatggccaggtaactgcgtcatgttggctagtagattggccagggcttccaactgaaggacaataacggggagtagctgtcaggccctgggagtgtctgagtgtaagtggagatgggtttggggtcactgagggatacgtgggagccatccctgtatagatacaggtcatagggaaatagtctcgtgaggcctgtgagtgtctagggttctcctgggtgcctggggctgaccgcggcagaaatctggggaaggccagagagaagctgggagacacaggagagtccctgaaggctgggggtgaagaggtgaaagaaatgggggagggtggcaataaggtccgtaagtttgtaggtgattcctgggtgtgggaagctgactccagctgaaatctggagatggttggagagtagctgagagagacagaagagcccctgagggctgggggtgaaaacatgagtgagactggggagtaactgagtgaaattggtgagtttgctggtgtgtcctgggtgcctggaactgactccagctggaatctagagaagttttgagagtagctgaaagagacacaagagtccctgtgggctgacggcaaagacctgagagggaacgcggaggatctcagtgaggtctgtgggtctgtaggtgattcctaagtgtaggagtctgacgcccgctgaaatctgggcatggctggagagtagcggggacagacgggagagtcccagggggctgggggtgaagatatgagagagactggggagtaactcagtgaaactggtgagtttgtaggtgattcctgggtgcctggaactgactctcgctgaaatctgggcgtggttggagagtagctgggacacacaggagagtccctgagggctgggggtgaagacacaaaagagactggggagtaactcagtgaaactggtgagtttggtggtgattccggagtgcccggaactgactccagctgaaatctgggcgtggttggagagtagctgggacagacaggagagtccctgagggctggtgaagacgtgagagagactggagagtaattgagggaaactggtgagtttggtggtgatttctgggtgcctggaactgactcccgctgaaatgtgggcgtggttggagagtagctggggcacacaggagagtccctaagggctggtgaagacatgagagagactgggaagtaatgcagtgaaattggtgagtttggtggtgatttctgggtacctggaactgactcccgctgaaatgtgggcgtggttggacagtagctgggacagacaggagagtccctgaggcttggggataaagacgtgctagagactgcggactaactcagtgaaagtggtgagcttggtggtgatccctgggttcctggaagtgactcccgctgaaatgtgggcgtggttggagagtagctgggacagacaggagagtccgtaagggctgggggtgaagacatgagagagactggcgaggatctcactgaggtctgtgagtttgtaggtgtttctggggtgcgggacaccgactcccgctgaaatctggacgtagttggagagtagctgggacagacaggagagtcatggatggctgggagtgagctgctggatgatggcagtaagaacatatggtatattattgatgaatgaggtgactgtgaagaatctccagaggaggacacgggagagcacaatgacatcagtgattgtcctgcttggtcaggaaagggaaatgtaaagttgtgaaattctgttgatggtggatgtgagagtggtgaagccctgcggcatgatgtagagtacttccacatccctggtgaggagctgccccttgggtctgagtttctgggaggggagagggagaagaagctgggtgaggcaggcatgaatcttgaggagtcagggctgggggaccgctcataatctcccgagacctgtgagtttctgggggactcctgggtgcatggggcggactctcgcagaaacctggggatggttggagagtaactgggagacacaggagagtccctgaggcctgggggtgaagagatgaaagacacaggggaggagcaccgtgaggctcgtgagtttgtaggtgattcctgggtgtggggggctgactccagctgaaatctggggttgtttggggagtagctgggagacacgggagactccccgagagctgcgggtgagctgctgggtgatggcagtaagaacatgtggtatattattgatgaacgtggtgattctaaagaatccccagaggaggacgcgggagaacccaatggcttcattgattgcccatcacggtgaggaaagggaaatgggagcttgtgggattctggtgatgacagaggtgagtgtggtgaagccctggagggtggtgaattgtagctccggatccctggtgaggagcttcctcttaagtctgagtttctgagaggagagagggagaagctgggtgaggctagcatggatcttggggagtccgggctgggggacggttcataagaagagccagacaagaccctactgttcttaggtgcagacatgattaggaaacctgcagctcccaaggacccctaccaatttcctaacccgcagaatgaaggagtgtgtgtgtgtgtgtgtgtgtgtgtgtgtgtgtgtgtgtgtgtgtggtgtgaggtatgtgctccttgagaaaatggaaataaaccaaccaatgagacagacagacagacagagattcacttacccaagtgttctgtcctgtcctctgaatccgcttccaagtcgcaagacgctataagctccaagtccacgcagagcccgcaaaacgctccggccgctgctccgctctgtgaagatctgagtacaggcccgccagggtgggtttaaatagcctcgggcgggcgcagcctggcagcggaaagggcggagcttcactcctcctttccatcagtcacccccaactttcccaggctacaccgcgtaggaaactgctctcctgatttgatttcatgcgccacatttgggacaatctaagaacttacgagtttttttggccaaatatattacgaattacatgcactgaaacactgaaaaccatctagtggttctgtggttctcacattgtggttttgacaccagcagcatccttgcaaccctcaaaccccggagatccacagatctgtgttgtaacaagccctccccctgaccctgatgcatggcagtttaagaattacccgtgtaagtgaaaagacttttaagaaagagtggagatatgcgttgtataaacattcttttgctctggaaccacgtagagacttgagagccagttgggtggagcattcattggatgagggtgcttggcttaggaatatcaaaggtgtggctccagataattcaatcatctaattaagttttcagttatgctaatctgttgtaaaattccgtttgtgtaaattcttttactcagactgagaatggcaatgcctcaacctcaatttccagggagggttgagagcctcaggttgagttgatcaccaatcgcctatggtttcacccatcatgcctatagaatgaggtctccataaaaacccaaaaggactgggtttagagagcttctggataaaacttcccggaaggtagtgcacccctccccacatgccgggcccaaaatctgttttctgaattttttgcaatatccgctatcatacaatggtaaatggaagtgtttccctgcgtgctgtgagctcttccagcaaattcatgcaactaaatcagggagtggtggaaacctgatttatagctatttggtgagaagcgaggtaaaaaaaacatagggcttcccattgttattagagtgggaggccagtctgcggaactgagccctgtggaatctaatgctatgtccaggtagatagtgacataatggaattagaagacacccagctggtgtccacagcagaatggattgtgtgcttgactgactgaaagaaatccccagacatgtcctcacagaaatcttctgtgctgattgttgtgatgtgagaacggaggaaaaacagtttttgtttttttcactcagcctaaaatgtaaacgtgtccagtttctcacgctattgaggatcacgtgatttataataaaaatgtttaatatttgtcaaatttatgtataaaaaggatgttggttttcattttattgctaacaatcaaggtggtcatcgttgatgccttttcatcatttttcttttcactgcgttgttatgtctttcaccccctttttaatttttaatatttcatttaaaaatttttttacaccaggtgcagtggctcacgcctgtaatcccagcactttgggaggccgaggtgggtggatcacgaggtcaggagatcgagaccatcctggctaacacggtgaaaccccgtctctactaaaaaaaaaaaaattacaaaaaattagccgggcgtggtggcaggtgcctgtagtcccagctactggggaggctgaggcaggagaatggtgtgaacctggaagatggaggttgcagtgagccgagatcgcgccactgcactccagcctgggcgacagagcgagactccatctcaaaaaaaaataaaagagaaaagaaaagaactgccccaaattattaactccattctcacctcacatgctgtgagccagggagtagggactttgaggattataaagcatatgagcaaatgtaagttgttaaattacactcaacaaatttgaagtttgaacgctctatgtatatttgataaaattagagatttagtgttaattattttaggtgtaatagcagcatttattacatttctgatcgtgtttctgggcaattgcagttccagattcagctgcacttttcctctaggtcttcattccctgaagaggttgatatgggcatctggtctcattcctgatgcattcctcagatcagagtagttgtcagggtgagggatgagaaaggcatttgtgtgagagagctgtgtggactttggcagatagggaaaaaacaagagtcttgaggtgccatgtgtcccatgcctttggctccccgccttttccaccctgctgtctgccctgaaaggccgccattgccttctggccttgcttgtctttggccaatgggaagtctcaacaggaaagtttggagagaggaagaagtgtgagttggagtatcttgtcccccagttctctctctgcaggattgtcacagattagctgcccttctaaacaacaggtcatagtttaggtggccctggccacacagtcctcttagttccaggctccagggactgctccctccccttacctcttaaggcccaggtgttataatggcacctccctgtcacttcccaggacagagccttatccactgtgacttccttacccccagccaacaccattgtaagccgtctgtttattaaactcccctcaaatttcaatgtgccatctggttcgtgccacggccctgacttgatacaggcaggtagtgtctgaagccagaaattcaggaaaccaaacccccaaccatatatatgtgagtgcatgtgtgtagatgtgtgcttcaaaataaacctgtcccattattggctcttcagtgagaacaggtactggaagtagagggtgagtttatgtctttgcacgtgcatctaatgtataatatccaagccaattctatttgtgcatttgttaatattgagaaacattgattgagtgcttgttaaatgataagatccttaccaagtacagtggataaaagactacagcttggttattttttttttttttaggatttgtagttttttgacaggggaaaggaggagtgttttcttggtaggttttaactattgtaaaatgatgtaattcatgctgtactaatgagttgaacactccttattttggcctttgttggagcccaaaataagaagtgattaatgatgtctcttaaaggtaggaaaggagagaaaaagagtccaaggatttaccaaaaagacatttcatattctattaacctgattctataaccctgtgagctgcaattcaaagggtagccaacagaccagtgccaataaatgatattggtctgtgaccagataatttgagaacttgagtgtagatgtttaaaattttgtcttattgattaacataataataacaatcaggctttaatttgcttaccttcttaattttctttttccagtaatttcttgttactgtatcttaccaaaattatcagtctgtgacagactgaaagtaaccgtaataataatttaaaaactagtcctttatcacagttagtgtgagaagcactatctgagaagacagaaactggttttggccttttattttttaatcttcggagtttccacagtgcctaaagtggcaattttatacagtaagtttctccacgaaggccagaggcaattgtgtttacagagtttatcagatggaatcccaagaaaaaataaacagaacactcaaattgggtaatttgagaagagcttaataaagggacagtctataaagtcgtaggcaggctgtggtaatcaacaaaggataccgcaatatttcagagctagtgatagcagggtaaattactggctttaggactgaagggctaagggaggaggcagtcactaaaacctgaagaaagatttatgggatgacagctgcctgatggaggccatgacctttggtcaatggatatggaatatagccattccacagcaacctctagggaaaaacctgggggaataaatattctgacttcactcttgtcccttccctggatctcttgctggctttccccattggctgaacccaactggaagctaattggcaagggaatccactgatataagcagaacaggaaggggctttagtgtatatgaagtggcaagcttagaaggtctctgtctacccactttggtctacctgcagtctgaggatatttatagctcagtatactgtgagcatttgcagagcagagaatgtgtcttatatgtcataggtgtgtcatcaatacttgcaaaagcaggggatagaatgggtgctggagagagagtttaggaagacaagagtcaaggtgtagatgtttaaaaatttgtattattgattaacataataataaaaatcgggatttaatttgtatgtcttggctaactacaagtccttcagaccacaggcctggccatacaagattaagtcttgcaaatgaaagtggaaatagcagaaggtcgctgtcatcctgagattgctctcttttttttttttttttgagacaaagtgtctctctgttgcccaggctggagtgtagtgatgcaatcacggctcactgcagcctccgcctcccaggtgcaagtgattgtcctgtctcagcctcctgggtagctgggattacaggtgcccgccaccatgcccagctaattttgtatttttagtagagacagggtttcaccatgttgtccaggctggtctcaaattcctggcctcaagtgatccacccgtctggggttcccaaagtgctgggatcacaggtgtgagccactgtgcctagccctgagattgctctcttaatcagcaattccagagcctcttttccagcggaattcagatgtagactatgtcagttcattcacaagtctgagaaatggaaaacaatgtgcaggttttgacccaaaagctt

SEQ ID NO: 60804 - DNA, 509 bp, Homo Sapiens
atattgtatagctattaaaataaaaaatgttcatctgtttaacacccagaaatcactgtgtaccttcagtggtaaaggtaccatacttggaaaacactgcaaaaccactgaaatgtcatgtaagtttcaatatattggcattaaaactatattgccaggataatctcttatactacaaaattacgaaacttctcttaaagagttgagattttaatttttagtttggaaaatatgtattgaaagtaatgagctaggcaatgtgttagaagatgggctattgatattatctaatttttctttgtttaagcgttttgtggctttgttaatagaaagtttcagggagatatggcaaataggcttatttccaatcagttagtggaggctgccctgagtgctgtgtggctactttaagctcatcaagaatattatgtatatggtatgtcgtgcctgactgggggcatttgccatgaatgtaattcttttctcttggacagactggtaacctaagt

SEQ ID NO: 60805 - DNA, 1994 bp, Homo Sapiens
tttttttatgaaacagtctcgctctgtctcccaggttggagtgcagtggcacgatctcggctgactgcaacctccacctcctgggttcaagcgattctcctgcctcagcctccccagtagctgggattacaggcgtgggcccccatgtccagctaatttttatattttcgctctgtctcccaggttggagtgcagtggcacgatctcggctgactgcaacctccacctcctgggttcaagcgattctcctgcctcagcctccccagtagctgggattacaggcgtgggcccccatgtccagctaatttttatatttttagtagagacagggtttcaccatgttgtccaggctggtcttgaacccctgacctcaagtgatccacccacctctgcctcccaaagtgctgggattacaggtgtgagccaccatgccaggccctcttaacctcttcaagtctgttttctcatctgcaaaacagaggtaataagatcagtatcttcttaatggaagcacctggactacatttttttcattcattgttatcataaatgaggactaacctgtctcccgttgggagttttgaacctagacctcatgtcttcatgacgtcatcactgccccaggcccagctgtgtccctacaccagccccagctgacgcatcttctttttctgcctgtagagatggttacaatgcctggcgtgatgcattctggccttcgcagatcctggcggggctgtgccaacgctgtggcctccctgcccctgaataccgagccggtgctgtcaaggtgggcagcaaagtcttcctgacaccaccggagaccctgcccccagggatctcttcacatgtggattgacatctttcctcaagatgtgcctgctccacccccagttgacatcaagcctcggcagccaatcagctatgagctcagagttgtcatctggaacacggaggatgtggttctggatgacgagaatccactcaccggagagatgtcgagtgacatctatgtgaagagctgggtgaaggggttggagcatgacaagcaggagacagacgttcacttcaactccctgactggggaggggaacttcaattggcgctttgtgttccgctttgactacctgcccacggagcgggaggtgagcgtctggcgcaggtctggaccctttgccctggaggaggcggagttccggcagcctgcagtgctggtcctgcaggtctgggactatgaccgcatctctgccaatgacttccttggatccctggagttgcagctaccagacatggtgcgtggggcccggggccccgagctctgctctgtgcagctggcccgcaatggggccgggccgaggtgcaatctgtttcgctgccgccgcctgaggggctggtggccggtagtgaagctgaaggaggcagaggacgtggagcgggaggcgcaggaggctcaggctggcaagaagaagcgaaagcagaggaggaggaagggccggccagaagacctggagttcacagacatgggtggcaatgtgtacatcctcacgggcaaggtggaggcagagtttgagctgctgactgtggaggaggccgagaaacggccagtggggaaggggcggaagcagccagagcctctggagaaacccagccgccccaaaacttccttcaactggtttgtgaacccgctgaagacctttgtcttcttcatctggcgccggtactggcgcaccctggtgctgctgctactggtgctgctcaccgtcttcctcctcctggtcttctacaccatccctggccagatcagccaggtcatcttccgtcccctccacaagtgactctcgctgaccttggacactcacccagggtgccaacccttcaatgcctgctcctggaagtctttcttacccatgtgagctaccccagagtctagtgcttcctctgaataaacctatcacagccacaaaaaaaaaaaaaaaaaaaaaaaaaaaaaaaaa

SEQ ID NO: 60806 - DNA, 505 bp, Homo Sapiens
agcggccgccctttttttttttttttttttttttttgttgaacaagttcagatttattgaaagtaaacatttacattcgctacaatgttggaactattacaaagctggataaaagaggctttagtagcaatagaaagcaagagcaataaaaagtgaatagagaaaatatttggccttactgatctcttggcagtatttacattatgtacatattggtaaatatttataataattctaaggcaccaaaggctaaatagcaggttgcaatactatcctgtgcacaaaaatcaagaaatttattgtaaagaggctgtatagttaaagaaacataggcatatcttaatgtttacataatggagcggctgcatttttaaaaatctcaaatgatacattaaatattgggcagatcgaagatattatttttagaacattaaattatattgactatgtaaataagcactattttttactgacttgctggtaaatgtgaaatgtaatctattcg

SEQ ID NO: 60807 - DNA, 436 bp, Homo Sapiens
gtccttaggggatggtaaatttgacagggctgtaagtgagcacttgttgtctgctgaacactgggtggtcaagagacccactgagattggttagttggaacagaacatgaagagtggataccttaatctgcttgggctgctataacaaaataccatagactgggtggcttaaacaatggaagtttatttctcatagtactgaaagctgcgaagtccaaaatcaatgtactggcagattaagttcttggtgaggaccctcttcctggctcgtaaatggctgacttctcactgtatccttacatgacagggagagaaacagctcaggtgtttcctcttccaagggcactaatcccattgtgtgggctccaccctcatgacctcaactaaacctagttactgcccccacccacctcctaatgtaattatagtaagagtc

SEQ ID NO: 60808 - DNA, 1013 bp, Homo Sapiens
atcattcctagaactgaagttgaaaaggccatcaggatgtcccggagccgtatcaatgatgctttccgtctgaatgacaacagcctagagtttctggggatacagccaacacttggacctcctaaccagccccctgtttccatatggctgattgtttttggagttgtgatgggagtgatagtggttggcattgtcatcctgatcttcactgggatcagagatcggaagaagaaaaataaagcaagaagtggagaaaatccttatgcctccatcgatattagcaaaggagaaaataatccaggattccaaaacactgatgatgttcagacctccttttagaaaaatctatgtttttcctcttgaggtgattttgttgtatgtaaatgttaatttcatggtatagaaaatataagatgataaagatatcattaaatgtcaaaactatgactctgttcagaaaaaaaattgtccaaagacaacatggccaaggagagagcatcttcattgacattgctttcagtatttatttctgtctctggatttgacttctgttctgtttcttaataaggattttgtattagagtatattagggaaagtgtgtatttggtctcacaggctgttcagggataatctaaatgtaaatgtctgttgaatttctgaagttgaaaacaaggatatatcattggagcaagtgttggatcttgtatggaatatggatggatcacttgtagaggacattgctttttcacttccaaggtgcttgatcaacatctccctgacaacacaaaactagagccaggggcctccgtgaactcccagagcatgcctgatagaaactcatttctactgttctctaactgtggagtgaatggaaattccaactgtatgttcaccctctgaagtgggtacccagtctcttaaatcttttgtatttgctcacagtgtttgagcagtgctgagcacaaagcagacactcaataaatgctagatttacacaaaaaaaaaaaaaaaa

SEQ ID NO: 60809 - DNA, 1676 bp, Homo Sapiens
ccgacaacaggaattttctccgagagcgggccgggctcagttcagctgctgtccagacccggatcggcaacagtgccgcctccagacgttctcctgccgctcgcccgcccgtcccagcgcccccagccctcccgcgagggcgccccgggacggaaggatccaccagtctgtcggcgcccgccgttctcgtggtcgccgtcgccgtcgtcgtggtggtagtctccgccgtcgcctgggccatggccaattacatccacgtccctcccggctccccggaggtgcccaagctgaacgtcaccgttcaggatcaggaggagcatcgctgccgggagggggccctgagcctcctgcaacacctgcggcctcactgggacccccaggaggtgaccctgcagctcttcacagatggaatcacaaataaacttattggctgttacgtgggaaacaccatggaggatgtagtcctggtgagaatttatggcaataagactgagttattagtcgatcgagatgaggaagtaaagagttttcgagtgttgcaggctcatggggtgcaccacaactctactgtaccttcaataatggactatgctatgaatttatacaaggagaagcactggatccaaagcatgtctgcaacccagccattttcaggctaatagctcgtcagcttgctaaaatccatgctattcatgcacacaatggctggatccccaaatctaatctttggctaaagatgggaaagtatttctctctcattcccacaggatttgcagatgaagacattaataaaaggttcctaagtgatatcccaagctctcagattctccaggaagagatgacttggatgaaggagattctttccaacctgggctcacctgttgtgctttgccataatgacctattgtgtaagaatataatctacaatgagaaacaaggtgatgtacagttcattgattatgaatattctggatacaactacctggcatatgatattggaaatcatttcaatgaatttgcaggtgtgagtgatgtagactatagtctgtatccagatagagaactacagagtcagtggctgcgtgcttaccttgaagcctacaaagaatttaagggctttgggactgaagttactgaaaaggaggtagaaatactcttcattcaagtcaatcagtttgcattgggtgaaaacttgaattttatcattggcaacaaatattgtcagttattttcactgaaatggcttctcatttcttttggggattgtgggctttgattcaagccaaatactccactattgagtttgatttccttgggtatgcaattgttcgttttaaccagtactttaaaatgaagcctgaggttactgcattaaaagtgcctgagtaaagaagagatttaattattctccagtagctgagcaatgcttgtgaatcttttcttaagaaatcccaaaaagccaatattagttaaaattctgttgtttaatttggttatcttgctttataaattatgcctctaaacaatcaaatctatttttgaaatagactgaatgatgtcaagaaatatacctactgctatccgtatgtggtggattagaaatgtgttaaatctgcaaaaggtataaagatgtcagtttaatttctttgataatttaaaaaaaaaaaaaaaaaaaa

SEQ ID NO: 60810 - DNA, 950 bp, Homo Sapiens
cttatctaaaaattccattgcttttactaaatggtattatactcagtgtattaaatggtaattggggatggagattggtagcatttagggacagtacatatgactagaatgttttcttcccctcttcttagtataatgatcttaggtgacctggaaagtatcttaccttatttgatagtcttccatactgttagaaaacaggtaatggatgttatcaggtaattgctgataaatgtttgaaaattagttttttgtaaggacttagtgtatcatggtacagctagagtgtggaacctattttttatttcacccttagtagctttgcatttgtatggaaatgtttaatagtagttgctatacattttttaacatcaaagaaatagttcatgattatggtaagtactttggaagatatccttttcagtatctttttaaatgctaaaatacctctttttcaaaggcattttaaatagaagaaggaggaagaaggctctatgctcatcgtgatcccagtggagttttaggaacagtaagctttaagctgcttttaccagttgaactccaaaaataatgtacgagagagatggcttctttgtctgtctccagggtggggcaaggtagcagaaggtgggctgtcaaaagtaatgaaggatgtaccgctgcttgaaacatactctaggaagaactgggaagacagaacggagaccaacaaggtcagataacagtcaaccggtcaaactatacatattgaaaagggcacgaagacggcccaaaaccaccacctacaaaaacacacacacacatggcaaaccacactgcaaaacacccgcacaatttcgaacacagcgcacagatagcggcgccggccacatcaacagcacaggcaacccgcaacggactagggcgataatcagacaacataagggcgagaagacaatcaggaagcccgc

SEQ ID NO: 60811 - DNA, 808 bp, Homo Sapiens
gtcggtgtctactgtaacaccaccagatttaacaatgttaatgttacgccatatttgtttcaaatatttttgtaatattgaacattatggatagagttaaagcttgtttgtatccatcccgttgtttacattctccatcccctacataggtaaccactattctgaagttgatgtgtattctttgtgtacatgcttttataccttttctgcatatgtatgtatccataaataatatgtagtctgttgtgtgtttttaaactttacacagtggatgtcgtactcttacatgtattctgcagcttgcatttttcacacattcattttgaatattcgttcatgttaacaatgtagatctagttttctttttaaactctgtatagtattcttatgtatgacatacacttgttgttatacatttgaattatttccaggtattcttttttgtgtgtggtatgtaaagtcacgatggcagagatttttgaaggaagataaattattttaggattacatttacagcgtcagtgcccacttcaaggtttatgaaaatttggatgcccagaaacaagtacttcgtagttggaggaataaattctgtctgtgtgcagcttattattacaaagtcttactgttagaacaattatgtatattacacattcttaatcagttatttgaaatactttagaattttcaatattcaattcatagcctttttctctgttagaaaatatagggtggctaatgatggagaagcaattaacatttggtctgaattgagaacctggagatgtttcctataccttgaacatgt

SEQ ID NO: 60812 - DNA, 455 bp, Homo Sapiens
  misc_feature (402)..(402): n is a, c, g, or t
  misc_feature (407)..(407): n is a, c, g, or t
tttgtgccaaacgaaacgatttaatctgttcatatagggtaggggtggagcaacagcagagaacacttcagggtttctcacctagggtgctctgtgatgactcagggactggcctggctcctttgggtcattcatcaaagccattttgaagcaaggactgcttagtaggagctgagctttccaccagaaagacaacttaggaaatagctcctggctgtgagaacctaagaggtatgcatggttctggatgggaatctcaaagatgatggcggtcatcaaatggaactgaagcaggtagagaaagtggtttcaaaaggatctaaagatgacggaaaacatttcaacagttaaaccacttagataactaataggaagaattcactgggaagaaaaatccccacngaagnctccagagaatgggctatattgctgaccaggaagggagatataggaag

SEQ ID NO: 60813 - DNA, 354 bp, Homo Sapiens
  misc_feature (280)..(280): n is a, c, g, or t
ctggtaaaatggtggttattctgaattctggttaaactttaaattgataattgctattatcatttcaaaattatttaaaatatgaccagatggattcctgcttccatgaattcaatggaattcaaatcttcccatttaaaataattttgtcggttgacctagaccccggggatcgggggcacccgtgggagcacggagattcgcctgggggtgggagggggaagccgtcagagagggggctgagctggggaagcagagaggggctcggggacagccgggnagagagagggtcgtgtcggagacccagtggggagagtagatgggccgggaaaggaggaagggtgagagtgggca

SEQ ID NO: 60814 - DNA, 514 bp, Homo Sapiens
gagtgaggcccccagttcattgagagcttttggacattcccctcttcttgacctcacagcaggtaagtaagtctctgcaggtgtgctctgtgatcgaggtttctgaggtcaggccacaggccccaaacatttgctattccctcctacagcaaaataggcttatcaaggtagatcatcttccatttcactgtctgaaacttgaaatctcacttactacatcactttatttacatatggagaaaagctgacctgtcaaaatactttgacctgtccatgtgtgagcagcaaattccatttgtgtcaatgaactttttcgaggcgtatccgaccggaacgtgtgggttgtgctgggccttgacaaccgttccagggtggctgttctttctcgaagacgcgatcgttctgtaccgtcaggcatggcactcaacacacggttttgtagatgccttcctctgtaagaaacaaggcggcatccaggaactgctgtattctgccccctggtctccgtgactag

SEQ ID NO: 60815 - DNA, 587 bp, Homo Sapiens
tttggcaagtaatttctaagcactaaaaagatacacagaaggaaaatcacaggctcttctccttccctcaaaaccacctgagaattaaaagcattaaggactttatacagctgtgtaacaactctgagcaggtaagttttactccagaaaaagaataatctataactactttggaggactttatcttgcccaccacccttccaaagcagggaatctttgctttggtgaggctgcttcagtggcagactgcaaggctatgtcctgacttacaggaggctcagtgaggagctcccagggctcttcttatatacctcagagagagagctctgaatgtcgcccagctactgggcagttcttgtatcaaaccccactgagcaatcttcttgaaatacttcactacttcctactcatttgataaaatggcaacaataaattatgcaaaactaagataaaagagattaccaattttgaccaaaactcacataaaattgcccagtagactcatgtgagaagctcatgggacaaacaaatttcagctagatatttaagtaccatatttgtaactatattctgagtaacacttagca

SEQ ID NO: 60816 - DNA, 490 bp, Homo Sapiens
aacagaacaaagtagcttcttcctttatcattcctctacccctgaaccactacacagattgctttgtctttgtatttaacattccaggtcttattattgatgctttcggagagctaagagaccagcaggaacaagtacgagaagatatggaggtaatgttactctaactactaatcccagctctattttaatatccccagaagcaaatagattttttaaacaataggttttactattacttagggccagtactaagcaagaacgcagtttgttttccatgccctgttctctgcaccctgccatacccctgccaggccggccactctgctgcctcctccactgtcccacaataggagggagcagtatcctcagctaatcaggagctaagtgtatggcactactgagtgaatgactaatagccaatgtatggcactactgagtgaatgactaatagccaaaagcattagaaagaaagttttcattatccttc

SEQ ID NO: 60817 - DNA, 401 bp, Homo Sapiens
aactacttggtgatatcctaattaaccatgctcaattgattgctttcaaaataagaactaagagctctcatctagtcaagtggaagctaattcaactcttttacactatggcaatgataaatctcacacacatacttccactcatacccaccacatgtattatattagcaatatcatactctaggtcttctggtttgagtcagtataacatgataggcacatttctatggaatttcatgcattattttcttttaatgcttatgagggtaagtaccaaaatatccatttttcattcacagagtagaattattttttgactttttttgtgatcttttgaccaactctcacatccagaaaatgtgccatttctcttggaaaaaagcaaaagagtatgtgggtga

SEQ ID NO: 60818 - DNA, 605 bp, Homo Sapiens
tttttttttgttctgagccaccaacgtaatttatgtctaagaagatactctagagatatggcggcaataataaaatcaaaatttttcttataggccaggcagggtggcttatgcctataatcccagcactttgggaggccgaggtgggcagattacttgagcccaggagttcaagtgctcctgagcaaggagttcaagtgcagcctaagcgacatggtgaaaccccatcactaaaaaaaataaaaaatttttctaatcaactccacaaccttttacatattaaacatacaatgctcaaaaaagattcttcaagtttgtttagatgtctaacttaaaattttctagtaaatgtaagggctagtactgttcctgtacccctaaaggtaatttacctacattcccacaggaaccactgaaagaaccccaacttggagtactgcaacccaaatgttccaagaacatccataatttaatcttcccaagacacatataccttaaacaccttctcatggaatgtcatgaattcctgaacccactttcaccgccttgccctatctctggtccatcttctctcttataagttcggggaaaaacagcattggagg

SEQ ID NO: 60819 - DNA, 511 bp, Homo Sapiens
cagtgaattgaatttaggtgacactatacaagagctatgacgtcgcatgcacgcgtacgtaagcttggatcctctagagcggccgcctactactactaaattcgcggccgcgtcgacccactgcacttgttgcccaggctggcgtgcagtggcgcgatctcggctcactgcaaccttcacctcccagtttctcctgcctcagcctcccaagcagctggagttacaggtgcccaccaccatgcccagctaatttttttttttttgtatttttagtagagacagggtttcaccacgttggccagacttggtctcgaactcccaacctcaggtgatccacccgcctcaacctcccaaagtgctgggattacaggtatgagccaccgcactctaagataaatttctaaagcccaattgcttggcccacattcagtctgaggaatggcaatccaacattctcaatccaagaaagtctggaccagccattgggcacaagttcacatcctccaggagt

SEQ ID NO: 60820 - DNA, 529 bp, Homo Sapiens
ttgaatttaggtgacactatagaagagctatgacgtcgcatgcacgcgtacgtaagcttggatcctctagagcggccgcctactactactaaattcgcggccgcgtcgactttttttttttttttttaaaaattgattcttgtctctttttaggtgagaaatacagcattacaggtaatcagtcatgtatatgtgaaggtctatattatctgaaaatgaccatatgattgattgtgatcatgttatacatacacaaatcttcctatctttctttttaacaaaaacagggtctcgcaatgtcacccagggttgatctcgaactcctgagctcaagctatcctcccacctcagcctcccaaagtgctgggattacacaggtgagccactgagcctggcccatatgtttgtattttgcttatatacaatgaactcttaatgcttagaaatatttgttgacataatggtaataataacctaacacaagatgaatacatcttaggataaaaagtgctgcaagttctattttaag

SEQ ID NO: 60821 - DNA, 496 bp, Homo Sapiens
  misc_feature (415)..(415): n is a, c, g, or t
tttttttttagtagatacagggtttcaccatgttgcccaggctggtctcgaactcccgacctgaagtgatccacccgtcttggcctcccaaagtgttgggattacagatgttagctactgcacccagcctcctgaaacctctttagaaggagctgggaaactccaggagaacacagaagcaagccaaattttaagggcctaatgggctgtaaattactccatcttggctaaagtaagctagggcagtgctagaggtcttaaaacttgcctccataaccattccaggatctaggggaagaattctgcctaatgagatggaaggggataaagggtactcattacgccccagtggaaccagacaaagaaatccggtggggcactggctccctacccaggtctgatggctgaagatcanaggacaaacaagaatcaaaggaaaccaagcagaaactgtgctctgtttatggatatataaattagttatgtttatatatgg

SEQ ID NO: 60822 - DNA, 569 bp, Homo Sapiens
ttatgtacgatttcatttatatgaatgtccagagtaggcaaatccatagagacagaaaagatatcagtggttgccaggggataatgcagggaggggaagaggagaatgactgcttaaaaggtttcctcttggggtgatgaaaatgttccagaactagatagtggtaacagtttcacaacattttaaatgtactaaagtcactgaattatacactttaaaatggtgaaaatgatgaattttaaccattcatagccatgttttatgaattttaccattttttaagtaaagggaaaagaaggttctgagattcaaacctttgcaatcaaaataaactgtcgaatacagaagcccgtaaacatgttctgaatactatttaatttttctgcccatgaaaccaagcctaattctaaataatataagagccaaaataaactgtctaagctggtattaacctttttcttaaattaaaaatgttatcaggttgataggtgcagctaaccaccatgggacacgtttacctatgtaacaaacctgcacatcctgcacatgtatcctggaacttaaataaa

SEQ ID NO: 60823 - DNA, 479 bp, Homo Sapiens
tttttattttcagatatagttctttttattataagaaattttggtcccccatatgacaagtttaagtggttaacttcattttgagctacatgctcattcaactacaaacttctactataaaactcagtttttttcttccgtttgttgttcttattctggcgcaaaagtcaggttacatctttccttctgggaagatgggctgttgaatgaccaatagtaatgggagtaagactgaggaatccacaacttccttctttctaaaggtaaacagggttatctctccataaagtcagtttgctgaaggagcagtgtaaaattagatgacaaaagtgaacattcttcttggcaaaataacactgaagcctccaagttggccaatgcaattttttttctcttttttttttttttttttgagatggagtctcactctgttgcccaggctggagtgcagtgtcatgatcatggctcactgcagcctc

SEQ ID NO: 60824 - DNA, 454 bp, Homo Sapiens
  misc_feature (345)..(345): n is a, c, g, or t
tataaattcatgggatatgagtataatttaactatattgatatattgcactatggcgaattcaaggccttcagtgtatccatcactggaacaacacatattgtatccaccaagcaacctgaaagattttttaaaatcagcaaacattcttaattgtattatatgtaattaactttttccattatggttagtactttatgtatgtagtttaagaaatattggtgtattcaagatcataaattcccctaggcattctctagaagctctattgttttacctatcacatttagatcaacaatccatctacaatttcgttatgaatgatgtgaagtagagaatcaacatnacattttttccataaacatatttattgaaaagaccatcctttctccactgctctaccgtggtcatctttggtggttatagactgaatgtttgtgtgtcccccaaattca

SEQ ID NO: 60825 - DNA, 490 bp, Homo Sapiens
ttggatgcattcatagatactttatttaaaaagtacactaattgaagttttacaccattttatgattcatcaaacacagcaactgaatactggcgtatagcaacattacagatgatgttagtctaagataaaactcataacacattttaaaaagggtgaaaggaaggaaaggaaaaaggatacaaggctgtagaaagattttaaaaacaaacgtcgtatgtctgaacctttgcctggagtttcatattttgtgaaaagcagtttgtaagtagaggactcgtaagtgcacctagtacactgcaatggcacagacacggcagatagtcaataaaatgatctttaacttctgatctaggttatttttgttgttgttcatgtattaacctagtgaaactcagccaatagatggagtggcattgacctgttacaacttccaaaatcccatccaaccttagtgtcctctgaagttctccataacttattgtctgtt

SEQ ID NO: 60826 - DNA, 686 bp, Homo Sapiens
tgtatctgtggatccagtagtaatcatgactgctccctctaggaaaagcagcaatattttataatttgggaatgaaataatgtttgacatggtaaaaaaggaataaatcttgacttcctttgcatgccaatttgaaattaccttaatttctttttatttttttaaagtgtctcactctgtcacccaggctgaagtgcaagtgcagtggtgtgaacacagctgactgcagcctcaacctcctgggctcaaacaatcctcctgcctcagcctcccaagtagctaagaccacaggtgcatgccaccaccacacccagctaatttttctattttctgtagagatggggtctcgccacattgcccagccggtctcgaactcctgggttaaagctatcctcccacctcagcttcacaatgtgctggaattagaggcatgagccaccatgtccagccactaatttcttttttaaagaaactgtaacactggagaagtgatgccttttgcagaagttctgaaacacacaggttggggaagagagaatggcatctttcggtaaaggcacttaattaccgagaaaaaatttaatagggggtattaaattggtcgggcccaatggcttcacccttgttatcccagcccttttgggaggcccaggcaggccagaccccaaggtcagggaaatcgagac

SEQ ID NO: 60827 - DNA, 428 bp, Homo Sapiens
  misc_feature (72)..(72): n is a, c, g, or t
  misc_feature (85)..(85): n is a, c, g, or t
  misc_feature (261)..(261): n is a, c, g, or t
  misc_feature (329)..(329): n is a, c, g, or t
  misc_feature (411)..(411): n is a, c, g, or t
  misc_feature (423)..(423): n is a, c, g, or t
ttttttttttttttttttacctgcaggaagatctctttattccttccccttcccactccccatcaaccaggnccccctgcagcanccttccttgtgaaatcacagctgctatgacagtgaccagctccaaaccaccctgtgtcactgaaccttgggtgctgggtgacacatgggcaggaaaggcaggaagagcagggatctgagggcctgggggctgggcaagccttcaggggtggggtgggtgctgatcaatgccaggtnatcaatgccaggtgattgggacccactgagtaccagggacaaacctgggagtcacgtcaactggcctnacatcagttgccttggcaaaatccacttgccctttgaaccctaacccgggaaaaagattttattttcagcccggttagcccntgggtaaacttnaagtt

SEQ ID NO: 60828 - DNA, 474 bp, Homo Sapiens
  misc_feature (363)..(363): n is a, c, g, or t
  misc_feature (440)..(440): n is a, c, g, or t
  misc_feature (453)..(453): n is a, c, g, or t
  misc_feature (461)..(461): n is a, c, g, or t
  misc_feature (474)..(474): n is a, c, g, or t
gagacctttgtggatgcactcaggatacattcctccttgccccatcccctttgctgcctcttattcattcaacaaatatcctgaaggatgagaaaaaggctaggcttgcagagtgctatggatacaggaaacagtatataaaaaagttccagatggtggctcacacctgtaatcccagcactttgggaggccgaggtgggcagatcacgaggtcaggagttcaagaccagactggccaacatggtggaacctgtctctactaaaaatacaaaaattagctgggcctggtggcgggcgcctgtaatcccagctagtcgggaggctgaggcaggagaatcacttgaacctgggaggcggaggttncagtgagccaagatttgagtcactgcactccagcctgggtgacagagcaagactccatctcgaaaaaagttccagangtgggaaagagcntgctaccntctgggggctaan

SEQ ID NO: 60829 - DNA, 445 bp, Homo Sapiens
catttttgagtctactttatttacagttatttatcctttcttgaaaacttttagcatcgccttgattaaaataagttcataaaataatcttcactgtatttgttacatatggcacagaataatttagcactttataaatatgtctcattgatgcacaaatgggaggagcaccctttgctgaaagcagtacagtgacttagttcaatttggctacggtagcactttaaaaaattaccatgagatggcgctgtggccaagtaaatgcagtatgctttaaacagttttccctaattatggcagttaattgcttttttttgaatatagaggaatctatcattcaacttaaagtagagcaaggtttgttactccgttttaatagtattcattaaaagtgaatcctttaatcacagatccataaatcatttgacaactgtgtttcacttag

SEQ ID NO: 60830 - DNA, 553 bp, Homo Sapiens
gcaaaggtcattttcatcatgagcacagagacaggtgtttaaccatccatttttagccttcatgggcaggtgaggtacaaatagccaagtatctccaatatacatattctcatttctttctcttctttcctccaaccctgggtgcaaatgaatgcactctgtctcttacacacacatattcatgtgtgaaaatgtatgtatacacaaattaagagtataaaaatcaactggaagaggaagtatcacctttacttgaatcaatatctacaactgtagcttggtatacagcaaaagtagtatattttacaatggacctcagttgaagaactgaaatggactggtaaacatcattttttaaatggtaaaatgtttatgtgaggtaatttcttaagcatctaaaaagaaagaatgtgcctatcctctaattttatattgaaaaatctaacctatgtggggctataagagatgtaacaagccactatcattaagaaccataatttcattttaaggttactgttagttatttatttaaaaaaaattttttttagagatg

SEQ ID NO: 60831 - DNA, 744 bp, Homo Sapiens
  misc_feature (524)..(524): n is a, c, g, or t
aggtctgtttgatgatcttagctcttgacgtcagcactcagactcttagggtcacccaatccatgtgccgctcccagcaacagggaaggcatttctctatcagtttgttggtaaatgattattgacaaacaatgtgctgggaatgtggagtgatttgagtagatctggcctctattctcatggagcttcctttctagaggggaaggcagatgatggatggataaatataaatgattctaataggttggtgcagcagtcattaaaagtaatggcaaaaaaaaaccaaaagaaacggggaggagccgttgctgccgttcattgatagtaatggcaaaacccgcgacgacttgtgcgccaacctgacccagtaaccacgggtgtgcaaatgtggcgatgggcaagttccgagtgctaggagagcatctagcttcccggagtcaggagacgggggttggcaacctaaccaaggttaagtccaagtgaggggggtgcgcagggaagcggttatttattttttttttttnatttttattttttttttttttttttttttttttattattttattattatttttttttataatttattttttataatatttttatataatttaattattttttatttattttttttttttataaatatttatattatatttttatttttaatattttttttatttatatattaattaatatttttttatttattaattatttttatatttatattttttcc

SEQ ID NO: 60832 - DNA, 585 bp, Homo Sapiens
tttttttttaaaaatcccaatgatcaagcaagcaaaaggagcagctttgtttttaactattgtccactacaattccactctgagcccgtacttctttttgttggggaatccccctccccaattaattaagtttaattaaggtgagtctaagttcaaaatgtaacttagtggaataggagtacagtaggaatattttattcatacctaatggcaaatgtgtgagacactactaaaatactaagtattcaaatcaagtaattccagcagccactcaaaaattaatccttacctgctgtggtcttgttaaacagtatgaaaacttatacaacagaaactagtgccagacaaaatgttttcttgtttttctaaaaggggtggatgtaaggtagagccaaagttgccagccctactaaccttacagcttccttaattatgacaatcacaatgaccgcccgaattatcaatcccaaagttgtcctctgtgagggcagttggcatccctttggctcaacttcgcgggggtttttttgtttgttggtcggggttttttttggttttttttggatagggcgagggcggggggcg

SEQ ID NO: 60833 - DNA, 595 bp, Homo Sapiens
tttaattaaaggtcatttagtgctaggctgataaccaaggaatttaagatagtaacaaagctaaaaaaaaaaacaataaaacgagaccacagaaatgtcctcaagaagcccaatcacatctaaaatcagtttcccttctgtttgggtgaaaattctaatcgcacgattcacttaacagtaccatttaggacatttaaggatttgtggcatcatcagttctaggtagcacatgaagctgtgaagctggatgtcttatggagaaagaaaataaagattctattgaccatttaaattagacaatgaatgttgttttctaaattcatcttttataagtgtaatcacatcaccttataagcagctacttgttttctcttatttcatatttaaaaagtagctctgacaggtgagaggaagatttttccctgcatacccttttattatttttgaagttaaaaaaaagtttacaatctagtaaatgaatcaaagttttctttttaaagaaaaggaaaaatagttttgcttttcctgaatttggatagctaactttggtgagaactatgttcaactaatatctacagagaatatcataggtaga

SEQ ID NO: 60834 - DNA, 616 bp, Homo Sapiens
  misc_feature (514)..(514): n is a, c, g, or t
  misc_feature (545)..(545): n is a, c, g, or t
tttaatgttagaattcaatgtttgtgctttattagtatgaattttataatgtagggattggtgataatcttttctgaaactggaaggaatttcatcagtctggtgattggttgtgcttatgtcttccttggtcagagaagcaacagtgagaaggaaattcttccttggcttgatggcatgtagcgttggcagatagattaagatgtcaggaggactaggcaaaaaattggcatacattgagacaaaacacatgcaagcacacactctaaaataattaaatacctaaaatagctgctggagagaacagaaacagctacaccagaatggcagaatgctcctctcaagagaccttcctcccaaatcacctgtgatttaaaaaatagctatcctgatagattatatattgttgaagataacagacttatgttgtttgttgaatattttactggaaaagatcataagaggtcatttcacccagacccattagtatagtatagagattaaccactgcttnctcccaactcaattaatatttgagccacctnccatttacagagcagtgcactagaatggtagaaagccaaggtgtatctgtaatttcatggatttggattac

SEQ ID NO: 60835 - DNA, 431 bp, Homo Sapiens
taaatagcaattcaaagattttctattccttagtacaaaatgtctgcgagtcaatccatttcctctttaaaatatttagacatggtgaatgtgaaagttctacccaaaaagctttaaagtttatatcatctacttccaacaataggatcaattagcattgaaagtctaaaaagtcttttaaaacaaaatattaattttaatgacaatcctaaaatcaactatgcctttaattttactaaatacacaaggtcaagaattacttttccattagattccactttaagaaattccaacaggaaatgacaattgctaggaattaccaaatttgggcaaggtgttctttgaaaagtccaccaataaagcaccatgttacaaagtttggataaaccaaaaaataataggtactaaaaaccaaaaaggatggcaaatta

SEQ ID NO: 60836 - DNA, 445 bp, Homo Sapiens
tgactgcattaagagttttacagttagttctagatattaaacaatttaaactaaggctgctggatcaatgtaaacttttatgctgattttctatttgcttgatctataatgcagaatatgaatggaaactggggcaaaatgtgttgccccacctgaaaacttcatatctgaaatgattaatcgtgggaagaaacgatttctagtggggcatatattattcagaaatgattaatcattgttgcaatggtttcagccccctgcgtaaggtggtcaggttatattaatcacatgcatacagatgaagagatgtatcacttaggcaacattaacatattcaaattatttgcatagtaggcaactttatatacataaaaactttgagaattagacagggaagctataaaataagggtaacgtttaccttccactttggtttgcctaaagt

SEQ ID NO: 60837 - DNA, 490 bp, Homo Sapiens
  misc_feature (438)..(438): n is a, c, g, or t
aagtgtttttgtaattactgacttcctaatgaatgggaggaatcacctctcctaggccaacactttgcaatgtaactcattcttatgctttggctagcctaacactttgaaatcaattcatagtgaaaatcctttcaaagtgaaggataagacagcaactataagcaaggtaaatccgctgggaaaatgactatacataggcaaagggaaagcttgaagtggtcagacttttattcccccaggggagagctgtattattcacacagagtaaactgtatcaaaacacaatacaactaatgatggaatagttacctctcattctcaagcaatcctagcacagaaaacccttccccttgtatcctcattctctccctgaatgtaagaagtaaaccctgactttaagcctactctcaactcatacctttcctaagtcagttntcatttggacacttgtgctgtgacatcttttggaagctgggcatcatacagc

SEQ ID NO: 60838 - DNA, 433 bp, Homo Sapiens
  misc_feature (264)..(264): n is a, c, g, or t
  misc_feature (353)..(353): n is a, c, g, or t
aatgatcaatcctgttgacagttttcccgtccatcttccagaagaactcactactcaaccaactgcctggtattcagctgtgactgtgaggatggataactatatttccttaagaaatagcaggaaggtatctcatccaagcagaaaataagaccaacagttgtccaggtctcagtggttctgcatttcttcctaaaagagaaatatgtctctaaacatctctttcccacctcatggggttgggggaagcaatatgctcagaanaattttaactactccaggcagctgaatagaacaagctgaaaaccctagatgtgttctccacattactgtgacagaatgcaagttgtgtnttccgaaagatttcctcgctggaattataaagcgtacagcaaggccagcctgctgtactgccacctcgctcttgctccca

SEQ ID NO: 60839 - DNA, 493 bp, Homo Sapiens
  misc_feature (448)..(448): n is a, c, g, or t
cagacatggtctcactctgtcgcccaagctggagtgcagtggcgcaatgatagctcactgcaaccttgagctcctgggctcaggcaatcttcctgcctcagccttccaaagcactgggattccaggcacaaaccaccgtgcccagccagcgcttcacttctttgttgccttcaaggtaatgatataaagcaacaattcaataccaagttggtaaaataatttgtatttcaaacagaaagactgcctaaaaatattaccttttgctcctagcacccagacaaacaatgaataaagggaaataaggaaaccctggcagctgagaaggcctcctagtcaatagatccagtttctcccaagttcatactgcagatgaacttgtagttcatttaagtatctagatctctttccttcatgtagagaccttaatcaaagactcttctcaggattntatttcacagcctaagaaatgtttatttaatttaataaaatactc

SEQ ID NO: 60840 - DNA, 546 bp, Homo Sapiens
tttttttttttttttttaagaaaaacatttaggtatgtgtgaactcaggagtcataacctgcaatgaacccaactctgtaacacaacacagataccacagatggactgcaaaggccagtcctgaggttagctagatctgacatggaaattttcaattttctgaaccaataaattcttttgttaacttcttttttgttagcccaagttacattagatttttgacccctgaaatcaaaagagaattaaccaataacaaatactaagaactcttcactcttcacactctgagtcatcacttccttctccattccatcgcataggatgttttcagaatgacagtattaaaatgaaaatgtgattagatcattcactctacagtttctccttgtttacaagataaatattaaccctatagcttatctctgctacctttacctccccacctaccattctaattcatacacactgtaagccaacaattctgaacatttacccattctctgtgtctgcaatcccttctcagagtcagctcctctggaaaggagt

SEQ ID NO: 60841 - DNA, 492 bp, Homo Sapiens
ttttagtttttttaaaatttttattttagactcagggggtgcatgtacatgcttgtcccatggatatattgggtataggtggggattgggcttccattgtacacattacccaaagagtgaacactgtacttaaacggagtaattttaaagggagtgcaacgtaaccaaagctcagtagccaagattaaatcatgttgggagcagcagaaacaggttttcaagaaagtaaatcaattttagtgacgaatttgacaagcattcctaaaacagagaattaaaaaggaatgaaaataatgagataaccacataaaggtgctaatcatggagaattaacaaatttctgaagagaacaaacaagacaggtattaaagttgttaacagcttattcaaaaacgtcaaaagaattctccccaaagcaaaacaaaacaaaccccgtttgaagagatcaggaagactcatgtattccaggcaacattaagaagttttaaaatt

SEQ ID NO: 60842 - DNA, 533 bp, Homo Sapiens
agctgtgatgttccagagttacccgaccctcagtggaatgggctgctgagggtcaggagtgcagggagctggcaggggaaaattaggaagaagagcgtaacaaaggtcaaagtcatcagacctagtctagttttctataggattgaaaattaccaattattctcaagtttctgctattagcgaccaatgttttccatctgaaacagacccctccttttttaaaaaaggaaatgcacaaaaaggaagcaaactcttcgaaaattctgattgttttgcatcccagcagcaaataaaaatcatcaatagaactcactcttagccttgagcaatattttctaaaacaaaacacaaagaacctgtggtatttaactattctgttattgatttactgtggtttccaaggtaatgttgaagaaaattaaatgtacagaagcctgaaatgcgtttttgatggtggtgactggtgtgacctgcattttccaaggtggtgtcactggtcatgggcagaatgaatgactgagggagcacacttt

SEQ ID NO: 60843 - DNA, 492 bp, Homo Sapiens
tttttatacataacatacttttatacattttaaccctgaagataagaaaaataattgttgcttgaaaaaattctttcaggcagccatttggttggtgtcaagagaaactgaccctccacgagtttagtgtctgccaggtcggcatcatcagctcaagtcagtgaatcaggtatgtgacacgcttcacagcgactgttccccacatcctgccaatgcgtcttctcctacagtacaccagatgacgaggcatttccaggattacccttgcctgtggctttcccttttcattttttgttgctggattaactgtatgacttagtattatttcctcttctcccttcttctatggccttccattttagttactcataaatcctttcagaatatcctcagaaagctccataaagggaagctctggagatggaaaatctgagggagaagattgggtattggaatgtacttggctttcctggcatctgctgcaaacctctg

SEQ ID NO: 60844 - DNA, 406 bp, Homo Sapiens
ttttagatttgcaaaataaagtattttattcctttctcattacaatggtagagacagaaaatttcattaaagcatcataaacttcatagtacacacttaagtgtgccaaaaaagcaaacaaaacaaagaatgttaggactagcaatagcttcatagggcaattggtgtccagcccctgcttttcagatgaaaatgtaaggtcacaggttagcagaattgcttaataatacaagttaggcaatatagtattttactcatagttagtatatacagtatttctcattataactgatataatagaaaaaaacctttcagctttcttgcaattaaaaagtgacaggtgaggttgcagtaagcctagatagcaccactgcactccagcctgggtaacagagcaagaccctgt

SEQ ID NO: 60845 - DNA, 551 bp, Homo Sapiens
ctatagaagagctatgacgtcgcatgcacgcgtacgtaagcttggatcctctatagcggccgcctactactactaaattcgcggccgcgtcgactgaccattagcattttcagcaataaaggatttcttaattaagctatgtacatttttagatgtaatgctattgacaactaacaggctatggtatggcataaagataatttttatatgcactgggaaaccaaaaaatttgtgtgacttgctttattgcaatagttgctttattgtgatggtctggaaatgaacctgcaatttttctgagatacaaaatattaactgtactttgttttggtttgtacatatgaatctaaggtttattgacatggaatgatttgaccaaggtgatatagtggttaagcagttaagtgattaaactaactagtacaaaaaaaaaaaaaaaaaagtggacgcggccgccaatttagtagtagtagtcgacccgggaattccggcccggtacctgcaggcgtaccacttttccctatagggaggtcgattaaagcttggcggaa

SEQ ID NO: 60846 - DNA, 441 bp, Homo Sapiens
tttttttttgtaaaatcactctttaaatctcttgcccatggtttagccctgagaataaacctagaattttttacactaattttgtactcctgcttttacattggattgcttgtcttagtgagttgtaagagttctttatatattctggatacaagtcctttatcagacagatgattttgcaactaatctcaattgtagcttgtcttttcattttcttaccacggtatcatactaatgtaaggtgttagtaatatgagaaaactgggaattctttatagcatctttgcaatttttctaaaaatctaaaactactcaattttttttttaattagtggaggaactattagcgtaagagataaggcatttcagccaactgcaatttgtgaacctttctggattctaatgtgaaaaaaaatctatttttaaaagacatttacaaga

SEQ ID NO: 60847 - DNA, 436 bp, Homo Sapiens
tttttttttttttttgtagtgtctgtagtgtttccacctctgacaagtgcctgaggatgcacggagggcatgaaagggctagccacacaccttgctctcccaggttctcctctcactcctccatcctcccgagactcacttctgccgaagactctgcagctcagcccagaactcctcatcttccccactgctttctgactcctcgctgctcaaacacaggctgctgtaggagtagttcatccacactgggctgggatggctcaggggttgggggctgcccccaacttggggttccttcccatcatctccttcctcctcaactccagcccccagaccctcagctgcacggtcgctctcagccagagcttccctggtctctggcccgcctccagcactgtcctctgtatctgagctctctgaagtgagctgaggggtt

SEQ ID NO: 60848 - DNA, 389 bp, Homo Sapiens
  misc_feature (24)..(24): n is a, c, g, or t
gtttcgagtgaagtctacacagtntttttttttttttttttttgctgtattttccctctattttattggttgtccttgggaatggtccaaaaattttgctacttcactttttatagaaagaggaatttaaagtgtttctatagctatatatttacaatgaaaaatcattcagatagttcagttcacaatgcaactgaccatctagcagcttgagttcaaggtttataaacacaaatgcctaccagcctaagcagataacctgaaagagaagtgggatggtgaagggcgggttggcttaggttgtatgaatgcagaacagggttgagtactctttctaaaagtggatatcaccattcagcaactgaagattttatgcccttcactcaaaa

SEQ ID NO: 60849 - DNA, 580 bp, Homo Sapiens
  misc_feature (580)..(580): n is a, c, g, or t
gcatatatattatgttataatgtaaaatgtatctcttggggtgagctgcaattttttaaaagatattttaaaactgcctaaaatttttttccaaatgtgggctgaactgtaccaacccatccatgggctcttactggattgcccaagaagcacagaaaacatctgtatagctgaggtggaagaaaagaatgaacctaaatggctctaacctaaaccaccacaatatccttttgtcagcaatgccatcatctaatgaatgaacctgccaaagattatgctcaaaaagcattttgagcagtgatcataaattgttaagtgtctgcttgtcaattaagtctctttgcttatctacaaggtcataagaattattcccaatgggacttacctagaaaaataattatctttgagagcatggtaacaggccctcatctgaaaaaaactggtcagtggtggatggaaaaagaactgttcttcacaataagttaaaagacccagacaaattgttatgctactaataaaatatattttcctggttacagcaatctgtggaagtgatttctgaggggaaggtaatgctatn

SEQ ID NO: 60850 - DNA, 458 bp, Homo Sapiens
  misc_feature (435)..(435): n is a, c, g, or t
ttttttttgcattcatagatactttatttaaaaagtacactaattgaagttttacaccattttatgattcatcaaacacagcaactgaatactggcgtatagcaacattacagatgatgttagtctaagataaaactcataacacattttaaaaagggtgaaaggaaggaaaggaaaaaggatacaaggctgtagaaagattttaaaaacaaacgtcgtatgtctgaacctttgcctgggagtttcatattttgtgaaaagcagtttgtaagtagaggactcgtaagtgcacctagtacactgcaatggcacagacacggcagatagtcaataaaatgatctttaacttctgatctaggttatttttgttgttgttcatgtattaacctagtgaaactcagccataggtggggtggccttgacctgttacacttnccaaatcccttccaccttagtgt

SEQ ID NO: 60851 - DNA, 388 bp, Homo Sapiens
cttttaggccaaaacccagaaatggctctgtgagccttggaagaataactaagtagataaccataagaacagtacctgctccctctagctggctctgcgggctctgcagaggttagttggtgcagctgagaaacaggtttttgtctaggccagaggaacttccttccctaattttttttttttttttactcccacctctgtgttatataaatagccatccagattgggaggaagtgagcagtagaggcaaaactaaatgtgtgaatgaaacgacgtgctgccgtcctttgaaagttttaacatatttggaaaacccagtgtttttttttttttttaaggttttccagtgaatgacaggatgcatctcttgtgccaaacgagacaatcc

SEQ ID NO: 60852 - DNA, 481 bp, Homo Sapiens
ttttaccctaatgctatataagaattgccttatattaagtaaatattcaggaatagagacagccctaagaactgggtcatgtcactagccctcttcagttgcagttcacggatcctccaccttgacaataaccatgattctatccatttctcctcccttgtctgctgctaccaccaactcctcagcacctcctctatacatgcattgcaagctttctcctttctcataactttggtatgctgaagatttatactggcctttctctatgaatcctttcagcttcaacttcagctctgtattgcacatgggaactcttgaaaagacaatctgatcctgtccctctcaggggagaaacttttgggccactgcttttttctcagctatagcaaggaaagcagatagggaaaagaggtgagttggtcactatgtgcagaatatggccaatcagagaagttctgctaaaggagcaagcaggtgtggc

SEQ ID NO: 60853 - DNA, 531 bp, Homo Sapiens
tcccccaagtagtaattctaaccatagcacagtggcccctgaaacccgactcaggatcccatttcactaacagcaaagtgagtcttcccatctctgaccttccttccttccctctctcctcctccaaatatccacaaaaaattgccaaagttagtggcagaaggaaagtaacacttactgagaccctatgatgtacctggcccgttaatgtgatttttccataatgtaccatataaatcataaccctatttctgcagttaccagagcaaggtgagagtgtaaagtttattaaaccagggtcctctcctccagccccactgatggtctgtcctgactgccaggcacctgcttggtttagaggcagacaacagcagggttccaggcaggcagttgcagtcacctgggactagcaaggttttgatgcttcagtgagtgactgtgtgtctgtttttccagatgggtcatcaagtcacgaaatgaaattttagggacttgctttaatccgttctcaatcgaggaagtctatcacat

SEQ ID NO: 60854 - DNA, 577 bp, Homo Sapiens
ttgaatttaggtgacactatagaagagctatgacgtcgcatgcacgcgtacgtaagcttggatcctctagagcggccgcctactactactaaattcgcggccgcgtcgactttttttttttttttttttagcaatgacccaatgtcactgtagtgtttcttcagaactgcttagacttttgtgtagaagtaaaagaaaagaccatcagttcttaaggtctgagcctgaaaacaaacgttctttattttgaatttgttttcaatgtacaaaaggtttacatgaaaaatacaggcaggctaatattgcaaacaacatgtaatttcaaagaggaaaaatattcagtactttccctctcactttttaaattagattcagtaacatgattaactcttacctacatgttttcagaactaagatgaataaattagaggggtggttcaatttaaaacaccttttccttttagtaaatctaatgtttatggtagtcaataaaagaattgctcttttagtcataaaaaagcctcagaagctcttctaattcttctattctgttgattgatgcaaattatctctacag

SEQ ID NO: 60855 - DNA, 719 bp, Homo Sapiens
  misc_feature (535)..(535): n is a, c, g, or t
  misc_feature (571)..(571): n is a, c, g, or t
  misc_feature (588)..(588): n is a, c, g, or t
  misc_feature (694)..(694): n is a, c, g, or t
  misc_feature (703)..(703): n is a, c, g, or t
tttttttgacagaagaatctctttattatcatctttctaccaagtcaacatcaagcattaaaaaaatgtaaaacaaagtgaaaaccatccttctctgattcatcgtagacccagaatctgccagtcaccaacacctatcttcattttctctattacggccaacttttatctaagagatatcataggggcatatttaatagagtttggcattttgtgttttatgaattttagaggtttttttgttttgttttgttttgaacttttatttgcattttcttttggctgaatttggttggctcttaagtttatgtttcttctggggtatctttttcttccgtgcatcctccttttctgcttttggaacaaggtgtttcttttcactaagcatcatctggatgtggcaggggagtttgtggatgggttcatctgtccatgagttcttttcggggccactgatggtgagtccagccccaatgtctgtcttgcgtacagcgaccaactccactttctaagacttaggtttctcctgggattnttgtactcatcttcaattttctgatctttccatttntttcctacagaaccagngttcctgaggtttcctgcatcacatctctggagagattcttctgggaagatcccagcaagcccacttcttctgggtgaagtcacatctacatcctcaaagacactngaatcattnccggcttccagtgtcc

SEQ ID NO: 60856 - DNA, 376 bp, Homo Sapiens
tttttttttttttttttgatattctgggttatttttattttcatcttagttctctttaattttctatatgttttttactaaattggaatctcaaagattttgaaggcaaatgatcagtggtaaaataatgctactacgtataaattcattctacaaattgggctaaccagatggaaaatgggtcaccacagaaagtattataattcataagaataattataatatcatacaaatttattagacaatcaaataccataaaatatttgtgactggaaattgaataaaacttaaaagacattaataaaggtctgttccttaaagtgctcagacatttaaaagatactttcaagacaaaaacatctactacaaggaggat

SEQ ID NO: 60857 - DNA, 567 bp, Homo Sapiens
tttttttttttttttttgacttgtgatattactttaatggcaaacaaggctctgctgtcccacgcgcttactttgccacatggcacagtatctgtgtcacagacgcactcttcacaaggacaggtccaggcctgtgtcagtcactgcttcatcccagcacctagcacagggcctgactcatggtgagctgtggacaaacgcacatgcaattaacgacttgttcctgcctcagggttctcttttccagatgagtagaacaattcacattttttcactccttacttcagactgggagaaagggcctgagcagaaggatcagagttcaaaggaggggacacagcgccacagaggcaatgcctggagcaacaaagattggggtttgggcatgtactggagtgagagtggaaagggcatggaagtcagggtccagtcagaagacagaggcctcgtcagttatttcaacagagaggatttcgcatcatgaatcactatgtacgaagtgactaccgaaggagctgaaaagagaactctatctcagaagcaaaaactgcagggagcacctgctac

SEQ ID NO: 60858 - DNA, 510 bp, Homo Sapiens
ttttacagatttgtcacaaagtaaggtgctaattaatgtttgttgaataaattactatgccaattccccaatgtgtacaaaatgaatatacatatgacctagtctcaggaaaaatgtatatgtggagaggatgaaagataatttttttccatataagcttcctcatctaacctgtttcatatccagtttctgggacagaaattgattaaactattctaacgtggaactaagcaatttaaacttatatttacatggtcagcatatcagccggtgatctcaatatggccctcaaattttgctgtcatggatagttgtatattccagtgccagaaaaaagtaacaatatattcacgagagagcagcctgatgcgctgctctagagatgaaaataaattgatataaatggagatactgagcaaaaaaatcagcagctagcacttatcagatgggaagtgaaaagatgttaactgagcttacaagaatgaagaatattgtcatcagatagttgta

SEQ ID NO: 60859 - DNA, 490 bp, Homo Sapiens
aatacggagaaagctttacactatgaaactagttacaaactctttttttccagcagtaaaggtggtgtacaagtcctctaaccttatcttaagaggtaaccaggaagttgaacctggccaactgggaaatgctgagatcaagatataatggagtgaccaactacgaaaggaacaagactcaagaactaaggactgggcagaaaatcactccagcatactggataagttcaacaacaacaacaacaaaaacagattaaatcctcatggcctcagtgcagtgtagaatgaaggtattctgatgcaggaacagaatttggtaatagagaagcctggatcaggtggtactgaggaatatagactagcacacacttgtgagtatccaaggatatgtcagctagaagccaactctgattcctaagtgggggtgaagaggggataactgaaagaaaacaatggatgagtagaaatggccactgaagagaatatgcag

SEQ ID NO: 60860 - DNA, 413 bp, Homo Sapiens
taatttttgcgggtatattgtaggtgtatatatttagtgttgcaagagtttaaaacgctgaccaggtaattacggttggtggactatatcccataaaaataatctaaaatgtcaccacaaggaagtttttacaaaagatgctccacagcacctgtatatagagcccattcagattatggtacggtaaggaagagtaacagaatgaaatatgaaaggatggacagagggaaactatctgatgaaaccatttggtgaagtcatgttaagtgacaaaatcagcaccaaaaaatatgtcaggtgaacttataagctgtgttaaaactgcaaaggaatattagaagcaatcagaagagaattctatataggtgtcatgtttattctgttaagttgatcaagatgatatatataacagt

SEQ ID NO: 60861 - DNA, 464 bp, Homo Sapiens
ttttttttcctgttctttagaaataacagggctatccccctaggcagtggcccagtctcacactttttcagatgtttttatagatttctatttcccagtgattgcagaaactctctgcaattatttcttgcaaagactatcagatcatccaacattagactgacagacttctattttgctgaaataacaaatcgtgtcaatagaaagtcatttttcatctccaaatactgcaataaaaacctgagatgcttcccttatgatcgatttttaatttcctaacttctatagaaatttttcttcatggtttttatatttttggcatttctaacttaaaatatctaaaactctttaagttatatgcatgaagcatttgtgctttgattttaaaaaaaagttaatatcatgctgtttgaacaatgtgagccattaaagggtatgactgtgctaccatggtattctttttt

SEQ ID NO: 60862 - DNA, 506 bp, Homo Sapiens
  misc_feature (439)..(439): n is a, c, g, or t
  misc_feature (482)..(482): n is a, c, g, or t
tttttttttttttttttacaactcacacaactttccaaattaaaatcagaaataattttcctctcacacttactatgatactaaggaagttcagctacacttgttaggtaggtaacccaaacctcacagtagtggcaataaaatcttcctcattttttctgttaacatttagactttaacactgataaagcgatatccgttcatgggagagaggcacacctactaccattaaggggactaagacgaaaattatcaatgcatttgtgatccaaaaggagaagtatttggctaagaagaaaatgagtattttatatagactttccagagtagctacctgcaactggagtcgggcaaaaaaactaagagtgcggcaaaaaatttatcttcttaaatattacaggtatggtatgaggtcttttgaggtacaaattgctgatanaaaaaaaaaatagccaaaaccttctaataaagacaaaatgtantagagctctggcctgttgttatgg

SEQ ID NO: 60863 - DNA, 712 bp, Homo Sapiens
tttttttttcttttttgcttggataactcttaggcaatccgtttccaggtcttcacattccataggtactccttcctaatctgtgtgtttaatccatgggttttcaaaacacatggattaaaattttacttatttgaggatcagagtgtattatggataaggtagtaaaaacttattttatcaagccataccatgaaatactccaattgcagtcaatcctcacaatatttcatcttataaaatactgtttctatctgctgttaacaagaaataaggaacaaatttatgatgaaaaattatagatgtctatttaaagatgtgcagggagttacataatttaaaaaacaattatttgggtctaggaacagaagagtttgaagaccactgatgtagtatatgggagatttgaaacattttttaacttttttttctttttgagacggaatgtcgcttcactgcccaggctggagtgcagtgatgtgatctcggctcaatgcaacctctgcctccagggttcaagcaattctcctgtctcagtctccctagtagctcagattgttacaggcgtgtgcaccacgctggccaattccctgtatttttaaagagacagtgtttcacatgttggacaggcagtctcgaactcctgacctcaggtgatcaacgccctcggcctcaaagtgcttgggtcacaggctgaggcaccgcacctggc

SEQ ID NO: 60864 - DNA, 645 bp, Homo Sapiens
ctttttttttttttttttttggtaagatactctgagtatatccagtggactagggcttctggtttcaggacattcaagctggtgtcttacaaagaacaatcatagctattaatcagaagataagcttcacagatattttctaaaaaggttgttttgcaacacacataaaagaagaacgccattcaatgaacgaggaagattacatactaatcttcaaataatcagttttgaactaaaagagattgcaaagatcatatttagactaacctcgtagttttataaaagaagaaattatttcctggcagattttttttttgtctgcaaatattttcttcctttctcacccataaagcaatatttaaaaatgtttctgccccgcccctctcatctcaatttcccttctcctttttaacagtaactatgctgccagaaaaagcacttcaaggtagataatgtgcagtccctataaaggcaaacaaacaaacaaaaaattaaactgcacaagcaagtggctctttgccaggagatggagagttgacatcctcttactttgttccccaaatctcctagggcaaggggtactcctggacatagatagattcaaagcacatctcactaccctgcctcctgtctccgccctaccct

SEQ ID NO: 60865 - DNA, 475 bp, Homo Sapiens; identical to SEQ ID NO: 33658

SEQ ID NO: 60866 - DNA, 523 bp, Homo Sapiens
ttttcagtttcaagatgattttactaagcaggcagcccttaatttacaaattctagattcatacatatcttaaacatacaaaatgatatgaggagaggtaagttcagggtctgagttcctggctgttgttggaactgatttctgtgtagtgattcagaagatgtgagacaccctaatttacaagtacagaggtatcttcttttctgcaaacagcagtacaacaatagttcctcttacgcagctgtgaatgaacaggattattacaattaatgatatctcatttgattggcgccttagagaattaagacctttcacacctaatatacaactttgttgtgaaggcagatatttatattctcattttactgatgagagactacccggagacgctatgtcacacctgaaggattaggtactttctctgttaagtccaatgttccttccgttattccatgctaggcagtaataagttctgtcttgcctgagtaataagctccaaacctcggaactgcacccatcttga

SEQ ID NO: 60867 - DNA, 468 bp, Homo Sapiens
  misc_feature (447)..(447): n is a, c, g, or t
ttttttttttttttttttgagatagagattcgctctatcacccagactggagagcattagcacaatttttagctcatgggaaccttgaactcctgggctcagcctcctcagtagctgggactacaggtgtatgctggctaatacttccacagagctcagccaaaaataagtttttattattttaattaaaaatctgagtagtagagacttttaatcagtgtaatttataaaactacctgatgtggtattactaacaaatagagtttctaacatattccatattccaattttcctagtaccacctaaaactatttcccccaatccaaaacctaacaaagggatatgcaccgatcaatctcttttaagctaaagtaattcccagatttttcattctttcacagcattaacatctgagtcaagaccatttgtgttatatattagatttgnctggtttcttcaatactaata

SEQ ID NO: 60868 - DNA, 409 bp, Homo Sapiens
  misc_feature (342)..(342): n is a, c, g, or t
  misc_feature (384)..(384): n is a, c, g, or t
  misc_feature (401)..(401): n is a, c, g, or t
tcaaaaacaaagtttgagtaaaattaacaaggttggcaaatttaccactacaaaggtctttcatgggagacaggttatacctttccaatctttaaaataattctaaggttctgtagttcaatagtgaaacaagtacaatatcctggcataaaactatctttcagacaaaatccacctgctgtgtattaaaaaatgtaatacttgaaaacttcctgccttgggagagactaaacccgattcataatacaaaaaacactcaatctacaaatgctttcaacagaaagatggactaaatataaaggggggaattcctggacctcctttgggtggctagactggtangtcataggctaagccggaagggtgggtaattaattaaccccnaattttaaaatttcccntttccggc

SEQ ID NO: 60869 - DNA, 698 bp, Homo Sapiens
tgcatgattttattattattatactttaagttttagggtacatgtgcataatgtgcagcacagcatggcacatgtatacatatgtaactttaagttttaaatgtaaatgcctgaaaagtaactcaggatctagccttttcattagttttgatcatgtatgaaagcaagtatttatttcccccaaatgaaaccccagggcttccagtatttgtagtgatagtgtgaatccattaggtctatttttaattatatctgtcttattggtttttttttccacatttcctaactcacttgtgatattgcttcatataattcaactttttgtgtgctgggttcccatctgccccacaaaggcctctgtgcaaatctgatatcttgtttgaatgacattgttttgcttttaccctattgcttcgaatgtgtcccaatgttaagtcagttctcaacattaaagcattaaaaattagcttttttaaaatgctcagcatcactaatcattagggaaatgcaaattacaaccataatgaatatcatctcacacctgttggagggcatttatcaaaaggtgaatgatatgttagagataatgcaaaggaaacggacacagacattgtgaatggtatgtaaattagtccagtggggtggaaaacaagatgaagtttctctaaaaacttaaaaaaaaacttccctttgacccg

SEQ ID NO: 60870 - DNA, 253 bp, Homo Sapiens
ttttacccaaagaaaatatctggatttttagtttttaagtgaataatagcgccaaaatcacattacaactgggctaataaggaatggagagatcagtgtccagcaaaaataattaaaaagtcagttcaataagctgagaggggagcatcctaaatgaagttgttggtgttgttgttttaacagttttaacgtttgtgccacaaataattgaacaggggttggttgttttttttctttttagaggatcccaagg

SEQ ID NO: 60871 - DNA, 565 bp, Homo Sapiens
ttttttatacacaaatgagtggttttatttatgttgatttgtacaccaaatctgtaagatgtatggacttaaaaccaagattatcgttgatttaaacacatgaaaagcaaaaaccgtagtccaggcaacaggaatttatagtagcagcataattagaccaccaatctgagctcattctgtacatactataacctttctgcagtaaaaatctaatggtttttgtcgtttcattttgtttttccttactactattcatattattgtataatatatcctatcagatgggaagttattgctaattacatgaacatacattcttcctctggagtcaaaagaactgccaaagatgttattggcaaagcaaagagtctccaaaaacttggtgagttttgagaagtccatttgttactttaaacacctatttttaaaataacttatgcaatttaatgaaagattaatgatgatctgggtaggattaaatttttttcatttctcagaccctcatcaaaaagatgacataaataaaaggcatttggataagttcaaaaagtacattggagtgggt

SEQ ID NO: 60872 - DNA, 461 bp, Homo Sapiens
tttggtcctttaagaaagtcagatttaatgatctgaaatgtctcatttttaggtgatatttggttagcaacgtcctactgtagacattttgatgtggtggtgattggaatatggtctgcagagatcaaccagaattagctccatgtgccactgggagtgggaactgaagtcacgcaggaataaaccagtcttcatgctttaggatgttctgatgtgccattgtcgtgaaatcttcattcatgagacattccagtttaccggcagtgtctactagaatatgctacagcccccaaaatacgtttttagtataaggattattttgagctgattattttgagaaatagcagacgcaggagaaactctgaagacagaacgtaagtttaccttttgtaaagggatttacatttataagggaaatgtccatttgtaaggctgtctccctctgtaccggaaacacggga

SEQ ID NO: 60873 - DNA, 427 bp, Homo Sapiens
ttttttttgagacagagtctacctctgtcacccaggagttcaatggcacaatcttggctcactgcaaccttggcctccagggttcaagcagttctcctgcttcagccttctgagtagctgggactacaggtgtgcaacaccacacccagctaatttttgtatttttttagtagacacaaggtttcaccatgttggccacgctggtctcgaactcttgacctcaactgatctgcccacccttgccctcccaaataaccttaaatcttaaggttgatgcatgcctcttaatctcttggtttgcccatcagaaactgaatcatgggctcactaggagaaattgtcagtttaaaaatcctatgcttttcaaagagggtttattgtggataactgttgcaattatagacctagagaagacatttaacccacc

SEQ ID NO: 60874 - DNA, 460 bp, Homo Sapiens; identical to SEQ ID NO: 38747

SEQ ID NO: 60875 - DNA, 291 bp, Homo Sapiens
aaaactttttttttttttttttttttcacttgatagtttaatgttatatttgcagcataaataaggcacaatatatgccagggcaccgtttggagggagaaggcatagctggggggataactgctaagtggcaagggggaaaggaagacagtatggttagggagaatagagcgaagcctctgcctcagcccagtcccaggagattgtgagaaccagctcacagggatcatgctgaatcaggtggaggggaaaagggaaaagacagttttgtaacataaaacaaaatagcct

SEQ ID NO: 60876 - DNA, 453 bp, Homo Sapiens
aaggcagtcaaatttagcacagggggattatatgccaactttagtgacactaatgttaataagttctggtaacccactaccatcagaccaacgtagttagtttttgaagaatcctaaagccatgctgtatggtggggaaaaattaatttagcttatgacaaagcattatccttcaagcctctgaataatcagcctcttgctttacaaacacttcttgtgtctgacagctctgccatgcctttagcaatagctatcatttactgaccacagtcattcattcattcagtattcattttagcacttagtgggcacctgctctgtgccaggtaccatcctaggtgctggggatacagcagtgaacaaaccaaacaaaaccctctttaggcaccacactggatgattctatttcactgagacctcacaatgtatctgcatgtaggtattattatctcc

SEQ ID NO: 60877 - DNA, 322 bp, Homo Sapiens
tttgttttaactgcctttaattcctaatagtgactatgccagagcagcctattttggggtggcaccttcttaactctgcatactgtacatatctggcacacatcatttaaagtaaatagacaggcttgcttactttttactcaagtgcaacataattcagaaaagtgcagacatgctcagtagacagctccttctacacgcctgttgactttctttcatcaatgacatattggtcggctcttgctaggctgtgttgccaaaacaactcgcaagcctgggtcgatcacagcaaccaagtttcccctcccactcaggtttcttg

SEQ ID NO: 60878 - DNA, 498 bp, Homo Sapiens
tttttttttttggtcttcatggtatcacatcaccaggtcttatataacttgaacctgtattcatgcaacacttttcttactggattcccaaactctttatatctttctccactccatattacaaattaatttctatgacacaatttttttaaatcaaaacttcaatttcactctcttttactcagtatttaaacctcaaactacagcaactggtaattttaacacccttcctagaaagtcctaacaaatcttacctctcacatgggaaggagggccaacctgttaaactcactgtcccaagaataactatactaaattctccccttttatgtttctgctctcattcattctcttacgtaaagccatccctatttccttttacctttccaaatcccacccattcttcaaagccaagttcacatccctccttaaagatgttttcctggccgggcgcagtggctcacacctgtaattccaacactttgggaggctcaggca

SEQ ID NO: 60879 - DNA, 465 bp, Homo Sapiens
ccagctttgtttctgtcaacagtgagtgaactacaatactcatatatttacaagcatttctgcttgttttccaaattaccagaagagtaaaatcacagaattaaaagttccaaatatttttcagtttcaactactattaacaaaatatcccctagaaagcctggaccacttcacacaccccaccagcaatctgaataactgttaacaaaccaacatctttgccacttgctaaaatgtggaattctttcttgagctaaaaacaaacgaaatcacaaaattggctaagtattgaaaaggaaaaattattatttccttattttattatccatgaggttaaacccttcttccagtttttatttcttcttttgaaaacttgcatttcttcctctgaaaatctgtcttggatacataaacatttttaagagtgataatatatatattgccaagctgcctttctgaaactct

SEQ ID NO: 60880 - DNA, 649 bp, Homo Sapiens
gcggccgcccttttttttttttttttttttttgagatggagtctggctacgttgcccaagcttgcctggaactcctggccttgagccatcctccatcctcctacctcagcttcccaaggcactgggattacagacataagccactgtgcctggccgtgatagttcttattagaaggctaagatgtttcaaatgctaacaaatatgtaagtaatttctgctgactttcctcctttcatcactggctacaaagtacatcccagaatattaagctcagataatgctagtgaaactttcataaaagaatggcttctgaatacaaagccatgcagaacttcataaaaaccctgatcaaaaaagcataaaaacaccccaattaaagaccacttttgttaataaatgtaaagctcaaatagtcatacctcataatttagccaaggataactgaacctatgaaatgtcagagttttattatattgtattgttttctttttatttttttattactgatcagattagtttctcttctgccagtgaaaaaatccaaaagaaatctgaataatcaatgcaatattcagttccaaaacctgtttatggaaatctattagggcaattcattaatgtccagaaatacattttttccccaccatc

SEQ ID NO: 60881 - DNA, 623 bp, Homo Sapiens
ttgaatttaggtgacactatagaagagctatgacgtcgcatgcacgcgtacgtaagcttggatcctctagagcggccgcctactactactactactaaattcgcggccgcgtcgacttttttttttttttaatttaattaaatccttattttgctctttaactacaagaagctcacttttcgctacattggggcagaattttttttttcaagagacacagaaataatccccaaatagaagcccagaggggtgcacagacagacagactgtgggtctgtctgacctgccttcagcagccacttgctcatctaacacttgccggcctgtgctcacgcaaggccccatgctggctgtttacccagcagctggattaaatgaagaaggcagaatgtaaacaggtatgaagttagtgttctggagcacgcaggaaggagtatttaaatctccttggaggtgggcaaggaagatgctgacccttttagagtgtcaggccaagtgtcttgacttctccagactccgcttgaaggtgaccaattcattctagtttgcaaggcccaagttcctagaaacccccttagtcacaggcaaacccagacaaccagtccccctacctgcatcctgcc

SEQ ID NO: 60882 - DNA, 479 bp, Homo Sapiens
ttgagacagagtctcgctctgtcgctcaggctggaatgcagtggcgcgatctcggctcactgccaacagctctgcctctaccgtggggtatattttaaaattatacacatgcacacatatatatcctaaacgaaatacgtggcatgtagtaagtgatcaataaatgcaggtcttcagccccaatgaagtggtctgccatgctaccccaaatcaatgtccttcttgactgctaagctggctgtcaaataataccctagtaatatctgctcaggtctccgggtgcaggtaggcagctgctatgccagcaaggtattcgggctgcttgtccccacatctctcttcttccctactacccgggtttactgcatctaatcattacctggatatcaccacaaaaagcattactaccaggttttaccagatactggcattttattttaattggaattgttccccatggataattctggttaacttta

SEQ ID NO: 60883 - DNA, 512 bp, Homo Sapiens
tttgagaaatagtctcactctcttgcccaggctggagtgcagtggtgcgatctcagttcgccacaacctctacctcccaggttcaagcagttcttgtgcctcagcctcccgagcaactggcattacaggcacgcgtcatcgtgcccggataatttttatatttttagtacagatgaggttttgccatgttggccaggctggtctcgaactcttggcctcaggtgatccacccactttggcctcccaaagtgctggggttacaggcatgagcgacctcatgggtgtagattttgcgaacagataaaggtagatgatattgggctgctttgttgacatcatctattctattccctctccttgagaagttctcatgaaacacttataccttgatgtgagtcaccttaaatcgttttgggatgcggcaagcaacacataagttaatagccatcatgacaacccctgaagacacctgggctttggcactgggagcgtggtccaagtatggtagcgag

SEQ ID NO: 60884 - DNA, 524 bp, Homo Sapiens
taagagacaaggtcttgctatgttgctcaggctgatctcaaattctcaggctcaaaaaattctcccatctcagactcccaagtagctaggactacaggtgtgcaacaccatgcctgactaccacatatgatcttttaacagtaaacactatagttcttagaacatctgattgttccaagacatattcttcaacagatatgtaagacctaagctgcactgctgtgaaacctacactacccttttatgttcctcacctgaggggaaatcacagctgctcttcacatacaccataaataataatctattccatgcatatagggaacctaccgagtgtcaagcactggtggaaacaagaaggaataaggctcctgctgacattcctctctagtgagagaaataagatacacaaaaccacggagaaaaatatcagtgatagatccaataccactgacagattcaatccaatcagtgaccagtgatagatcagtgatagatccaactgaaaaataccagtgatagaaata

SEQ ID NO: 60885 - DNA, 444 bp, Homo Sapiens
cgataaattcttaaggaatgaaaggttaagatcatctttatgaatcccattccatgaaattaagtgtcacaggccaagcacagtaaatttgggaaatgtcttgcaaacaagtagtttccacagtctcttttacaaaggccttgtgactagcaaagttggaatgtaagaagccaatgaagaaacttccagactcttccttccttaagcatatacaaaatacaaaaataggcagtattctttctagattttagaaggagcagtaagttttgtttgattttggccaagggtgagagaggagtgggtgcacaaaaaaaaaaaagttggtttccaataaagcaatgactattttaatggtcactatttgtatgtacttattctaaaaagataaaaatactgtgattaaaacaataattgaattttttgatgtttacataacagtttttt

SEQ ID NO: 60886 - DNA, 466 bp, Homo Sapiens
  misc_feature (192)..(192): n is a, c, g, or t
  misc_feature (434)..(434): n is a, c, g, or t
  misc_feature (450)..(450): n is a, c, g, or t
  misc_feature (464)..(464): n is a, c, g, or t
ttttttttcagtttgttcattctggaggtgagaacagccatcctggaacttttagagttgtgcaatttttagagctgtgattcgtaaccgaatagttcatcaaaatcacttagaaagcctttccccaaactctcacgcccgtccctgggattctgactccacaggctcttccaagaactctgctgtgcgagnaaacatgggaaccactgggagagtgctttctgatactctagggctctcaagggaaaccattgccaaccgggggaatatctgtcacttcaccgtctttcagctcctgaaacatcccgggggctggaacaaaatctgggctttgacatttctcggaaccaccaaaaaaggcttccgcaattaaaaaccattaacatttcgggcttaaaaggacaaaaacaaaaaacccaagtatggattagggngtttttttttcacacnggggtttttaaaantg

SEQ ID NO: 60887 - DNA, 536 bp, Homo Sapiens
tttgccggggtgggagagggtggaatctaactctgtcacccaggctggaatgcagtggtgagatcacagctcactgcagcctcgacctcctgggttcaagcaatcctcccacctcagcctgcagagtagctgggactacagatgtgtgccaccccgatgaactaatttttaaattttgtgtacagacagggtcttgctatgttgcctaggctggtctcgaactcctgggctcaagtgatcctcccacctcggcctcccaaagtgctgggattccatgtgtgagccactgtgcctagcctgattacaaaaaccaaaacggactaaatttgtaatttttaaaaaaggatgtcctaaccctaactttcacttttttctagtggaagtctcacactgtgtccttcccactctcgcattttcataatgctggtcatgggacccttatcaatcctaatcattcttaaaataataatgacctcagaagagccaaattttctaaagatgggggagaggcatcgacgatacctccaggtgcccag

SEQ ID NO: 60888 - DNA, 526 bp, Homo Sapiens
  misc_feature (503)..(503): n is a, c, g, or t
tttctattttctaaattaactataatttataaataatctataaactatcatttccttaaaataggggtttaaacacattttccctaaaaatagagtgaaaggacttgagaccagagataaccgaccattgagacccgtaatatcctaacaatatgaaagctggttaataattggtaactatttcctatttagaaacagagggcctggtgtggatctctatttcctttcattctattttcactgctgctgctactaaggttcagatcctcaccacatctggaccactgcaccacattactgactcattgccagtcctctaatcctacatgtcactaccacctgactcctaaaacacattccacaccatgtcactccttttcaaaatatttaatggctcctagagggagatattcttttggctggaaaagaacaatggtatttttctaattcacaggaaagaaaattaatagatggatttttcataagtttctctaccataattntttcttacctacttagtctactg

SEQ ID NO: 60889 - DNA, 447 bp, Homo Sapiens
aaacacagagaattttgttttagcctgacaaatttcaaagaggctttgcaagtgcaaacagacttcagctttttcacattcctatgcccagaaactgggacgtgaaaatgccaggaaccctttcaataactagactatgtgatagatgcaggagaaactctccaaccaccaagattactcctatggagctgccaaagaaccagatgcttccttcaaaagcatatcaatttggcggtgaaaaaccctgtggcctcagctccagtcgggaagggcaggtgggatggcatggtgcaggatgcctgttcccacttgcctcagcaaccatcttcttctgacagcaaaactgtgttactcccaggcttgaaggcatgagcaaaatacatggctttgctatatataaggacgggacttggaaatatttggtctgaggccatgcaaaatgaattc

SEQ ID NO: 60890 - DNA, 483 bp, Homo Sapiens
catttttctcccttttttatttcattttctttgggatataggaattaacaaaagccgttagatgccagcaaaactgtttcttttgaagtttctacatggctgtcacccgggagataaaggcagattattcaatcttgacattataattgtggatgccagatgaaagcctggattagacacttcacagcccacttggaggggaggctgagatcaccaggcggcgatcccccctcagctgggagggcaggggaatctggcggggcaggtggtaccccacattggggagggggtggctcgctgcatggcttggcttctttcatttgagttggatggtccccaaatcacacagtgttagatggaaggaacatattccatatggaggtggaacaatctagaagtcaggagtagaactcttgagtctggtctatcagctcccgtgccccaaggctgccccccccccaccagcccacaccccctccttga

SEQ ID NO: 60891 - DNA, 246 bp, Homo Sapiens
aacagttatgaaatggggcatgggatacatggtttaggtatgtaagttccgttagccctgattccagcttttaatatgagaagttaaacacccatgactttccaccttacagatgtaaaactgatgttgaataagttacataacctgaaacttcttacctccttcatcatgcaaaccaagtgaaccaaaaaaaaaaaaaaaaaaaaaaaaaaaaaagaaaaaaaaaaaaacaaaacaacaaaaaaa

SEQ ID NO: 60892 - DNA, 519 bp, Homo Sapiens
tttgactactataaggtatattggtggtggttaacgttactgttcattctttagattacagaccataacagggaaaagtgtgactatactctctgaactaaaagatttatgaacatcatttagaaataggtatagtgactggtgggactttgggtctcccaaatatggggaaagggcaaatgcaacacatactggtgcaggagctagttgtattacatcaggcagaagcatgatattgttgctactgttgtttggttgtgtaagtgcatatgggtgctgagttgacaaaggggtaggctgtgctctattatctgttaatgaacatcattttcatgtattcatatactcccttctgtgaagacaagcctacattttgcaggatccattgccagtagtacaccagactatatataaccatgatatatgaaatatatgaaaggtataagagaaagaaaaatgattttcccctctggtggcagctttgggcaggcttgaggcatccacagatagcataagtag

SEQ ID NO: 60893 - DNA, 508 bp, Homo Sapiens
  misc_feature (274)..(274): n is a, c, g, or t
  misc_feature (278)..(279): n is a, c, g, or t
  misc_feature (284)..(285): n is a, c, g, or t
  misc_feature (287)..(287): n is a, c, g, or t
aggtcaaatgatctattttctttgtaccataaacaaatgtcaacttgcctagccattctaccccaaattgaaaaccctaccacaattccttcctaacactggaggtaaataaaaccaagataatcactaagacattaaaggcttttaatagtacccaattttattattagatgaactatttcacaccatctataagcctccaaataaacaggtataaaatttcagtctactgatttgagggaaaaaaatttttttttacactggtatggcagancctnnacccnngntggcagaagatgtgtccaattaccctcacaaaatactctgagggatcaacagatagttcattctcttttttaaaagggaagaaaagggaagactcataagcttggggaagctaaaaatttttaaaataaaaaattctatttggcttaaagggtaggctatttttaagaaataaaaaactagaccaggcccggtggctcacacctgtaatcccagcattttg

SEQ ID NO: 60894 - DNA, 296 bp, Homo Sapiens
  misc_feature (253)..(253): n is a, c, g, or t
  misc_feature (257)..(257): n is a, c, g, or t
gctactccaagatgagtttataattaaggttgctttttaaagtattcagctttcacacaataagtgtttgattagttcatttaagatgttttcaattagggagccatacatactgacagaaaaagacacaaaatctaaactgacaaaatagccttgctctcataactgagaaaaatacaacaggagaactgacgcattctgtagtatctttttaaattcagaatcacggaattttaccttgaagcatatgcgntttntttttcaattgattaagcacctttatcaatcaaacagaa

SEQ ID NO: 60895 - DNA, 425 bp, Homo Sapiens
tttttttttcttcctggagtcgcttttgtttttcttcttcctcctttcttaaaatattatgagttttttccatgattttttttttgatcatcagctatcattagtgttagtgtattttatgtgtggcccaagacagttctcccaatgtggccaagggaagccagaagattggccaccttgttttagaggaatacattcatatctattatataaagctacatattatatagtattatgtaatataatatagaaatattcataaagtaacattaaaatattttataatattctaccaattaatagcttttaaaaaaaattatttcaatttcaaagagactttagaaggggtaaaggtgaagagctccaagacccactaatcatctgtaggtggcagtagaagcacagtatttatgtcaaagcagccc

SEQ ID NO: 60896 - DNA, 417 bp, Homo Sapiens
ttttttaaatagagccagggacttgctatgttgcccaggctggtcttgaactcctgggctccagcgatcctcccacctcatcctcccaaagtgctgggattacagacatgagccaccccacctggcaagatcttatatgtgtattcaagatattacacaactcactaagtctccagatgaaaaccagaatctctaaatatagtttgacagtttgacaatgcccaatgacagactaaatgagaaattaggaggcagcttgatttttttttatttcctcagagatctttgttctgagttctgactcttgttctacaaatattcaaagtcgaaatgattatcatgttaatgggtaaagagcttcaaatctttggctatctcattttttttttaatttttattcatttgttttaccttatg

SEQ ID NO: 60897 - DNA, 319 bp, Homo Sapiens
tttttttttttttttttaagaataggagagggcctggtatgctggcagcgctccagagggaggtcctagcactgcaccctcccaggggccggccttggccacctcccgccctcctggccacaaccacctccctaaccccacccccagcagccactggtcacaccagcgcagcaggaaacagggcttctgggccaacaccaacacttctgaagaacgttctcgtccacttgccaatgggaaaacatctgtactcgacctggctcggagcgttccgccggcgatccgtgcccttctcccaggcgctgtcgccctcgtgccg

SEQ ID NO: 60898 - DNA, 573 bp, Homo Sapiens
aattaaatctcggacctgtgtgagagattttccatttaaatgtatcaatttagctaggaaaattccaacattttctaaaggaaatatttttcaaaatccttttaaaaccaatcttacaatcttaattgtcacaaaaaacagatatcacagttatataagtacatagtataatctgcatttatttctaaatagagaaacaaagcccaaggcatagaaatgggatattcagtacctattttttcagagggttctattaaaaacaaagaaaagcagtgcccctttctcacttgggaaaataaatcaccttaggaaaaactgaaaagcattagcctacagttactacttaaaagcaaacaaacacaacatttaaaaagtgaattttattttgcacggaattaagtcaagcaacagtatgaattaataataaaataagaatatatagtcatccccctgtatccatgggggattggttccaggactcctctgcagataccataatccacggatgctcaagtccctcatataaaatggtgcagtgtttgcacataatctatgtacattctctggtatact

SEQ ID NO: 60899 - DNA, 335 bp, Homo Sapiens
ttttgtccttagcaccttttattgaaatatgacccttgatgacaatctggcaggcatatctatgtcagccaagaagggagtggtggaggacacaaatgcagaaacaacaagatttggaaaaagaatagcttcacatgggatagatgacccccaacagctgtacaaccaacactggttcttcatctatagaaactgtcccctgccccaccccccccaaaaagatctactaatcttcaaataatataatatgctgttgcagaaatattattggcatagacgactcctctggcaaagctccaaatgggtggaagtggccagaaatgggcccagcttcc

SEQ ID NO: 60900 - DNA, 307 bp, Homo Sapiens
  misc_feature (13)..(13): n is a, c, g, or t
  misc_feature (57)..(57): n is a, c, g, or t
  misc_feature (246)..(246): n is a, c, g, or t
  misc_feature (261)..(261): n is a, c, g, or t
aggacttcatctnatattcagattatagcaagaaaatcaatgtgctccatatatttnacccatgatgaaacttgtcccatatccattactatatatatatatatagtttaactgggtggggttgggagggagaaggcatgaattcaaaattttaattaaatattacataatttaatgttctcccaagaatttgagctgacattttcatatgaatacaatttcacaaaggttacaaatatatatcancttacaacagaaggnatcatttagtattttacagtgtttttaaaaatctagctccataatc

SEQ ID NO: 60901 - DNA, 688 bp, Homo Sapiens
ctttttttttttttttcatttaatggcacatgatgatgcacacaaaacttcaactctcagtctggaatcagcccacaggtctgcagctataaaaatcatctcgaaaacatgagatttcagagatccagttctcagtgttaccttgaagatgacaatttatgaagaaacaggtgattttaatccgaaattgccaggaaacaaattactcctcaaaagcccttggaaagtaataagatagctaggcagaaaaaaaaagattctgcaaaactaaacttaatgtgtattcatctagacctgaattaaaaataaaattccactataaaaagaatttttcaaaatgttaggcccaagaatatggccatattgttccatcttgaagaacccagttgattcagtttcattactggcctccccactcttctaagtaagtccctcactataaacatttacgaattccatcttcacattagtactaaacaatattcattaagaatcccgccaaagtgcaacatgtaagtaaatcaaagctttgatgctctattttgcaaatttcacgggccactagggataattaaaagggcaattatataaagttggtgcagttttgagaaacaaatgacattttctgctttaaagcacttgataatttgatattttgctattagggccttcatgtgtacttttatag

SEQ ID NO: 60902 - DNA, 413 bp, Homo Sapiens
ttttttaaaagagatgggttctcactatgttgcccataatgtttatgagattaagttcatcttttttatctgagtagtattttattgtatgaatataccaccatttatttatctgttggttatttccagttttgggctataatccaaaatgcttttttcaaacaataggctatatatcattaatgtccgtttatcagcagtataaaatatcttaccataaatattaataaaagaagcattcatatataaaatatagatatttcaaaccctacagagggccttttaatgattaaatattttgtccttacaaaaaggtccaggtaattacacccatgaggttaacctgccttagtgcaggacttaaaataaggcttctcctgccatctctctccatttgtagaatgtgaaattct

SEQ ID NO: 60903 - DNA, 479 bp, Homo Sapiens
aaacaatggagtctcgctctgtcaccgagattggagtgcagtggtgcaatctcagctcactacaacccctgcctcccaggttcaagggactaaatccaatctgacaagattggtccatgtgcccccttcaaatcccttcctgttacatttctaaagccataagaatcccttgtttcataacaaataaaatggttactagaaatgtacattcccaggtaaactctctccacatgacttttagaatatttcagaagcattcctggtttcctaacgagaaacagtctcaaaacaagtcctccaggaatattaaaaagctaaaatctgccagacatggtggcacatgcctgtagtcccagctactcaggaggctgaggcaggaggattgcttgagcccaggagttagagaccagcctgggcaacagagtttaactaatgtaactttcttcccaattactacagtggtcctaacactcatattc

SEQ ID NO: 60904 - DNA, 532 bp, Homo Sapiens
ttttttttttttaaggaaatgcatggtattcttgctgcattcttaagttacctctcggtaaatgctgaggaaacattctcaggctcatcatacccatattcacccagatgttagactgctgtgtccgagtggcaggctgctgtctcaggaagagaagatagcggggaaataattccagctctgggatgtctgtcttgctgttcttgataactggtctaggtaaggccaggtttgctccataccagtgataaagtgctctccacacaggttctgggaccatttcatagtctcttccatgaatcagctgtggagttcgttttaatcgtcctccttctagtgttaatgatgtagcctttactggttcttgagttactaatggctgattatcaatagcccctggtttctgagggttaaggtgcaacaaaatattcccattggctcccagcaaacactggttgttattgtcagaagtgttatgttgtcgagcaaagcaaacatctgcccctggtgtggcagaatacagaaagccgct

SEQ ID NO: 60905 - DNA, 489 bp, Homo Sapiens
ttttacagtacaaaaattttatttttttgttaggataatttaaagtttaaaactgaagtagacatattcattttacaaacaagatattctttaagtaagaccattaaaaacagtaaacaaaaaagctgtctttacaaaaagctctgtgcatagcaactttatactgtatataactgacaaagcaaaacaataaaatgaaactatacagtgtgaaaatgaaaccttactgtacaaaaggtagagaagttaatggtttttaaaccatgcatattgaaatgtgcaaagaaaaactgagaagaattacaacgctataacaaaagaaagataaataatgaagtaaattgtccctttaaaaaaaaaaaatcttacacagctcctcttacaaacacaggatagagtttgtagttaccaatagaaatactcatattccaagtggcacaaaaataacttgggactggaatgattgaatagcaatgactaacgaggaca

SEQ ID NO: 60906 - DNA, 464 bp, Homo Sapiens
ttttctttctttctttctttctttctttctttctctctttctttctttctttccttttttcttttttttctttcttttctttctttctctctctttctttcctctttctttctttccttccttccatctttccttctttctctctttctctctctttttctctttcttccttgaaagctgttgatagaaagacgtaataatgacagagagacagattcttgtcatttgatgattctggcctgcatgtctctctaggaggcatcgttacaataaagtcaagttacaatgtgagtgacatactctaaagttggcaaaaggtacatagacagagtttgaaaacacagaagaaagaaggaaaaccaatagaatttcaggttcctgaagaagaaggaggggctagaattcagaatgtaggagttaagatattggagaagtgaaaatacaggaaatagttactattctct

SEQ ID NO: 60907 - DNA, 1377 bp, Homo Sapiens
gggagcctgcggagttcgagaccatgctgctgttctgccccggctgcgggaacgggctgatcgtggaggagggacaacgctgccaccgcttcgcctgcaacacgtgcccctacgtgcacaacatcacccgcaaggtaacaaatcggaagtacccaaaactgaaagaagtggatgatgtgcttggtggagcagctgcctgggagaatgttgactctactgcagagtcgtgtcccaaatgcgaacatcctcgtgcttacttcatgcagcttcagacccgctctgcagatgagccgatgaccaccttctacaagtgctgcaatgctcagtgtggacaccgctggagggattagggccaggatggcccagctgccctagtgtgtgcttgccttgtccctcggggtagatgcttagctggcagtatgagttgtgtgtcctgagggtctttgctagtgtggtggaaagataaaccttttgaggtgaagagccagggggtcaggaaatatggcctatctgccaggcagggtggatgaagtcatgaatgtctgggagtttttctgtgtggggaggagacagagacccataactaaatatgctctgtgtaaagtcctattctttcatcttccactttattggcagttgacattcccttactcccgatcaacactcttaaatatttgtactgtttgtaaaacttagtacatgtccctaaaatatttaactgttacttgtaaacttgtgtaatttattatttattttaatcaaaattctgaatatttcatttaaatgaaagttggaatattgccttctcagtgttttaaaatagcttaagaggtagaaagcagaccccaaatcacagtgatcccagaatagactacatacttacatttgaacaggctacgaaaatgttaatcaccgggatttcaatttctttctttattcctattcttactcccttattcatttttttgaacctcccctgatttgcttcctcgggttgctttaaatgtataagatactatttatttatttatttattttatttatttatttatttatttaagacagagtcttgttctgtcgcccaggctggagtgcagtggtacgaattcagctcactgcaacctctgccttccgggttcaagggattctcctgtctcagcctcccaagcagctgggactacaggcatgcaccaccacacctgggtaattttgcatttttagtagagatggggtttctccatgttggtcgggctggtctccaactcctgacctcagataatctgtctgcctcggcctcctaaagtgctgggattacaggcgtgagccactgtgtcccaccaatctttacatttaatatgactattttcttattgttcg

SEQ ID NO: 60908 - DNA, 460 bp, Homo Sapiens
  misc_feature (434)..(434): n is a, c, g, or t
cccctccctccgcactagtttcccgggcaagttcggagcgggtggccggctaggcgagccctcttcgggttcctccttctcttccttcgtgtccctgcggcctctcaggccctcgggacactctaggaggccgatctgcagggtgggcacgccctaaatccacgccaagtcacccacgcattccttctgccaccctctcttggatccgaaggggcgaaagggaatctctgcacgtcactccccaccccttatccacctcgggacctggagggaggggcagccccacccacccggtccacccggatatggacccgcccggcctgacaggctcacacgcacactccctctctcggtcttccgcacacgatgctgcgccagacgctcctacacagtaacctggaaattatcaccggcggagcaaagtcacagctcanggaggccctccgcgttgtctggcgga

SEQ ID NO: 60909 - DNA, 1614 bp, Homo Sapiens
tccgccggctcacgtgaccgtctttgggccggcgcgaaccatggccggcatggtggacttccaggatgaggagcaggtcaagtcctttttggagaacatggaggtggagtgcaactaccactgctaccacgagaaggacccggacggttgctatcggctggtggactatttggaagggatccggaagaattttgatgaggctgccaaggtgttgaagtttaactgtgaagagaaccagcacagtgatagctgctacaaactgggggcccactatgtgactggaaaaggtggtctgacccaggacctgaaagctgccgccaggtgctttttgatggcgtgtgagaagcctggaaagaagtcaatagcagcatgtcacaacgttggcctcctggcacatgatggacaggttaatgaggatggccagcctgacttgggaaaggccagggactactacacaagggcctgtgatggtggctatacttccagttgcttcaacctcagtgccatgttcctgcagggtgccccaggctttcccaaggacatggacctggcatgtaaatactccatgaaagcctgtgacctgggtcatatctgggcctgtgccaatgccagtcgcatgtacaagctgggggatggtgttgataaggatgaggccaaggccgaggtgctaaaaaatcgagcccagcagctacacagagaacagcagaaaggtgtccaacccttaacatttgggtaatgtggtccaccctccctcccaggcaacaaactgcttgaggctggcagctcctgtttctgaagactgatgcagcccttgaaggtcaacctgctggagcaaaaaaacttgggacttgaatttgtagctccatttacatggatccattgccccagctactggagtatagcctacaatgtttatttcagtcaatattcctttatctgggtgttctgtacaatgtttattacagtcaatattccttcatctggatgttctgtgaagatagccatgtttatgggggtcttagttttcaaactctggcaactctgtgaaaaataggagcaaactagagagccctggagattggtggtagggaagggaggatagcaggaagtttgaaaaattagcagccccggggcctaaaggaatcagctgtcatcattttcatcattattattttggttaggatggcttgaaaatcagaacgtatcttggtttacgtaattgaggtcttaaagaactaagaacagttaaatagtcacaactaccaccctctgacttacataatcattggtgtgggcttcgttttgcctttagagtcacatctttcagtaaattcacagagatcaagagggacgtgcaacatacagcttaaaggctgttatgcttcagggttgctgaagaagatgaaacatcagcctgccatcgtctagaagagacattggcagttaaaaattagcacctccagtgtagtcgcctggcactgcccatcatgctgagggagcagattcttcccaaggcagcttcagctaggagtttgtaagcaaggactttgtgacacatttgtcccctggaactgagcctttttaactgtccctgtgaatgaacaattttgagtg

SEQ ID NO: 60910 - DNA, 256164 bp, Homo Sapiens
gatcatagcttactgtttcttgaactcctgggctcaagcaatcctcctgccttagcctcatgagtagctaggactatagataggcgcacaccactgtgcctagcttcatttatttatttatttagttagttagttacttagttgagacagggtctcattatgttgcccaggctagtctcaaactcctgggctaaagcaatcctcccgccttggcttcccaaatctttgggatgccacgcctggcatgagccaccacgcctggcctcttttattaattataaaggtaatgcatgttcattgtagaaactttggcttcacccctttggagtcatggtagcaagataaaaacaggggctattttttctacaaatatatttatataaagtccctgctgcttttgtcacatatgatgcctagtttttgatacaagatatatgaactctgtattactccattctcatgctactatgaaaaaaatacccgagactgggtaacttataaagaaaagaggttaaattgactcacagttccacatggctagggagacctcaggaaacttacaatcatggtgaaaggtagctcttcacagggcggcaggagagagaatgagtaccagcagggaaaatgccagacgcttataaaaccatcagattttgtgagaactcactcactatcacgagaacaacatgggggaaactgcccccatgattcaattacctcccactgggtgcctcccatgaagggattatggggattacaattcaagatgagattgagggggaacacagccaaaccatatcaaactctattttctttctttttctttttctcttccttttcttttcccttgattactggtatgaacaatatttcagaaatagctaattaacaagctgactttttgttgacctattaataagtgaaagggtagacaattacctgcaataactgaattgtagataattataaggactcacaggtcacatcttaactcattatctcattaataggctctgcgagctaatttaaaaggattacggcattcctaatatcagtaatctttttttttttgagaccgagtcttgctctgtcgcctaggctggagtgcagtggcacaatctgggctcactgcaaccttcgcctcccgggttcaagccattctcctgcctcagcctcgcaagtagctgggactacaggcacccgcacccatgcctggctaatttttgtatttttagtagagacaggatttcaccatgttggtcaggctggtctcgaactcctgacctcatgatccacccacctcagtctcccaaagtgctgggattacaggcctgagacaccacgcccagccaatatcagcaatcttatatgatgattttaaccatatatagaatcacactggccaaagtgtgtgtgtgtgtgtgtgtgtgtgtgtgtgtgtgtgtgtgagttttgattgcctattcttttctcacagcctgtaggcaatagttaccaatgttgccacaaaaatttaaaagatgttatctgttgcctttttagcccagattggtcaggggtataattcaccataatcatgtcaacaattctaaggcagcagttgaaagtcagtgctgtactctgtggctgaaaatgaactatgagcaaatctcacattgaaaaatcccacctgataagcaatgagattctcaaaagtgactgtgatctggacttcattcagttttaagtactttggtagttatgacaataaaaatcacctctactccagttctcctcctcctcctcctcctctcatgataatatagtcacaatgtcaacaactcaaagtataaagagaaagtccccctcccatccttgactcccatctatccattcccatccgtgcctttggtaaccatcttctttttcttatgtatctttctagagattctttatgtatatacaagcaaatacaagtacatattctcttccttctttacacaaaaagtagcaaaatatatgcactgttctgtacttttttcccatttaaaaccgtatcttggagatctttccatattagaacatatagagcaccttcattcatttttatagctacttaatgttctattttatgaatgtcatgtaatttatatttctagttccctagtcaacttgatggccatttgaattgtttctaatattttgctgctacaaacaatgctgtggtgaatagcattgtacatacgtcattttgcacataagagtctatcagtagaataaattgccaaaagtaaaattgttgggtgaaaagataaatacttttttttttttttgagatggagtctcactctgttgcccaggctggagtgcagtggcacagtcttggctcactgcaacctccgtctcccaggttcaagcaattcttctgtctcagcctcccgagtagctggactacaggtgcctgccaccacacccggctaatttttgtatttttagtagagacagggtttcaccatattggttaggctggtctcgaactcctgacctcatgtgatccacccgtctcagcctcccaaagtgctgggattacaggcgtgagccaccgtgcccggccgaaaagataaatacttttaaaatttaaatagataatttgagatttatctttatagaacttatgtcaatatacactctcaccaccaatgtttgaaatgcctgttttcccagtctcactgtgagagtgttatcaaactttggatttttgtcagtgtactcagtaagtaaacatttctatcttagtgttttattttgtattttattcattatgcatgaggctaagaatattttcatgtgtttaaaatttatttatatttcttgtctatccatgttctttgcctattttctgttgggttacttagaagtcttattgaccgctagtgactcctgttatatattagggagattacttctttgtgatttgatatgaaaacttttccctggtttaatatttattcttcaactttactttcagtgttttttaaacatgcagagtagtttttcgttttggtacagttgaacttcttgatcttatatagcttctggattttgggtgatagaaggctttccttactacaagatgaaaggtatttttccatttttcttttagcatttgtgaggtttttttaaaaaagttaaattttttacgcatttgaagttaacctagagagccatgaagagtggattcaactttatttttgtctaagtggctgcttatttgtcccagtactgcttatttagtggtccgtaatttctccaatgacttgagatgtcagttttatgatagtgtatccatatatgattttgagactatttctgaatgtgatattctactccattagcctctatctgtctccaacttacaggccagcactacattgttgtgatgactgaggcttcataacatccttttacatctaggagtactgacccacctcccccttgctccttgctcttctttacattttttattgctacttttgcttctttctttttctatatgaacttttagactcaaattttttagccaaaaaagcctattcgtatgtttgttggattacattaaaatttttaaattaagcgatggagaatttacagctttatggtgttgaggatttctatccaagagcgtgttatatttccatttgtttaaattttttgaggggggttatgtttagtagcatgttatacattttcctcacatgggccttgactatttcttgctaagtttgttgccaggtattgaattttttttgtttctaatagaaataaggtcttttcttgcaccatgttacttatattgataaaacttgatgtttgtaaattaattttgttcctgactaattttgttgtattttctttttgctgtagtagatttttagcatatttcctggtgttttcaagatatacaattatatttcctgcaatagttcctctcttctaatttttataccactagtttattttaatctagttgattcacccaacacacccagtaaagtattaaatagtgttgacatgaccatctttgttttgttgtttcagaatttaatggagacgcttctagtgtttccccattaagtctgatgttggtattgggtcgagataattttttttttcatgttaagatggtatctttctctaccttattgaatgttttgatcaagaatattgtttcaaatgcctttagtgtctatggaggtgatcatatgatttccctctcaaatctataatattcaaatttattgtgattaattatgtaagtagatttcataatattaaaccatacttgcaccctgaaatatatcccacttggttatgatgttgaaatctgattgatagttcttattgagggttcttaacttatggtcataagtgatattgatctatagcttgcttttttgtgtacagtattaagttttggtatcaatggtatacttgcttcgtaaagaatttgaaagtttttttcaatgctttggaacaattaaaaaacattggaatatttacattttaaaagtttgttcaaatttcccttgtgaaattgcctgggcctgctgtttttttcaggggtagggtaactctttgacagtcttctctatctcttccatataaattggcctccatcatttctttgtcttgaggtcagttttgtgtacatggctcttctgctatttaggaatcttggatttttcttcttgtagttgcctttataattataaccttctatgatgtcctttgctctccatttctttttctttttttttttttttttttttttttgagatggagtcttgctctgtcgcccaggctggagtgcagtggcacaatcttggctcactacaacctctgcctcctgggttcaggtgattctcctgcctcagcctcctgagtagctgggactacaggtgtgtgccaccacgtctggctaattttttttgtatttttagtagagacggggtttcaccatgttagccaggatgatcttgatcttctgacctcatgatctgcctgcctctgcctcccaaagtgctgggattataggcgtgagccaccgtgcccggcctactggccgtttctttaggtagtgtctatgacttcctggttacgagaataataaaacgagctcagatcctaatactttattcttgagaacctgtatctactctttcaacaaaccttttctgagtgtctgctgtgttccagacctagctgagcctggaaaatgcagaggtgaatcatagagaccacatgcccttatggggctcgaagtccataacctgtgaaggcagtcatggactttgacggctatgactgtatgttggatgctatgattagaatttgtgcagcagactgtggggacacacaagagaagtgtccaccccaggccaggagggggtttgttaggaaagactctgggaaggtgatactacagcaagtctcaaaggatgagctgtggccaggaagaatgttcgaggtagaggggctggacaaaggcttggagttgtggagcagtttgggagggctggaaattgggtgcacttgtttgagagatggggcctcacaaggcttggatgaaagacaagaggcagattataagggctcttgatggccaggcgcagtggctcatgcctgtaatcctgatactttgggaggccaaggcgggcagatcacttgaggtcgggagttcgagaccagcctggccaacatggtgaaaccccgtctccactaaaaatataaaaattagccaggcgtggtgtagtcccagctactcagaaggctgaggcaggagaattgcttgaacctgggaggcagaggctgcagtgagccaagatagcgccattgtgctccagcctgggcaacaaaagggaaactccgtctcaaaaaaaaaaaaaggaggggggagggttctcgaatgccatatccatgagtgtggctggctttcagagtgtgcaacctgtacagccagacagatagggccctgttctcagaagggccccatgtttggtgttaggccttgctgttaccatcttgaaatttctaaatttcatctttcaacttgtgttttgtaactaaagtctggtgggacaatggtacatgcacatgagtagtggagacacaccaggtgacagcactagcacacatagggacaggcctggctgctggctgcatgtgtgtatgtttcaggagaagtccacggcactgtagggctccgagccagctgagctgggcctagggcccatcacatcagctaagactgtggcaacagccacagtggccacagaagaaagcgggtctctgcatggggacagtgcatgggaagctgcttgcctgttcactcccagactgtgttcctttgatagctacacaaatattaactctctggcctgagcactggaacaggaattgctagtactcacgcagtaaacttagtcagtaaattattacaaaataaaagcaaacacaaggatattgcaataaagcatagcagcatgtttcagaattttttgaagagtttagaatctctggtttttatttattttattttttttagagacaaggtctccctctgtcaccaaggctggagtgcagtggctcaagctatcctcccgccttggtctcccaagtagctgagactgcaggcatgcactaccgtacccagctaatgtttttattctgtagagacagaggtcttgctatgttacccaagttagtctcaaactcttgggctcaagtgattctcttgccttggcttcccaaagtgttgggattacaggcgcgagctaccatgcccagcctctgatttttaaaactgctgcaacataacaaagcaaatatctgcaggcttagggacagaaaccgaatataaaaatcattgcattagattgaaaagagccgtattttcgtaggaagtttcagattaagcaattattaacaaggaagacaattttaaaataaatttttccttgtaattgaagatacagaaatattatacataaacaggacttctgaattacatacaaatcatgaaaccactttcagcttcttatttaacctccacatgttacaagaagtgtcaaagaaaacattaaaatgacattgtgtaagtgtacattaaaattaaattcagatttacacaaaaatgacttgtatgaaaagttaaatctttttagaaaaataattccacaagaattatcagttctagatgtactaaaacagatccagtaacaggtagatccaataagagatccactagaaattacatccctagcaagatccttctgaaaattgaaaattataaaaaattgtcacctttaatttgccaagaacaattgatataccttcaattatactgactaaaaatgaagatcctaaaagtatacattttgacgacctctttgatttttgcagaaaatgatttgtggaaatgattttgtggaaaaatgagccagaaaaatcttatgatgaatcaagataccacatgaatggagcaattttttttttcgagacaagctcttgctctgtcccccaggctggaatgcagtggtgcaatcatagctcactgttacctcgatttccctggctcaagcgatcctcctgcctcagccttccaagtagctaggactacaggtgggtaccaccacacccagttaatttttttatcttttggagagacaaggtctcactgtattgcccaggctggtctcaaactccagggctcaactatcctcctgccttggcctcccaaagtgctgggattacaggtgtgtgccactcctcttggcctaatggagcatttttatttgttgtattgcataacattatgacaccaaaatactacctttttgcagtttgtaaatttatgtttttactcgtgttacccctattatgttttacaagtaatgtttttaaaagaaaaaactatttttagtgctcttaatagcatcttccccctgcattttggttaaggcaccttgcattttaattttgcacggggccctgcaaattatgcagctgctcctgccccttaggttggtctacggtacaggtaatgtaggtgaaggggctttaaggagttttaaaccgacactgtcatattcatattttggaagaggtgtggaagatgaacacccattatgtctcaccttttttgctggactgtaagctctgagagggcagagtttgcctctaatctttgtgtctcccatagggcttagcacaatgcctggcacacgatgggctgtagagcgcattggttaggcagggggatcagaagccaggcttcttggcattgagtcctggtctgccacttactaacaaattacctaacctctcttcccttcactgtccatatctgtaaaatacagagtgtgatggttctatttcgcagagtttttaggaagactagataaatacatgtgaagtatttagaatagtatctgatatttagtattcattcaaatgttaactattatcattttaagtaaatatttattggaaggatttttaaacttctgtaagcaaaaaagaatgtgggtgcagttttagaaacattgaagaaatagagggtcctggcatgcatgccaagattgcatcaacttttgtgactaaaataataatttattatttcagcccctgagaggattcaaccctacacaattacctttctcccaccttatggagaggattgcctaatggaggcgtatatagaactaaataggaatacttttttggctaaaacaataggaaactcaattcaaaaaactcacaatgaaataccacttcatgtctgttaggatggctattattggaaaattgggaaattacaagtgttggtaaggatgcggagaaattggaatccttatgccctgctggtgggaatatgaaatggtgtagttggtaaggtaaacgttatggtagttctccccaaaattaaaaagaattaccatctgatccagcaattcagtatatactgaaaaaaaaattgaaagcagagacatggacagatatttgcacacccatattcatagcagcattatttacaatagcccaaagggagaagcaacccaagtgtctgtggacagatgaatggatgaacaaaatgtgatacatacatgcaatcaaatcttatttagccttagaaaggaatgatattctgacacatgctcaacacaggagaaccttgaagccattatgccaagttaagtaagccaatcatgaatactttgttattccactcatatgaaatacttaaagtagtcaaattcataggaacagaaagtagaatggtggttgtcaggtggagtgggatggggagttattgtttaataggtagagattcagttttgcaggatgaaggaagttctggggatggctgggcgcggtggctcacgtctgtaatcccagcactttgggaggccaaggtgagaggatcatctgagttcgaaaccagcctggccaaaatagcaaaaccctgtctctactgaaaataccaaaaaaggaaaaaaaaaaattagctgggcatggtggcaggcgcctgtaatcccagctactcggaggctgaggtaggaacatggcttgaacctaggaggcggagcttccagtgagccgagatctcgccactgcactccagcctgggtgacagagcgagactcagtctcaaaaaaaaaaaaaaaaaagttctggaaatggatggccgtgatggttacaaagcaatgtgaatgtatttaatgctaataagctgtgcagttaaaaatggttaaaacagtaaattttatgtatgttttaccacaattttaaaaatcaaaataaacccaccaatacaaacaataaggaagcgtattggcacatataactggaggtcctgaggtagggagtgtttcctggttggcttctcagggtttctctggacttaacctcttttggggaggggaaggaggtgtcaagacggctgccacagtttctcattcaccacaaccacatgccaaaaaggaaaagtctctctattccagcctttgaagcaaagggcctgagattcactctgattggaaagccgtcacgtacttatccttgaaccaatgactgttggaataataggcattattgtcttaagccaactccagagcctgcagttagagatgggacagcttccctcctagggacacaggctgcctgcgagaggggtgagtgtctgttaggaaggagggaaagaacagatggggacgggtaagcaaccagaaagatttactacctcatagccagctcagacatattgaaaaggtttttccagaagataaggaagccattcatggggagaaattaatgtgtgtgcaagagcagatagttttcctttatttattagttctcagtgcctgctaatctgaagactcaatttttttgtttgtttgtttttttgtttgtttgtttgagatggagtctcactctgttgcctgggctggagtgcagtggagcgatcttggctcactgcaacctccgcctcccgagttcaagcaattctcctgccccagcctcccaagtagctgggactaccagcacccgccacttagcccgctaattattattattattttattttttttttttgtatttttagtagagacagggtttcaccatgttggccaggctggtcttgaactcctgacattgtgattcacctgcctcggcctcccaaagtgccgggattacaggcgtgagccattgtgcccagccaactcaaattttttcatgcatgcctcattgctttttgggagaacatctcagcaaatgtgtttttccttggagtatagtgatatttattaatctagatgttgttgcattttgttttttcaaatatttgttgagacccacttcctcatgtctttcaggcagagggaacagtgtcagcaaaagaagatatgtataaggagaaaaatgacaaactactagtatgtgaagtttgatgtcagtggagcgtagtctgcgggtaaaggagtggtaggagagaaggctggaaagatagaatgggatcagatcataaaggtcttgagctaggcagtacttgcttcaacttactgatgtaaaacatacatacagtcaagagcatgaagtgcattaagcttaagccaacattcccgcagatttgtacatatgtataaacccataaaatcaccatgcagatcaagatctagaacatttccagcactccagaatgttccttcacattccttcccagataaacaaaatgtcaatatacatccctggagggaacagtagtagtaattctggcttctgtcactattaattagttctgcctgttctgtttttttttctttctttgagacagggtcttgctctgttgtccaggctggagtgcagtgatgcaatctcagctcactgcaacctctgcctcctgggctcaagtgatcctcccacctcagcctctggagtagctaagattacaggcatgcatcagcaaacctggctgattttttattttttattttcggagacgaggtctcattctgttgccatgacaggagtgcagtggtgcaatctcagcctactgcaacctctgcttcctgggttcaagctatccttctgcctcagcctcccaagtagctgggactacatgctcatgccaccatgcctggctaattttttgtgtatttttagtagagacggggtttcaccatgtagaccagactggtctcgaactccgtacctcaggtggtcagcccacctcagtctcccaaagtgctgggattacaggtttgagccacactgcccggcccctggctgatttttaaaaactttttggtagagatgaggtctcgctgtgttgctcaggcttgtcttgaattcctgagctcaagtgatccacccaccctggcctcccaaagtactgggattacaggtgtgagccaccacacccagcagaacatcatagaagtgaatagaattgttacgggcgggtctttgttcttagagctcccaagatggggcgggccgctcccaaaatggtagcaagccttttgttctctgacctggggttcttggcctcacggattccaaggaatggaaccttgggccatgaggtgagtgttatagctctgttagaagccgtgggtcatggaagagaaccatggaaccagcaactagtgttcagctcgattaggacaaatcctgggcccttagtcatgcaggaacaatggcgtgcctttagcctgatagggagtggcagtgggcgcctcgctggatcaggagtgcagtgaacaccctgccggatctggaggggtggaagtcagcggcgggtctgcgacggtggcaaacagcagtggtggactgcgagcgaaagctcagctcgagccataacaaacacggaccagaagagtgtgcagttgcaagatttaatggagtgaaaacagagctcccatataatgggaagggacccaaagggggttgccgctccctgccgggatgcctgggtttatatcccgatcattgtccctccccctgtgctctcaggcgatatatgatttgactatttatttacctcctgcttttggcctaatttgtattttagtgagcactctttacttcctgattggttgggtgcgagctgagttaccagccctgtgtttaaacgtgggtgtggtcaccttccccaggtaggcttaggaattcttagtcggcctaggaaatccagctagtcctgtctctcagaatgatactacttgcaccctttttaacctggcctctgtaactaggcctaatgttcataaggtgcctctgtgtggctgcctgtatcagagtttgttcgttttgttgcttggtgtagtattccattgaacaaatatcccacaatttgttcattatctagttgatggacatgtgggtgatttccagtttggggctagtgtaaatacagccgttatgaatgttctcgtatatgaatttggtgaacatgtacactcatttctcttgggtatattctgagaagtgggcatgcatgatccatattagtgtatactgcccggcagttctccagagtgattgtaccaagggagcttggatgttagcctgaggaagactgggagtgatatgatgaaacttacttttaactctggcagccactgtgttgaatgtactgaattgggatgagattctagacagagagacctgtaagaaatcgcagactaggtgcaaccagagtgtctcctggttggcttctcagggtttctctggacttaccctcttttgggcaagggaaggaggtattaagatggctgccacagtttctcatttaccacagccacatcccaaagagaaaaagagagcctttccattccagcctttcaagcaaagggcctgagatttgctccgattggaaatccgtcacgtgctcatccctgaaccaatgactgttgcagggggaatggaatgaatgatatcaattgtcttaagtcaactccagagcctgaagttagagatggggcagcttccttcctagggacacgggctgtctgcaggaggagtgagtatctgttaggaaggaggaaagggatagatacacagcccccaggggtgatgagggatggcgaacccctgagctcaggcaatgggcacagaggaagagaatggttttaagagacaataagaaggtagaattttcttgattgttcggatgtggtggggagggagataatggagtcccagatgaccgccaaacctctgacttggtgttaacagaatggtggtgcccttgtctaaaggagagagcacttgagaaggagcaggtttgaggaagatgagctccatttgtttgtttgttttggacagttggcagagctagctgagattttattttgaaaaaaaaaaaaaaaaaaaagcaacaattgaattgttttgtagctggaagcatggccaatgggggtgccccaggcagtaaactcccccagcaggtgggctgagggctagggctgagcctcaggtgagtctcctgttcctgtgctccactgcacagcggcttcctccacgggccctggagcagccgcaggaggggcaggctggtaggggctgccatggccattcacttgggcaggacatcagaggacttggacactagcttgccatctcgcgtttccaccttcttcacaaccatggacctggagaagctggcgcggctgaaggagctggagcctccaccagtgccaaagctggagcccaggctgtagctaaggcctgttgtagagggcttgtgaggtgcccgtgggtcgagctcagcccacctgagtagccactggtggtcttcagatggacactcatgttctgtatcccagaccccagctagctctcctcgccctccagcagcttcctgtaggtggcgatcttgatgtccagggccagcttgacgttcatcagctcctggtgctccatggcacagctgctgcaccatgtcttgctcggcccgctgcagggcggcctccagctcgacagcttcgtgttggcatccttaacagccagctccccatactgctcagcatctgcgatggcagcctccagggaaaccctctggcctttgaggccctcagtctgagcctggagccggctgatgttcctattaatctcagagatctccatctttgcataacgcaggtcattcctatgcttcccaggcagtgtctgcagctcctcatacttgatctgatgcatgccctcagcctcagcccagctgccattggcgatctccttgtactgcgccttgacctcagggatgatgctgtccatgtccagggagcggctgctgtccatggacagcaccacagatgtgtccgagatctgggactgcagctcccagatttcctcttcatatagctgcctgaggaagttgatctcgtcagtcagcccttccagaagagactccagctctaccttgttcatgttagcttcagccacgttaccttcttgatgaggacaaattcattctccatctctgtacgcttattgatctcatcctcatacttgttcttggagtcctccaccagcctctgcatgttgccaagcttcagcttctcctggcccagagtgtccagctaccgccgaagtttgttgatgtggctctcgaatatgctgtccatgtcgctctgagctgtcttctgctgctgcaggaggctccacttggtctccagcatcttgttctgctgctccagggaccgcaccttctcgatgaaggaggcaaacttgttgtagagggtcttgatctgctccttctcctgggcgcacacagcctggatgttggggttcacctccagcttaagggggctcagcaggttctggctgaccatgatggctgtgatgacccccataccactggccccaccatagcctccacccagagccatgcgggtgcccaggccaccccggaagctgctgctgccgcccacttgagagaagctccaggagctgatatgggcaccaggcccgcttgtgtaggagcggctgcttaaggcctaggggccagaggtggacaccctgtaggacttctgggtcaccctgatggacatggtggaggcagtagtggaggggtgggtgggctgaaccaggcagagattcgagaaagcagagaagcttcttctaggtcatgagcttcgttttgaacatgttcaatcagagggatctagggaagatcaaggtgggatctagggaagatcaaggtggtatctagtaggcaactggatacatgggattgaaccaaggggatgaatccaggctggagattgacattatggaatcaagggaatgagtgaaccatccagagagagggtatagaaagaggactcctagaagatggtggagaaggcatttcctgagaggtaggaggaaaaccaggagtttgccacgatgacaaccaagggtaaggagagtttccaccagggagaagtagtccacatgtcagaggctgctgggggcggggggggagtcaagaaaggtgggcactgaatggtgtcccatgagtgcagagtggcacctgcttatgtgtagttcaggggcacgcatggccggccactaccaggctttcttcagcctcctcaaaggcccacaccagtgtgactgggctggctggactgcctcttcgcacccctgaggcctggttcatggcctctcagcctgtggagaggagacagggagaggaagagggagctttagcctcagtccagggacggtgtctgaggcctttctgagaagtttgtggggacctcagctgcagaatagagggcagcctgcagccagagtagagccaaccaagttcctcctgacaccaaaaacactgacatttggacacagttttcccctggagcttccccctgtggaaattcccggttgtaagccatattgactttaatctcaagtgtcaaaaaggttgcccaggagtctgggagccaacagctgaaagcacgtttgtaaggatgtcagcgcaaacaaaataggatacagaacattttttgagatctgtgccagtggtggacttttctgggaaacatgacaaaagctgacagtcttaggcaaaaaggcgctgattcttgtcattattaatttatgtccttactgaaagatcaagttagggaaaggtaaaggggaagaatagcacatgtgtgatttctttgccaggcacaagggcgctgcaggaggctccccctagagtttaatgggcagctttatgtatttatatgctttaactggagctaaagaggtctgtgccacacaatgggcagtttctagttggattttaaaagaaataactttgatcatttcaaaagcaatgaagcctgatgcagtggagagaaaagaaggcagtaatttatggctaccattaaggacacaaagacaaaggtggagagaacgtttcactaactgaagatttacaaatgtgtaaaaaccacccttatgaccagaaatagctgagtgtctctctcagcaccaaacaaaagggagtgggagggaggcgcagacagaaagagggacgcaacctgcctgccttcactgaaagggtcaaaagaaaaacaactacagaaaagttattttctcagatagctccatcaagcagctgcactagccacagcccaaagaggcaggcccccgtgggcatgttcgggggctggggtggcagacagtgggtactgagggtgcagaggctgggagctctgggctgtggataggccccaagaagacataagagtttttgtgcatgagctaggtggggattttttggtgacatctattttttttctgatctccaaaggaatggtgtgtgtgtgtgtgcgcgcgtgcgtgtgcctgcatatatacatatgtgtatgtatataatcgcaggagaaaattgaataaatacggagaagctcagtgaagaacattactatccctaagtgtgatgtttggttgcgtccggaaattgttactatatttgttcctggagtgatggtgggtgtattgggctccagccatccgtgtcaagtgtgatatgggaagaccctgtgtacctgttcccttgcaaggactgtctttcatggaaggctaggtgctaggccctgcctgtgtttgaagctagccagacctgatgtttatgagttcaggtgatcgtaaatgccacctgtactccggcaaagtcggggctgctgtctgttgtctctggtggctcacctttgacctctagcccccttccccttaggctgccctgagatatacataagtagcttgcagggattctaggcccagtgtgccccacagtgggacaagtggaccagtgccctcagggctgtgggatggaggatcccagagggcctggggtgggcagtgtggagaagggtgcagagggtgtgctggggtgggcagagaagccagggtcaccttctccattcaaacagctgttttcccgaattggaagtcacccccaattccttccactcccacctcccacctcccacgtggaaagccccaagatggctttggggtttggggactatacggaacactttctgggcgccctgaccccgaatatttcaatctagaagggctgtttgtcctcacatgagggcctgggtcgagttgtaacacactggaacaggcgcggcaccgagggctccgagcgttggagcggagcggggatgcggggggcagcgggctgggtgccagggctgcgcggggcgcgaggcacggtgctgccgccccgccaggctgacagccgcgctcgggccaccgcggccgcgccccctccacccgaggccggggaggggacgggaggaggccgggcggggcggcactgctcccgcctgcgcttcccgccccggcccgggagggaccgtgtgaaaatgaggccggggctcggggggcgggcggggccgggccgggggtggcagcggcagcgggcagggcgtccgcgcacacctccccgcgccgccgccgccaccgcccgcactccgccgcctctgcccgcaaccgctgagccatccatgggggtcgcgggccgcaaccgtcccggggcggcctgggcggtgctgctgctgctgctgctgctgccgccactgctgctgctggcgggggccgtcccgccgggtcggggccgtgccgcggggccgcaggagggtgagtgtccggccgcgggggcgcacctggcacagcaggcagggccaggaagagtgtttaggtccccggcggagtccagagccgggcgcgcggggctcggggctggcggctgcagctccgcgggggcctctgctccccccgggacctcacccgccggccgggccaaggcgccacgaccgctggggccctgagtccttcggcccggcctcggacccggagctgctgacggttcccgccccggtccggatgcctccagagcgcctgctagtcagaccgtcgccggcgagcaggcaggagggtgcggaccctggccttggggtcccgcgcctcagcgtaggcggggaaactgagggccgggccgggcacatccgcgaggcggtggcagctttgccgtttctttctttgggggccggcaagttctgctgatggcttcggggtgggctccagagacttttctgtcagcggaacagcgcctgttccgatctgggaattaccctgaagcagcaacaagcctaggttttcagcagagaactttggtttccagagaggactctggacgtgctgtgcttactggacttgcaatactttcaaaatgcttttgtttttaattaatatcctggagtagtgtcaacccaggaaatacttctgccaaggcgggtttccaggttgagaggatgggcaggggtgggagtgcagggggccggccatggggacaccatccccgcttcgcagcatctgagagccctggatgacatctgctccgatcccggggcagacttcccataaatactctaaaccagcggggtgcaatcttttggcttacctgggccacagtggaagaagaagaattgggccacacataaaatatactaacacaaacgacagctgatgagcaaaaaaaaaaaaataaataaataaataaaaaaaaatctcataatgttttaagaaagtttatgaatttgcattgggccgcattcaaaactgtcctgggctgcacgtagcccacgggctgtgttggacaagcttgctctgagctccgagaaagctgacagacagctgcttggtgttcagagcttgtctgtccgtttggtcctttcctcctttagcgggcatgtaggtactattgcctactcacatgccaggtactgcgctggcttggcataagggacacagacgcagtctgttgtcaagacattgtctagtggagagagaggaaggaaaacagtgacaaccctgcctgatgtgtgcatgcaaagccatacatatgcgagcacttggtgagggcagctacaatgggggtcatggcaggcttcctggaggaggtggatttgagctaagtcctgaaggccagtaggtgatggtgggggtaatttcacgtagagtgtccgggctgttcctggaaacagggacccagaaacagtttggtttatcccagggatcccaagcagctgtagcttgtgaggagtgaagcggggtgggctggtgaggatgatgccagacagggccgaggccagatcacacatggcctgggagcctgtaccaggtgtcagctgtgctcttttgcagatgtagatgagtgtgcccaagggctagatgactgccatgccgacgccctgtgtcagaacacacccacctcctacaagtgctcctgcaagcctggctaccaaggggaaggcaggcagtgtgagggtaagtgccttggggaccatgtggggggactgtagggaagctcctacctccttagctcttgcagtggccacttatgttggtaaaagtactgcccctcctctccctttcccccagcccctgaatcacatcacctgctctctgaaatatatttcagatcttggactggaaacattaggtcttccccagagctgctcacacagttttatctggctctgaaatgtccttttgtctagcttctggaaaagaaaagagatgtgttagtatctttgggtcccactcagttttggggcagaaagtaaacatccatgctgatcaggagagccatgcctgccagagcagggctgatcctgcacctccctggggcggtttgtacctttgccctgaagtctgagtgctagagagtcctgccctcccctaccagctcaggaggctccatcctgtttatggctttggccacaatgtttggcattgtgacgtgccaagcttcagagtacaccaaggaccttcctcgtttggagttacaggttcactctggagagatgtgtgcagaggggcattttagcccatagagctgcaggtctgagaacctgtggtttggactctgccattttataatctggactagagtcatgaactgtgaagttcatagctggccagagactggacactcgaggctgttcctggagatggaaatcatgacacattggagctgactgggctattcaggtagctctgggccaatgctattactcatttcacagatggggacactgagggccagaggagttgtggccatgatcacacaagttgcctgcaagtgaaagaaagtcaggtctccacccctagctctgtccccaaccccacgtttctcatatttactcagcctgctgctgtccttctttggatgagtgagaaatcccactgtctatagtcatcccttgcaggaagaaattagatgaggagcactgaactcatctctgagtatccctccttgctcctggacccaaccttgacaagtatgttggtggccccttcctcttcgagaggttttaaactctttagaacttgggcttaactcccatgggaattgatcttctgaatacttgcaggatctaaagctacacaatgagtaagaaagtccttccaagtctctttccacttcgaaaaacatattaacttctttagatgaggaggaaaacttttttgagacagagctttgctcttgttacccaggctggagtgcaatggcgcgatctcagctcactgaagcctcctcatccccggccaggagtgtgagaccaagcaattctcctgcctcagcctcccaagtagctgggattacaggcgcctgccaccatgtccagctaatttttgtatttttaggacagacggggtttcaccatgttggccaggctggtctcaaactcctgacctcaggtgatccactggcctcggcctcccgaagtgttgggattacaggcatgagccactatgcccacccagaggaggaaaacttttaatgagtgtctattctggtgccatttaatggcctagtgttcagaccctgatgtttcaaaccaatctgtttcatactgtggcctctgagtaataaagattctaaatattggaacagtatataatgctcagcagtgcctggtacatggtagacactgaatagacatccttatttttgaataagtgattgtgtaagatgggctcagtctactagcaccttgacacaaagtcttttccaacaaacagacaaacccacaaatgaaatatctagatacagaatatacagatgaccaagtaggtaagtgactgtcagatgcttttgcagtgttgtagcaatgacctgatcctccctatccacccatctccttgtcttagcatagctgagacaagaaatgggatctttacaatgaactttgttacaaaggaagggaagaccaaaagaaaatatagatagcaaatatgaataacagatgggattatgacgggcaagtttggatctggtgacaccccttgggatatcattcagggagctcccctttgtgcatgaggagtgaggctcccaccgctcccattggagaaggtgtggtcctggtcaggtgcatagcaagtggggttggtgatccatccatgaagtagctcacgctctctctctctttctctctctcttcccccctccccctgccatgtcatgggaggccaaaaggctatctctccccagaacatttatctgctgattcctccataccacacactttcggtattaaatattctatttgctgtactggaattcacacatgttggtaccctgctttggaaacaaatgttcacttctttactatgtggataactcacgtcctccagttgctgtgtgctctctggtggcacaaaaccattccactgactttatttagataaagtacacttttagtaaatgatgttaaatgacaattggcaagagtttccttactcttggcttttgagtttgatatatttcaaatgaaattgaattgctaacagtttatagttgaattgttaaaagtctattatttagtttaaaataactaatgattgactggcattgtgccatatatatatataaatttattttaaaatgatatgtgattgttataaaaagtcaaataatacaaaatgtgtaaaataaaaaattaaagagcctcccatccatttatccacagatagtcatggttaacagtgagcatacatcctttgtactgtcgtttggaactcaaaccctagaagaatttgatcttttgaatatttgtagtatttacaatactagtaagtaaggatgtccctcttttttttttttttttttttgagatagagtcttgctctgtcacccaggctggaatgcagtggtgcaatcttggctcactgcaacctccgcctcccaggttcaagcaattctcctgcttcaacctccctagtagctgaaattacaggcgtgcaccaccacacccggctaatttttgtatttttagtagagatggggtttcaccatgttggccaggctggtctcgaactcctgacctcagatgatccacccaccttggcctcccaaagtgctgggattataggcgtgagccactgcgcccggccaggatgtccctcttagtttggatttcttggtataggagtacagaaatggaaattttctcccaagaaggaaaaggagaggaaatgaggattgcaaggattcaaagatgtagatatacaaagatgtaactcctttatccatttcttggcctattaatttttgagcctcttgggaccaacctatggtatcatttgggttgtgattattgccagcttcactactcatatttaagttcagggatgaggatcaggtttactcagagtaactagaattttatcttccataaagttttcttctgccaaaatgttggagaaatgtgtgagccctgaataagtgggtttaaaaataatgtgattcagacgttgctttaggtaatcttttattctaaatgatctttgcttatttgcttatttattgtatggttcttacttctcagtttgaggaattgaattggctcacgcctgtaatcctagcactttgggcggctgaggcaggaggataccttgagctcaagggtttgagaccagcctgggcaacatagtgagaccttctctctactaaaggtcaaaataattagctgggtgtagtggtgcgtgcctatagtactagctactccagaggctgaggtgggaggatcacttgagcccaggaggtggaggttgcagtgagctgtgattgcgccactgcactccagcctgggcaacagagcaagacactctgtcttaaaaaaaaaagaaaaaaactaaagagattgaataaagtttaacagggatgaatctaaagttggcctttgtacaagatgctatatttttcttttcttttcttttttaatttttttatttttgagacacagtctcgctttgtcacccaggctggagtgcagtggcgtgatgttggcttattgcaacctccgcctcccaggttcaagttattctccttcctcagcctccccagtagctgggactacaggcgcccaccaccacgcctggctaattttttgtatttttagcaaagacggggtttcaccgtgttagccaggatggtctctatctcctgacctcatgatccgcctgccttggcctcccaaagtgctgggattacatgcatgagccaccgcacccagcctatatttttctttttaaaaaactttttatttggacataattttagatttcagaaaagttgcaaaaatagtgcagagttcatctgtgtatatatatgcccttcattcattttaccctaatgttaacaacttacataactatagtacaattatcaaaaccaggaaatcaacactggcacaatgctattaagtaaactacaaactttattcaaatttcaccatttttccctaccattctttttttgttccagaatccaagtaaagtcccacattagatttagcagttgtgtctcttgtctcctccagtctgtgacagttcctcagtctttcctgacattgacacttttgatgagtactgctcacttcatttgtcttaatgtcattataagaattgatatgaggccaggtgcagtggctcatgcttgtaatcctaacactttgagatgccaaggagggaggcttacatgaggccaggagtgtgagataagcctgggcaacatagtgagatgcctgtctctaaaacaaaacaaaacaaaacaaaaaattgctggtgtggtgatgtgtgcctgtagtccctgctactcaggaggctgaggcaggaggatcacttgagcccaggagtttgcagtgagctatgatggcaccactgcactccagcctgggtgacaaaatgagacgctgtctcaaaaaacaataattgatataagagaatgtctttgtttttttcatgataaaattgaggttatgagtttttggccaggctgctacagaggtgctgttgtatccttttcagtgtagcacatcatgggcacatgatgttaacatgtcccattcttgatgatgttaaccttgattgcctgagcaagatggggtttactgggttttctctgctacaaaattactatatatttttttttcccctttgcaatagatacatttcttaggggagatactttgaggccaatatcctgtttctcctcaaatcttcatccactgatgttagcatccaactgtggatcttgcctgcaatagttattactgtgatgtgtgtctcctggtaattttgcatttctctaattccttaaacatgtgttaattgaaattcttctgtaaggaagatctctccctcgtccccacttatttattaatttataccactatgtactgatgcatatttactttattacatctatatttatttttggctcaaattgtttgctttagccattggaagctccccacacattgtctcctgtgtcattttgacatcacatttttgaggacttcctaactttctggtaccacaacatgctctagaatcatcttatagcttctcctccctaggcctggaatgaaccgcttctccaaggagctctgattccttttaatggaagtggtctatagaaaccaagatctggatgtttggtgttgtcattgctactagggtgtcatcattcctacctgggaaatacatgtacgcatactcatccacgcatgcacacgtatctatatttattccttttatttattcatctgtatatatattaaaaacaattagttaacactgatactttggattccaaaccattaccacaagattcattctaggccggatgcagtggctcacgtctgtaatcccagcactttgggaggccgaggcgggtgggtcacaaggtcaggagttcaagaccagcctggccaagatagtgaaaccccgtctctactaaaagtacaaaaattacagcacgcctgtaatcccagctactcgggaggctgaggcaggagaatcgcttgaacctggggggcggaggttgcagtgagccaagatcgtgccactgcactccagcctgggtgacagagtgagactccatctcaaaaaaaaaaaaaaaaattcattctattctctctttgcttattcgtaactttctccaacagtgagaaatctggcgctcattatctgtaatgtgtttacctctttgttcagtcctaatacacgggagagatatttacagaattataagtccataaccctgtgagtaaagcagatttactaactaaagtacaatatttactagagtatagcatacagctattttgtttttagccttaaagcatccaagcaaggtgttgtttttcatagtgttatttaggtcaatattttccttccccatcctcttcagtatggttatactattagtttataatacattaggttcatttgtttcttttcgtattccacttttattcacttccatcccctccttccatgcatttcccttattccttaaacatgtattaattgtatgtatacaattaattgtattcattctttccaccctttccccgtgccctgtgggtcaccaatctctgtagtttctggttttacctttctatatttattttgcactaataagcagataaatgtataattttagatttcagaaaagttgcaactttttaacaactttactgaggtgtaattaacatactataatattcaccaattttaattgtgcaagtcagtgatttttagtaaatcagctgaattgtgcaaccatcacaatacaaacattttcctcatctcagtaagattccccgtgttcttgtacagctaatcctcattcccagtcccagcctcaagcaaccagtaatctactttctgtatctgtatatttgccttttctggacatttcacgtaagtggaatcatacaatatgcggtcttttgtgttggattctttcacttagcaaaatgcttttgaggtttgtccatgtggtagcttatatcagcatttcattcatttttatcgtttaatagtagtccattgtatgaatataccattttttttgcccatttatcagttaataggcattttgattgtttctactttggggctattataaataatattgctgtgaacacttgcatgaaagtctttgtatagacataaattttcatttcttctgggtatatacctaggagtgggattgctgggtcatatgttgtatttgtgtttaaatttttaagaaactgccgaggagataatttcttggatatcacaccaaagccacatacaacaaaagaaaaaatagacaaattggacttcctgaaaatttaaaaattttgaacatcaaaagacaatatcaacagaatataaaggcgactcacagaatagatgaaaatgtttgcaaatcatgtatcttataagggattaatatccagaataggtagagaactgttaatgttcaacattaaaaatcaaataacgcaattaaaaagtgggcaaaatatctgaatagacatttcagctaagatgatatgcaaatggacaataagcccatgaaaagatgttcgacatctctgatgattagggaaacgcaaatcaaaactacaaatgggagctactattcatatccattaggatggctactatcaaaaaaatagaaaataataaatgtctgtgaggatgtggaaaaattggaagctttgtgcacctgttggtgggaatttaaaatggtatagccactatggaaaacagtgtggaagttcctcaaaaaattttaaaaaaaattaccataggacccagcaattccacttctgggtgtatacccaaaagagtggaaagcagggtctggaggagatattcgtatgcccatgctcgtagcattattcacagtagccaaaaggtggaagcaacccaagtgtccatcgacagatgagtggataagcaacatgtgttatgtacaaaataatatttttggttttttttgtttgtttgtttgtttttttgaggtgggatcttgctatcttgctcaggctagtctcaaactcctggtctcaagcgatcctctcacctcagcctcccaagtggctgagattacaggcatgatataatagaatattagccttaaaaaaggaaatcctgtcacatgctacaacatggtggaatcttgagaacattatgctaagtgaaacaagccagtcacaaaaagacaaatactgtttgattctaaatatatgagatacttagagtagtcaaaatcatagagtcagaaagtagaatggtggttaacagggcctgagggaagagagggaagaggaaatgaggagttattgttaaatgggcacagagtttcagttttacaagataaaaagagttagggagatgaatagtggtgatggtttcacaacattatgattgttttaattatatccaactgtacatttacagaaagaaaagaaaagatactgccaaactcttgtccaaagtggctatgccgttttacatacccatcaacatcctgtcaacaatgtatgtgttcccatttatccacatccttgtcaacatttgttattgtctatctttttaattattaccattctagtgaatgtgaaatggcatctcattgtggttttaatttgcatatccctaataactaatggcgttgagcattttttcatgtgcttgttggtcatttgcatatcattgtagctgaaatgtctattcgaatatttcgcccattttaaaattaggctgtttatcttcttattgagttgtaagagttttttttcagttctttataaggtgtgtgatttgcaaatattttctaccaatctgtggcttgtcttcattttcttaatgataccgtttgaagagcaaaagtttttaattttgataaactccagtttattaattttaaaaattgtgattgtgtatttggtattatatcaaagaaattttaacctcatccaatgtcttaaagatttttctctttttctcctttttttttttttgagatagggtcttgctctgtcacccaggctggaatgcagtggtgtcatcttggctcactgcggtctcaatgttgggctcaggcaatcctcctgcctcagcctcccaagcagctgggactataggcgtgcaccaccacatctggctaattttgtttattttttgtagagatgggggtctcactatgttgcccaggtcagcaactcctgggctcaattgatcctcctggctcaggctcccaaagtgcacccaaagatcatgcctagccatcccaatatcttaaagatgtttatcacatattttttctgaaaagctttatattgttaatgcttacatttggatccctgatccattttgagttgatttttgtgtatgggatgagataaggatctaaagtcatctttttgaatatggatatccaattaaaccagtgccatttgttgaaaagacaagcatttctcccaatggattaccttagcacttttgtttaaaatcaagtggccctaagtagaaagatttatttctggactctcagttctgttccattgatctatacctctgtctttatgcctgtaccatgctgtcttgataactgtaggtttatagtgagttaaagtcccccaaatttgttctcctttttcaaaattgtttttgctcttctgagtcttttgcatttccatataaattttacaataagcttgtcaagttctacaaaaacgtatcctgaaattttgtgtgtgtttttatatcttcttatttcttacatgaagataacgtattacagatactcttttaattttgattttttcatttaatagtatatcctagaaattactccaaatcagttcacagagatcttcctcattctctcttttttttaaaatagctgcatagtagtccatggagtagaggtaccataatttattaaactatttttctatctatggaaacttaggttgtttacagtattttgtcattagaaacaacactgcagtgaataaccttgtgcgtatttgttttcctattgttagggatgtattttcaggtagattcctagaagtggaatggctggaggtaagtgcatatgttttcacatcaaagaaatagcacctgtctggtttacttctgttttattcctcagacatcgatgaatgtggaaatgagctcaatggaggctgtgtccatgactgtttgaatattccaggcaattatcgttgcacttgttttgatggcttcatgttggctcatgacggtcataattgtcttggtaaggaaggcatttggaaatggcaattctccttcactctcccacccctttctttcccttggtgaagacctcctcatgaagacaaaaacgggctcagagccttgtgttttctgctcccttggaagtcagactccgtgatagaaaatgaggtaaaatgtttcagttttatgtgatcattcataacataaatcttctgttagtccaaggagatgggtgacatcgtcattactatttattgactttctagcattggcttgtcaccttttaagatctttggtcttgtgttgagagtcctgacttataaccattttttttttcaatgctgtaagtgtttctgttttagaatttggaaaaactccttgtcctgaagactccaaatgtgtgctggggttacagccagctagacccccctttttttcttgaaaaagagagaaactaaaacagaaatcttccatgaacatcttcctagtattccacaaaacagaaacatctgttggagttttagcccctgagttagagactacaaagagtgttgtttacattcattccttatgccaggaataaaacagaacttagaagcagctagcagctgcatggggttgagtgttggatagtcttagaggatgcagcactcctggcagataggtatttgtggtttgctttttaaggctggtattagttgtacaggagaacatcatgggaaaatatggcatcagcgtcctttgacactcacgacccttcatatggataacctgctgaggtctacttggccaactaaggagcagcggagccaggccctggctctgtggggacagccattcagacgcccccttatggtgtggtaggaatggccctttgattaaatgctttgagatctgcataaaaggaactagaaaaagtccagacagaacttgtgtgttgtgtgttggggctctggagtggaggagaggttatttccatttgggacttaaccctcatatgacctttatcccacttcagtgtctcctggagctccatcctgatggactctgttatttcctgttggtgccctgtgtgagagatcaggctttgggtgacacatcacgtggctttccaagcctgcagctgtcagtaagacttgattgcaggtgagggaaccagtaatcttctaggcagtcagtaccacaaaaaggcatatttgagagacaatcctgagagcaggaatcagtattaattaaaaactcagacaaatggaatcactttcagtgtgtgatttgttgggaggcataccacatgggttgctcttttttttttccattttcagggggaaatttccctttgacttgccaatgagggcatttggaggatgcatatctgatggcagacttcatcattactgttgtgctgtaatccacagcccggggtggcggggggtagtataaggttcctaagagcaagaaccatccaggggctaggaacctgggccagggctggtgggcggctctgagtattggcctgcttggaaaccctgaaggcagagtcttttcttgcctttgccgataacacagatattatcagcacagagtatctccatttcccctctgtgggatctctttgtggactcagtagcaaggatctgccttgcagagagaccttgagcatctactgagtatttctgaatggggtaaggactctttaaaaggaaggcacaagaaaatgaagtacatttggaagagtaggaccggcacacatagacacttccccaacattcagatttgaaagggctgacccagtttgtggcaaaaaagaagctcagagccctaacttctcctgagttctctgggatgaccccttcaatctcctcagcctcctaaccacacattagccacaaatatattagctagaagacacaaggtacaaacaccactaagctttggcactaaacacagagcacttcaagatcctgaatgcctgcaagtctgaaaaacgaaaggcagctcttctatacagctcaccccatctgccttcagtttctatttttggagtgtctgggagctcatcatagctgtttggctttgtagcagttgttcttaactctggccgcacactggaatcacctgagaagcttaaaaaaaaccatcacctagacttcatccaagactggctctgtcagtatctctggaggtggcatccaggcctcagggttctgacacatagccagggttgagaaccactgttttatggtctggagaagctcaccagcttagtgatagatatttgcgtacgtggacacacacttttgtatttatccaaccacagagcatcagctagctgaatgacacatttctgattgccttggggaaaagaaattgggggttaaacgtggggtgggggtgtggtagctcagaggggagcacatctttactcgcagccaatccaggagttggtgttcagggagacagacctctcctgctcaccttgagtcttgctgtggaacacctaggccaggtgtgttccagcacggctcatcctctggaatgtgcttccttcaccctttggcatagacaagggcaagtttgttaggcttcaggggatggcttgagtcccatcagtttagtcagacatctgctcagtagtgtgggaggacagaggactataagatctgaagcttgaaaccagataacagatatttaaatgtgaggttttattattatgattattatggatatgcccaggagctagtgattagcacatgagaaattagactggagaaaataaattgattttttatatcagccttctctttgagcctttgttgtctgaaacttctctggaagtttctcttctctggctcgggtgatgctatcctctcctgcttgtttgttcatgcattgaatagttaatgagcgcctgctgtattccagggctgtgctaattaaaacaaaaatctctgtcctcaaggagtttgcaatctagtagaggtagatgagtaaaggattttgaggctgcaagtcagtaagtgtagcaatacagctgtgcacagggtatcacaggcagagtgggaggaaggtcccctaaggccgccctgacagtgtgtggcagaaggcttcctccctccctacctctctgctggctccttccctggaggctcttgggactcctgccatctcctctgcctcctccctgcccctggcagggtccgggattctacctctggctgtctcctttctgctcccttcccacactcccgcctttggctctctcatcaagctccaccactttatcaggcaactacaaataaatgatttccaaagctgtgcttacaccaccagattctcttccaagctccccactgaggtttgccactgcctactggacctagccctacatttcagcatttcagacagatcacctgcctgccttgggggtcaggggcaaccatatctccattcccatttctgtacccagcactggccttccatgtgtcccttccagaaggccttggtgtcaactttccatcctctaatgatgcccaccccatagcccacaaggctcccagccctgcaggcaccttgtccgcccagtcttcttctctggcttggttcccagcatccctggcagccgcagtgctgtcgccactagcgctagctgtggctgttgcagatgcatgtgtgaagctggactcccagactgcccattcttcccctccctctgtcctgccctcagctgctgccttgtatttctcaaagtgaagggccagactctctcccctactctagtggttcccagctgcttcccaaattaagtaggcacttcattgcctggtattcaggatcccacagtgtgaccccagtctgtcctcccagctgtatctcctgtaacctccctcatgtgccctatgctccaaccacatgggctgacccactggtatctgaatgttcttcatgcctcccagcctttgtgctactgcttacgctctcttccacctataatcccttctttcctgatttataattggacaatcctaagggcccatcttttattagcttatccttaattcatcccgataccccatgaccagatgtgatttctttccttggtaccaccttttataccttatatcagaatcatttgtatatttgtctcttgctgaagggcatgctcctagagagaaggattttttttttttttttttttttagatggcgtctcgctctgaggcccaggctggagtgcagtggcatgatctcggctcgctgcaacctccacctcccaaatccaagtgattttcctgcctcagtagctgggattacaggcatgtgccaccatgcctagctgatttttgtgtttttaatagagacggggtttcaccatgttggccaggctggtcttgaattcctgacctcaggtgatccgcctgcctcagcctcccaaagtgctgggattacaggcttgagccgccacacctggccaagggaaggaattttatcttccttatctatattttgctgtctcctctagcaccatgctgtggaaagagaagatgttcaacaaatatttactgagctgatgaccttgtgtccatgtggcggtcctggccaagtgagccccagacccgtaaggactgggtagttgtctgtggaccttaccggctttgattctgaaagcttctgtggtgcagggacgtgaagaggaacctcatctttgcttagcagggcccctgagctgctgggtgaggtggggcattgaaacagtcaccaaagcaaaggctaatccctctctccttccagatgtggacgagtgcctggagaacaatggcggctgccagcatacctgtgtcaacgtcatggggagctatgagtgctgctgcaaggaggggtttttcctgagtgacaatcagcacacctgcattcaccgctcggaaggtacctctgcccagctgtggatgggggcagagccacatctgagaccctctcccttgcacgcgcacacacacactgactctagaggggaagcacagggtatagaaagtctggaggcctgaggacgagtccagactccactgccgggtaaccgtgggcaagttatttgaacttcaacttcctcacctggcaaaatagttgcactggactgggtgagctctgaggtcctttcaaactctcacattttctgattctaatctttacatagaatacatttcaaacatgactagatgtctcaggagcaatatagtggatgatctgccaagtttttcaaaaaggtgctgaaaaccacagcaccagtatgagcctgctccctgctctgggtgggtagggaggaggctggatccttcccatgcagactttcaatgaagtgccctgttttcagccccaagctagatccggcccttccatgttttgcatttttgagctccgaggggcagaagggctccctccctggactttccgtgctgtggtttccttcgcctacgtcaccatttatcattcctctgtaaatttgccggaaactcttctcttctgatgtccttctcttcattctctttgctttgagtttataccttttttcattcctctgttacttagtagattcttgagaggaaggggcattaagtacatgtggccaatcagttatttttaactgaatgtcatccttttaactcttccctgctctttcttaagctaaagagtcacattttggtggctgtgttcctcttggagttgcatctgcctatttttaggggaagtgccctaaatactagcctattaacccctttggccatgtgctgcttattctttcccattacttaagaatgaggtcattttaatttcttctactatttaatcacaaatttatagattgttttaatcctggtcttggtaacttttcaagggtttcttcatggaagatgatttttgtctcattttccaaggatggcagctcacaccttatacttaactagaatacctgtttgggtaccaagaaaaattgtcagaggaacccccaggggccaatgggtttgatggctatcatcacccagagcctgctcattctcagcgtttggggcggggaagtcacacatactggctttgatcaggcagatttcctatcttgtgccaggtgtggcccttgataaagtagcagttgggtttcattttcctgccaggttctctggggtcattggtgtgccctgcactcttgtccaatgtaggccaaattcgagatgggaatgaattaggaggccagtggcacagagtgatccgaatctcagggcatctctccttttgattgctcaaagctgcttcctgggaagtcactttggcttcctctgcaggtggctggggagggatgtgggaactgcaggttaaagccatcgcttgagccctcacggtctgggtcccacccagttacaaagcagctggtagcgattaagatcacctcttatccctgtacttccagagccctggctcagccccactctcccctcctgcaagcccccggactgattagagacacaggctcctcataccagaagcaaatacaaatgcagttcctttctgcaaactgtgttttctaaattttctacaattcagacattcttggatcccctaaagagtatttgaagtgaacatttttgtctggaactaaaaccaaaatctaagaatttgcgttgtggtctggaagtgctctctgtgattttctgttgtgtttcaacctgattgcttggcaaattcatgggagtgtcagccaacagattatagcaattggtaacggagaacctttgcatcctagggttttgattcttcaaatagaacagcctgtaaaaagttttcttctaggatttcctctctgatatgcacattaaactctatgaaactgtaggcttaaaaacccacagtggtgccagacgtggtggctcacacctgtaatcccagcactttgggaggccgaggcaggcagatcacgaggtcaggagatcgagaccatcctggctaacgcggtgaaaccccatctctactaaaaatacaaaaaattagccgggcgtggtggtgggcgcctctagtcccagctactcaggaggctgaggcaggagaatggcgtgaacctgggaggtggagcttgcagtgagctgacatcgtgccactgcactccagcctgggcgacagagtgagactccacctcaataaaacaaaacaaacaaaacaaaccaaaacaaaacaaaacccacagtggataccttcaaagtgattaaaagaaggtaacacaggaagctagtattttctattgctgttgtttttaataattatttaccaaatgttctttaatatagggcatcataatcattgactctgagggaaagctcaagatactgattttttattttatttttttttatccttagagactccaaagctgtgataaagagactgtgtgttttcacccatataatgagggtaggctggagagaagcacatcacccccggcccgcctttgttcctattcatgggtgctcaggctctcagaatgagcactcctcttttgttttgtgtgttctgagaatatttagatggtgtactgatgccttttcagggcaacagggaaggtgtcagggtggcaaagtggaggctgtgctttcagcaggacctgttacccgttttatgtcatgttttcctcccaattcacaaggcatatttttgtttggtttccagaaataatcttcagtggagccctgatcttggggtgcaccagaatgggggatttccaatgtttctgagctgtttcccttctggtgaacgaaccatcctggacgtgacaaccagaccaattttggaaagagctagggccatttgctgggctgcctagtttggaacagattaatctgctcaccccagcagtggtcttgcattaagtcagagtgctacaaaggctttgaggtcacttcttgaaaagctgtcagcgtttccagagccatttaagtctctattatgtcttggtaacttcaggtgtagcttgatgtggtaggacattaggtggtaggttctctgtgtatcacaatggcatctggcatacaggcattcttacgaaatatttcttgtgtaggtgaattactctgaggcagtaaaggtcactttgcaaatgtcttaacagtcttgtaaacagagtgaaaaagcagcagcagctggcctgtttgggagtgtactttccaggtgttcctgcccccatttcttgggcagtattatatttacccccgagcactagttacttcccatgctcggctgacccaaggacaaacacaacgctttctgggccttctcagacaggacactgcttctagaggcagctgtcacctcccgcgccatctcagtactggggtgcaaatcacatcttcggaattaccagccagagcaagagaaagctttccaccaatccagtgcaagtctctttctgtgttaattgacagccacccttggcatggatgaatgaatcccagcaaccagcagactgagtgctggagtgcaggcagctcataactgtcaggcaaaagagcaagagggttttaagagagactccagaaagtatgggatatattaacccttgcactgtcttctggaataggaatgacatctgtttgtattaaaacaattgttccgtttaagcacagtttgacagctctggagtgggagctggagagagaactttgacttcactagaacctgttggctaaggttttaggggcacaatatagaagggtgttggattctagagaagtgaaagcaacctttttgtactcgtgttgaaaacagtgccctactagtattagagtgtctcattgatagagagccaatgacaaccaagtccctactctcagagatgttttagagttacattgcacgaatgcaaagaagcaacataggaacaggtaattaataataaagtataaactgagcagatgtcttgaaagtattctagggtatgaaaagaattccttcaggatgctggtaggcagcaggatctcaaagaattagttttgagatgaggcagaatgctggtaaaccacacgggcagttaccttgctgtgccccctcatttagatgtgtgccgagccctgcaagaacagaagcagctgttccccttcccaccatcatactacaaggttaagcctaatcagaatttactgtatacctcaaaaaaattgtacagcagctaccacacacgagcacactccctccttctctctctctctcttctctctctctctgtctcttctctccctccctctgttcttgttgctgttgctgtgtgatgctgtcagaggcttatgccctgagggagggatcaagggagtggctgagggtggtcacagaagacagattccggggcatgtggcccgtacgaggatgccaaaatgccacagtcacactcacctcagaagggtgggattggtgggggcagagaggggcgttgaaatgttttgaaaattatcttcaagagtatgtgaaaaaattgagaatcttgatcattctatctgaacattttcttaggaggattctccttttctctttacattcttgatcagctcttgggtaaagacatggcagagataagagcgtgagtaccagttcctggggtcagcaggctctgatcctgcatgcaatagagagctccagtgtattgggaaggctcccaactcgttaggagagttgagacatcgtatctcttgggtgacagaataaatttttcatgtctattaattggcctaggttgactttaatgacatatacttttcaaatgtggggctgatggagacctaagcagacagatctgtgggccaccccttagccctttgccgctctcccagggctcaggattctgaccacagcctagtcacctgtcgcacactgctgtttttcagagggcctgagctgcatgaataaggatcacggctgtagtcacatctgcaaggaggccccaaggggcagcgtcgcctgtgagtgcaggcctggttttgagctggccaagaaccagagagactgcatctgtaagtatgggccagtgcacacctgccatgggaaccgtcgtattccacaggctgccttctgtggcccagctcagaagcaccacctcatggcacggctgcagcagcagggaaggcagttagcacgggataccgacctctaccaagtacttgttcactgcagaagggtggtctcccttagggaagggaaatgatattttaaaaaggaactcatcaggaggaaatgaaattcaggagtaaggagtgtgaatgttggggggcagttctccctgttcccacagaataaaaccaaatgtcctcatctggcaatcacagctctttgccaccaggtcctgcttcccctataaacctcatctgcctcctttccgcagacactactccccttgcctttggagaacagcccaaatcctttgatgcctccaggcctttcccaagccctcctgccttcctggcgtggtggactctcactcaaccttcaatattctgtttaacttctaataaggataagcataatagctaccttttggtggggaatttattttgtgcaaaggcttgtctcaagatgtgccatatcccatttaattcttacaagcactgcactgtgagctcagtattattacactcattttcagttgtcgaagttgtgcagaaggtgaagcaacaaggtcacacagggagtgagtggcaaatgagtgttcaaaccctggtctgttgagctctaaagctgtgctcttaatcccatgctaccatcctctgctatcagaagcctcctgggtgcttcagacagggcagccatcttgtactttggctcccacagcactttcctcagctgtatagctctgggttgacttgtgtgttgatgtgtctgtctccccaggtatgagccccctccaagtcagggaccttgcctcatttttcctctcagtcctcccctggtacctgctatgggatatgctcagtacacttgtgtttaatgagtgggtaaatgggtggcctacaccatcgggccgcagctcctgcaccacgattgtagtaacaaaactccacctgggaacaggaaaccactggcaattcatggtgttcctaaaccacgatttatgccaggggaagcactgaggagttccctttaggaaccttcccaaagccatggacagaagacccctgccatttggtggggatggtggtttatggtgagtaggagatgaggggacagtttcactggtgagggacttctctccattgtctccctcacaaagcagactgccaccccaaagctgtccaagccaaggctggtgccaccatcacactcaagcaacaggttctgacatgctcttagggcccctcgaagtcaggctgtccctgagggcttccagtgagctagcagagtggagaccattttcccacctccagatcttcggaaggaagacccagaccctccaagactcacctgcggggcgagaccctcaacatttcatagtctttcagggaacagttgctgaagggggcgggggggtgggcacctgtaagcttgtttttaaagattttaaatgtctttaagatatcactgctcaaataatattgttctgttattaactttttttaattttaacattaacatattttaacattaacattattaacatttttaacattataacatttttaacattaacatatttaacgtttgaggaattaacaaagaaaaaaactaagacctagaatctcaccacataaccagctgtttcaatttttccatattcctatttagttgttgttcatatgcatacacaatttttacatagctataatcacaggacaacacaaatatgtaattagttcttttgaattagaaaaattacaaagggcctatgtaaaatgcaaacactccaaagcatataaagaaaacatgcagtttcccgcctcccgtttcccttgccagaggtaaccacggttagcagtttgatgaatagatagttttgtagttggctttttttctttttggcctatcatcaatacattcatatatagtcttgataattaccagttactgtcacgttaattgtgtgcagaatcatcctgtgattatccttccttctaactaatctagattgaatctgatgagagaaattctgacatatatgtacaaattaaatattgtctgttttattccagcataaagtgctatagcatttcccaaagccccagtacagctgtattaataggtaaacttctctagatagaacaaagcagtagtctagaatctcttggtataatttcccttatataataaaagtctctcccccaactctcccatctccctcttcctgtatgactttgtttaaacccatgtttcagcatttctacaatttgtattgtaactatctgcatacacagacaccacagggtctgacttggagttatgtctttcgtgcaccatgcctggcatgcactaggtgctcaaatacttgcagaatgaaaatcagaatttctctggagcaaacacagccctgtgtttgtggaaatctcagtgctttatgtattgattcattttgctgtcagtgacctgtaaccatgggaacggtgggtgccagcactcctgtgacgatacagccgatggcccagagtgcagctgccatccacagtacaagatgcacacagatgggaggagctgccttggtgagtggcaaccccaacactgagtgagggtctgcaccagcctgcctgtccctacccctaccccttaatggtgtttagcacagatgcaggctgtttcctgtgcatttgcccccccagcaggccctgtgctgcttcgcatgctacagtgggagtggtctaggcctgtggggaaggcccctctctccctgtgtgaccttgggaagcccttcctcctctcctggactaggctgctcctaacgctggtattccagagactggcacaacacctcccaggaggccagggcagcacgaagttagagctgtttataatgatgcggcacttctggccagcaggagccagggccgtatatttctggcgggatgcctgccttgcccttcacggtgtgtccttcactagctccattttagaggtttccaggcccaaggctctttttctcctcgactcaggggactgaagcttgcattccctagtgtctctttggtcagtgcaatatacctccaaaatcttttccatgtttaatgtttgctaaggatctgtggccctttaacgggctgtgtctcccacagagcctcattacaacacatttttattgcgtgaacagagtcacatatctttcattcctcttatgtctgggatttcagcaaacacagttgtatggggatgagcaatctaactcattcagtctgagaaccgtgctcttttgcttctcttgtagagcgagaggacactgtcctggaggtgacagagagcaacaccacatcagtggtggatggggataaacgggtgaaacggcggctgctcatgggtaggcaccttcactccctttccttggccactgcaattgtccttttccctccccaacttattgcatcagacctgaacttgggagccacatgccctcagaccagctggactggggtgagcagctcctgtgaaccagggtgtgtgtctgttcttcaccagtgctgttgcttaatcaccaaccaagcaagacccttggtctcgtgtccatcagaataatcaggttaacgtcccaatgcagcccccacctagctgtaagacttggcaaactgccctgaggctctgtctcttggtctttctttgaaatggatgtaataaagtctacctcttagggccagggtattcgcccattttcatactgctgtaaagaactgcctgagactgggtaattgataaagaaagaggcttaattgactcacagttccacatggctggggaggcctcaggaaacttataatcatggtggaaggcaaaggggaagcaaggtaccttcttcacaaggtggcaggaaggagaataaatgcaggaggaactaccaaacacttgtaaaaccatgagatctcatgatctcactctatcatgagaacagcatgggaaccgcccccataatccaatcacctccacctggtctctcccttgacacgaggggattatggggattataattcaggatgagatttgagtggggacataaagcctggccatatcagttgggatgctcaattaaaataataatatggaaaggtgcccagagtccagtgcctgggactgagtgggtggtcagtgaagtcagctgtcttcctctgaagcagcctctagctcagaatggcagctagtctttttttgtgtccactgagtcttctatttctgactcagctgatgataatagtagaagagatgaatggagaggggcaacacttggctgtgggacaagggaagacctgcctgaaggtccagcggtcaagctggagatgagcagaaatagaggtggtcatgggggtgggagtcagacagatcctttggtgcgttactccttctggagaaagtctggctcaacctaaacaaaacccatcttttgacagtttctggatttaacagtcaggcaacatatcatacagccattggttaccaagcaggtaacctttccgagctcttttctgctctttagaaattataaattttcattgtcttaagtgaaaatagtacaaatgagtaacataaacgcttaattacttctaggcttgtaatgaaactcatcatttccttgtctcataacttcccatttcctcatcccatttgccagaggcaacaatagtcaattcttcgagctgtttcttcttctggctcctcctcccccatatttctgaaaaaaatgaagggtatacagttatttttttcttcttttcttttcttttttttttttttttaagacagagtctcactctgttgcccccaggctggggtgctgtggtgtgatcatatctcactgcaacctccgcctcccaggctcaagcgattctctcacctcagcttcctgagtagctggactacaggcatgtgccactgcgcctggctaatatttgtattttttgtagagacagggttttgccctgttgcccaggctggtctcgaactcctgggctctagcgatctgcctaccttggcctcccaaagtgtttggattacacgtgtgagccttcatgcctggccctacagttacttcttgatgtgtctgttttagatggtagcttttaacttcctattatgaaagactaggatttagctctcactgcttccccccgcaatacacacacacacacacctgacctctccctatacccttaatattgttgtctcacaatttaaatcaatattatgtgcttacattattctgactttgaatatctaaatacgattcacctgagtcatgtaacgtgctatgattatattttctttgtttgcttagttttctaagtacctcttaccaattcttttgcaaatttcagacaaagctgtaaaatacttttcaatgtgttcaaatatagtgtaggtaactaatcaaatcaattttcttggtgaaaaagtttcctcggaggcttccagcctgccctagcagggcctggctgtcttggctgagtgcatgtctctcatctgggcattcaccatcagcctacaattccctttgccgctctcctgttgggtggatcctatgtcttgtctctcattagtttatccggcgaatgagatagaggtatttaaaaatttgcatgcctgaaaatgcctttatattctacctgcaccctttattgagaatttggctcagtgtagaattcagagttggaaagaattttccatcactgttttgaagttagtgctccattgttttcaagaatgcagagttgttttgagaagtctaaaatcatttttattcttgatcctttgtgtgaaacctgtgaaagcttctctctgaaagcttccaggatcttctcctccttcccagtgatctgaagttttacaataatgttccttattgtgggattttgcccacctatttttagtacttttcaatatgaacattcaagtccctttgttctgagaaattttcttacattcttttctttgataaatttctttttctttcttttttttgagacagagtcttgttctgtcgcccaggctggagtccagtggtgcaatcttggttcactacaacctccacctcccaggttcaagtgactttcctgcctcagcctccccagtagctgagactacaggcacatgccaccatgcctggctaatttttttttttgtatttttagtagaaaagggattttgctatgttggccaggctggtctcaacctcctggcctatgtgacccacctgtctcgtcctctcaaagtgctgggattacaggcatgagccaccgcacccgtcttctttgataaatttcttcactccattttctctgttctttccctccggaactcctgttagctggctgtggtaactcctggattgaccccctaatttttttttttttcttttctctcccttgtatttttattctttttcttttctctcctttgtatttttgttctactttctaggagagttttcatttttttcttctaatctttgcacaggataaagttttcgttttcatgttttaatttttcaggcattttactttggcctttggttttaggaacctgctcttatttcatggatgcttttcttgtccccctgaggaaattaattacgagattttaactcctcttctgttctctagattatctttgtttcctccaggtttctttttccccgttggtttgatctggtatattcattccgtattagaggctttccagaaatgtctagtgattcttgaccgacttttcatatttaacagtaaaatactaaaaagccaattggatattctattgatttgtgggcttcatgtttgggtgacgaggcagtgacatagccatttcatctggagatcctcgaatgctaatatcgttaggtctttttgcttgggcaggtcaatttagccggagaggagtccttcaaccacctgcctgtaggcttggctgctagcatcctgggttgcagtgttgtttcaacatagctttttggaactttcaatggctgttattttaacatagcttttggaattttcaatggctttaaatctgccagtagggagctgaaggagttgggggaagagggatgagggttagagatctctttttcagggtatagactttcacctgatggtgacaccctctcctcctctgctattcctggtgcccttgagcctggtacctctctggtccagacttctctgctatagccagaataggagaagggtagtcacatgactatgtggagttaaggaggagctctggggtttatctctttcatatgtagactctccataatcttcctgttcttaactccgtcctcatttctgcctctagaataacttgatacctccaattcctgagtctttctgggactctggggctcacaggagtttaccagctgttggcaccccctctgcagactgctaggatctagctttcttctacgccagatactgctctcctgctaacatgtcacttccagaatgtttgacatcttttatctattgtcttttctcctattttctttgtccttaaggatttatactttaaaaaatcaattgattctcatattcgtgaggttttgaaaggaacagagataaacatacatgtactatctgcatatttaattaggattaagcttgttccctttagggttccttctttttttttttttttcttttcttttcttgagacagggtctcgctgtattgctcaggctggagtgcagtggcacaaacatggctcactgcacccttgacctcctgggctcaagtgatcttcctgcttcagcctcccgagtagctgggaccacaggtgtgcgtcaccaggcctcgctaattttttaaaatttgtgtagagatgggggtctcaccacgtggcccaggctggtcttgaacccctgggctcaggtgatcctcctgcctcagcctcccaaagtgttgggattacaggggtaagccaccaccctcgccaccaccccccacccccagcctttaaagtgaggtagctatggtagaaaaatcatgtttctgggtgcctagatgctaacaattcaatgaatgttgaatagcacttgtctattacttggactaactgtatgagatacagaactagaaggctgtttgcttattgttcctcatctccattgttgcaatttaacaattgtggcttatttttcacgtggttatgacagggctttctcctttcagggaaagtgaaacttcaaatttgagtaaattggcagttgcaaggatgaagtcagtagtctacaacaaggcagtggttggggcggcgatgcttacccactcttgctttgcccattactcatatcgaaaggagaaggttcaagattaagaaaggaccatcccctttgccctgttctgcactcacctctagcctgccagatgtggtcctacttaggttgctggctgcagatcagcaggaactttcagtggctttaaatttgccagtagggggagtggctctgcagattgggagacatctttatccctctggtcaccctgacagtcttcctcagaaactagaactcatttaggggggtgggaggagctgcacctgctctccctctagcccatctgcaggtagcagagacttggggtatgaccatgagtaccccaccatgcttcttggcttctgtgaccttcgtcagctgtatcagcacttctttgggaagctaattgtcttttcttacctccttgccagaaacgtgtgctgtcaacaatggaggctgtgaccgcacctgtaaggatacttcgacaggtgtccactgcagttgtcctgttggattcactctccagttggatgggaagacatgtaaaggtagccttcacctccccagggagactggatgccctgttatggagggagggcccatgccgctaacatatggggataaaggcaacataccctccataccccacgtgactcgagatttgcttatgattcatatcaatgggagctttttccccctgggctagtggaaggttataactgagtaagcttaattagaaccaacacttaattacactaattgttgaggaggtcagcctctacaagcatcaaataattcatttcagacagtggccttattagaaaaaggcagttaaaggaagcattcatttgcaggagataatatcaacatatcatacataatagcctagagattattatataaataacagtcaagatgattatccagaggacttaatgaataactgtaccattaacttttactgatgaagagcgaccccaatgacttgctcatatttcatgggcaagagtacaaaggattagccctttagcatgataaaaagtagataaccaattgccagacgaaactgggaaaagataagattgagtatcaggaatcattttaaaacattgaggctatttgatcattgtgtaatttgccaaaacaaatgctctagtcctttatagctttaatcattaaacttgaatacatagtgtactaaagagacccatcttaccttgagagagcaatacaaagatgagaatataacaggacgtcatcattctttcccagagtttgtttccttaatgccaatcaagggcatcataagtcagcgttctcaagacgatgaaacacttgtctttcaaaactggttaagccagataagaaaacatgtataaggttaaaaacatcagcaaacattcttaaatgcttttgtgagtctttttcttaatttcagagactaatgaacacacacaatggcccttcagggagttgtgggaaatgaggcaagtattgctctctgatatgcccaatgctttcctgttgcagatattgatgagtgccagacccgcaatggaggttgtgatcatttctgcaaaaacatcgtgggcagttttgactgcggctgcaagaaaggatttaaattattaacagatgagaagtcttgccaaggtatgtgctgaaaacatagctgtgctgcgcaatggcccacaggttggagcagagagaacgtagcaccctcctggcagagactggcttatcaggcttcttgacagggccactaatccaatctccttcctaggcttcactcatttcatctattaggtaaaataaaaacactgatgtagctcacaggtgtatttggaaattaagctgttaatggttagagaacaccttaaagaacccatcgatgtgatgacagcagagctcactgctagaaatggaatggaaaacagaatgcaaatggggttccagtggggtgttgagattatgaataattttccttttctaaaatttcctttaatgttattgaatttatcacaaaagttggtggcaaagtctgtagatttagttaacatacctccctagcaaaaacttggagttaacccatgatcaagattatgtaccaattggtctctttcttatagcacttgtttttttaattttttaattatttatttatttacagacagagtctcactctgttgcccaggctggagtgcagtggcatcatcttggttcactgcaacctccgccttcctgggttctagcaattctcctgcctcagcctcccgagtagctgggattacaggcatctgccaccatgctcagctaatttctgaatttttttttttttttttttttttttttttttttttgagacagagtctcgctctgtcacccaggctggagtgcagtggagctatcttggctcactgcaacctccgcctcccaggttcaagcgattctcctgcctcaacctcctgagtatctgggactacaggtgcgcaccatcacacccggctaatttttgcatttttagtagagacggggtttccctatgttggtcaggctggtcttgaactcctgacctcatgatctgcctgcctcggcctcccaaagtgctgagattacaggtgtgagccactgcgcctggccaatttctgaatttttagtagagtcagggtttcactgtgttggccaggctggtctcgaattcctaacctcaggtgatccgccctcctaggcctcccaaagtgctgggattacaggcgtgggccaccgcacctggcccagcacttgctttaaaccatcagcctttgatctttgaagagagggaaggcagagagggagggggagggcttgtggggaggagatgcttgttgatccttagagaggatttcagaccccttctcaaacacatccttcccatataagggctgcagcaaggagacttctctaggtagcagttgttgttagtattagcagctgttttgggtgggggaaagctgttttctatttttagatgagcaccttccctttgatatgcagaagaagttctcaggaaagatgtgctgtaatgtattcttgctccatttttgggaataaggactaatttattttgttagaaatctcagaattaggctgggtgtggtggctcacactgtaatctcagcactttgggaggctgaggcaggtcgatcacttgtggccaggagtttgagactagtctggccaacacggcaaaaccccgtctctactaaaaatacaaaaattaggtgggggcatggtggagggcgcggtggcgggcacctgtaatcccagctactcaggaggctgagacaccagaatcgcttgaacccaggaagcagaggttgcagtaagtcgagatcatgcccacgcactccagcctgggggatagagcgagactccatctcaaaaaaaaaaaaaaaaaaatcagaattaaataaaaatcagagtatcagatttcatcttagataacaaagatgtagcattacctttttacaaaaatattatggtgtgatgtttgttttgtttttctcttggtttgttcttaatgcataatttgtcaggcagttcaagtatattcctctttaaattcagtaagttaattctagataattattgtgtggttttcttcagtttgacttggaaagcaaatttgctgttccacataatgtttcctagtgtatagagcaggcaatactgttgaagctgtgtaaacacattaaaaaggaattagaaaagtgatctcattatttttggcaaagcaaaagcccatactgagcagccaaagtcagctactgaacaagtgcactttctcgacaactggctgatattaataacagatttcataaaatggcatcaattcctagggaagaaactaggtttttctcatttttcactgatcggtcttggtagaacaaatacttgcacagaacaaatttactgaagaaatgccaggatttctgggaaaagctagggatgaagaggttttgcaagaatttgcccttttttattttgctttttcattcttcctgttccttccacatttttgccttttattaacatagtttctcatggcacactcggtgttgaaaaaagtggtctagcagtggtctagttggcttcgactgagtgcggcactggtcctggtttatccatttggagacacaagtcgtaactatgttaaaatcctccagagttcagggagtgaagcactcaaattccagcctacaagaaagaggttgagggccagacccagggaaagagatgctgagatggacaaatgcagcctcctgaggctgctgtgcatgacccccgctgcagccaaggaggcttccacactgaaccaggaggctagcagactcataggactggcacataggggaggagcaaaaccaaggcatcggccaaaagcatccaatgtggagctgaactaccacatttcagggcctgcaaagagaaaattagtgaggatattagtattgatgcattctttcagtgcagagggcattaaaacctaggattaactggcctcttggggccagaagactaattctgagaaaataagaaagggatgggaactagatttacctccaaaccaagtgttttctcctttcaatttgccgtagttaataaattaatattgctgttttactaatagttatatgacaataaaaatgcatagctagcacctgtagcttacaaaaccctttttaggtatgttatctcatttggcttcatttaaacattttaaattagccctgcaagtacgcatgggtgaaagagaccaactgagttttgagggaagtgcagtttgcaacagaatgtggaaatgagggccgcggcagtcagtatacttcttgtgggctgctccacactttctttaacacaagtgagtgaggaaaatggatagataatgttttttactctgtgtgtattgtttttggtgttggtcagcaactggtatttatcataaacctattcttcactcatccctcagagtgggtttcagctcccctctccctttgaccattacagatgtggatgagtgctctttggataggacctgtgaccacagctgcatcaaccaccctggcacatttgcttgtgcttgcaaccgagggtacaccctgtatggcttcacccactgtggaggtgagcagactgcccctgtcaagttgggaggggaatgaggctgggcctggaggggagcagggcctacccctgaggtttgctttcctacattggggtatgaaaggtacattgcagtccctgagcaatagcggtgagtccatcaacttgagagcaggatctgctaaaggaaatctccccacatgtatccctttaacacaccgagtgtgaaatggagcagagagaagaactgagctcttccagctgtgaattctctatcgacttgattgacttgcggctgtattcagagagtggaagggtatctcaggagctgataacctatctattggaacatctcagcagatagtaaagtcacagtcctcagagaggcttggggggcacccaccaattccacagccctgctatgcataggaactggctgcaaagccttggtttgagtcccacaactaggtctttgagctggaagcagaactatgaagtttctctctccactctgtgcccattttgcaaaatgttctcatgtctcataacctcatggtcaagcaggctatgccataaactggatttgttaccaactaactcccactccactcccccagccatcagattcacccagcaatctttgagaatacaggttcagattccaattcagaatgtctaggacttccaaggtcatcttcctgaggatctataggatttgggaaccactggcttaaatacttcctgaccagtcctgagtcttgtgctttagaagattggatatgctgggcgtggtggcttacggctctaatcccagaactttgggaggccaaggcgggcggatcacctgaggtcgggagttcgagaccagcctaaccaacatggagaaaccctgtctctactaaaaatacaagattagccgggcgtggtggcgcatgcctgtaatcccagctacttgggagctgaggcaggaaaattgcttgaacccgggaggtggaggttgcagtgagccgaggttgtgccattgcactccagcctgggcaataagagcgaaactccacctgaaaaaaaaaaaaaaaaaaaaaaaaaaaaaatatatatatatatatatatatactagtgctttgctactgacagttatctcccttctccctttcaacacatccttggcatggccaaagacatactactcttcccagtccatcaggaaacctcgaggaaatgtaccctgagtatggatgtatgtctgggtttaggtggagctaccttttgatctggactcagtctcaggttgatgggaattagtgtagtcacttccctttctctgtgcctcaactgtgtaaatggttaagcagggagtcccagttctgtctgcctcccttgctaggcagctcagaaggatggtagagttttaaaatagaagtctgtgcagtgtctgagtttggacatctgaaagtagagtgcggatccttctgagtgttgctaatggaggaatggattggtcaagaatggagcttgagtctgggtgtggtggctcacacctgtaatcccagcactttgggaggccaaggcaggtggatcacctgaggccaggagttccagaccagcctggccaacatggtgaaaccccatctctactaaaaatgcaaaaattagccaggcgtgttggcacatgcccgtaatcccagctacttgggaggctgaggcaggagaattgcttgaagctgggagacggaggttgcagtgagctgagatggtgccactgcactccagcctgagtgacaagagcaaaattccatctcaaaaaaaaaaaaaaaaaaaaaagagtggagcttgagaaggccctattgagcctcctgccaggaaatttgctgggtggggagtggggtgtgcagtcagctggtgccgagcgctcatgctaaaggcattcagtgtcttcctttggttagtgagtttcaaccttgtgactcccctgctgctccttcctcaagggagggaccatgtcagcccattcagtgacaggctgctatgacaggagagtattttgttccacagacaccaatgagtgcagcatcaacaacggaggctgtcagcaggtctgtgtgaacacagtgggcagctatgaatgccagtgccaccctgggtacaagctccactggaataaaaaagactgtgtgggtaaggggaaccgaggcacagactcagacagcaggctggccactggcccagaggcagtgcagctctgcgtgctcccacatcccacctgaccgtccctccactgacttccccaccagctgcagcaactgttctttaaatagttcaaaaacaggagatactttgcaggatctttggtgtttccttctgtgcttctgtgtaggttggaactcacttctgttttcctggttgcttttctgcatgaagaaatggcatatcaggggctcctttcccttggtgggaataaggcctagcatctatgttctgtgctgggcatgagctctaccttcttttcttggggcctttggtgcatgggactcaaccatccttgtcacacttggaaatgtccttctctttctgtaagtgtctgttttgtcctgtctagaagtgaaggggctcctgcccacaagtgtgtcaccccgtgtgtccctgcactgcggtaagagtggtggaggagacgggtgcttcctcagatgtcactctggcattcacctctcttcaggtgagtggggcccagttcccggggcaggtcctcacactggggccaggcctctctggcctccaggtgttagattccctcaaagggcttccaggtcctccgccagatgccccgaccaccgtgctttgagaggtccatgcttcgagaccccatatgctgggcatttttctagtggcccatgtggagtggggtggggggacagtttagctgctaccaggatagcctgtgaccttgcttatgcatttgacaattgacattctgtctgtcaggactgcaaggggcctactctgtcacctgtggctcttcctctcctctcaggaacaaacaacaaaaatcaaatgactctgcttttgggggtaattaccaaatctgcgtgttctctctgggggctcactgtgttcaaggggcttcattcacggggtgctgttcttggacattggctttgttttttttctgttaatttccttgatgctgtgagcatgttccagggtgttgttgcctgcagtcctggtgcccggaatgtgactctcccatgtaacagatacttactgtgtggccactgtgtgtcaggaggctgtggtcagccctggtgggtcatcaccctgggcagaggcccacagaaccccaggaccagcaggctgtactccagagcacctcaaaggcccagggaatgtgcctggagcacatggtgtggatagaaataggcaaagcaggggcagcagggattctgtgccgagaaaggggcccaaaccctttcctgtttgtcaaaagatgaagaatgaaatccaaggtttttaggaggctgtgtcctcccggatatagacgcctttgtcattatgtcattggaacacctgaatgaggttcatattacatcctgatgttcatattacatatatgagcaaagctagagactcaaagcaagacagtacagcttgtatgtgttgactgagcaattcaaatatgccagctaccatagtacacgaattaactgacttaagccatactacaaccctctgaggaaattttactattattctcattaaccagatgaagaaactgaggctcagagaggtgaaataacttactcaaagtggtttagataagaaataggggagctgggatttgaacccaggcagtctgggtccagagtctcaagcactatccttcactgcccctttcaatgcacgtttggactcagccagggcatacatcatggtctgtttcgccaaatccctcagtgacagttccttggtgatttgggccaccccaaggtggggcaagcaaatagctaatggctatgcagttattactacgtaccaggcaaggagctaaacattttcctttttttaaatgcattatctcattttatccttacaacagcctggtaatataggtactataattatgcctgttttacagatgaggacactgaagcttagggagattaagtaacttgctcaagttctcaccacaacttaaaagagctgtagggcattgactccagatcctaccggatggttaagactgactgaccctgggaggagaacagaattttgcacatcaggctctcacagtgggaccctcactccctctcagacctcagagcctagccatgtttagtgagtgccatctgtgtctggaacaacagctccctcagccctgtcctcccacgacgggcttgtttaggagaatctgcccttcaccatttcgccaaacgggcttatccagatttgaactgggggattctggcctttttttctcaggaaggcacaaaaatgacttcatgttctatttcaccgtggaggctatttttgaccctcagttttagatagatagataggtagatagatagatagatagataggtaggtaggtagatagatagatagatagatagatagatagatagatagataattttttgttttttttgaaatggagtctcattcactctgttgcctaggctagagtgcagtggtgcaatctcagctcactgcaacctctgcctcctgggttcaagcaattctcctgcctcagcctcccgagtagctgggattacaggcatgtgccaccatgcccggctaatttttgtatttttagtagagatggggtttcaccatgttcgccaggctggcctctgttttatttgaacactggatttgcctctcacatgagggggtaactgcaattttaggaggctcctggtggccccagtccagggcaatgggcactccatgatccaagccactcttagcctcagggtaggagagggtctcagggtgtgctgtgtgtggtggaagccaccaatggacagcttgctgcttcccatctggtgtctccattcctttgcctctgaaggtaacatctctcacttgtttctttctgaagatgtcaccaccatcaggacaagtgtaacctttaagctaaatgaaggcaagtgtagtttgaaaaatgctgagctgtttcccgagggtctgcgaccagcactaccaggtatggaatcagatggttggtgtagggagcttgcctgcatgtgggaaggggcctgcagccagccgagctggaggtccatgggggccaggggctgtccagccgatccaagcacactgcagatggaactgaaccatccccaacttccagggactcatcccaagaggaagaagagcataacctagcatgcttgtatagttctggggtcacacttcggggcttcctttgcatggtatagttggtgaggctctggggaaacccacgagttcacagaagtcaataagggcttcagatgaattagcaatttgtgatcatattgggttaaattttctagatctcagattttgcttgaaatataagccaaagaaatgaaaaaaggtttggctcagaaaggataactttgatgaacaaagatctaatatccagccttcctgctgggtctagtttttggaagcggtgaccccattggcttcagcaaagcaaataccatccaagtagaactggccttattgagaagagcagaatctaacattcctttttctttcccagcacacatttccagtattattttatagaattcttttggaaattaaaaataaaaaggatcaggattcatgtattagggaggcttcttttcccaatctactctcaaatcacacagacaaataaacctaaagctcactctagtcacttttgactgcctattttaggtaagtaattttaagaaacttggtacctccatttgatggaatattatgcagctattaattctatgttttcaaagaatgtttaatgacacaggaaaatggtcttgttataatgctgagatgtaaagcaggagagaaacattttgtatatctaatacaatccaaattgtgtaagaaaaactgtggtagaagaaacaaaaagaaaactcaccatatcattagtagtggttacatctgggtgggaggcatgggtaattttaattttttttctgcgtttgccaaattaaccatagtgagcatttatacttttaaacctcaggggtgaagggaggggccattgctcaaaaatagatttgaaccagttgtggtgcctcatacctgtaatctcagcactttgggaggccaaggcaggcagattgcttgagttcaggagttcaggagcggcctgggtaacatgacaaaaccccatctctacaaaaactataaaaaaattagccgggcctagtggtttgtgcctgtagtcccagctactcaggaggccaaggcgggcggatcacttgagcccaggaggttgaggctgcagtgagctgtgttgacaccactgcactccagcctgggcgacagagcgagaccctgtctcaaaaaaatgaaataaatacaatgataaaaatagacttggcctatagtttacttaatgggattgtactagtgttaatgtcttagttttgataaatgtatgatgttaacgttaggggagactgagtgaaggttatgtgggaactctatactatcttagcaacttttctataaatctacttatttcaaaatgaaaagttaaaaaaatatatatggaaacatcgaaagggaaaaagatttaaaatgagaatctgttcagtttaagatctgaagttacccttttgaaaaagtaagataaatctttaggggaaaaatgtagagaagaaataaatctgcctccttcctgtggcccctgttgacctatggcttgaatgtccttgtaatgttaaagaagaatctgatacaggcaatacttcatttcaataaagattttgaaatagagacaaattcatggagtggatgatatgtggacctgctctttggtgagggttaacagattcactggaaaccatggtgagaggggagacagccaagtcaggaagaaggatgtgcaaagccctgtcatgcaacacttccactctcatcctagatgccttcatgatattgttaggttctgttgatgctttgtaccatttattgctcctggttatttaaaaatgagacatcactgctgacgggtgttccagctttcctttcaggttagaatgactccaaggtcagtttgcctgaaagcagtagttggtttcctttccactcttgtgctcattccttatttgaagcctcagcccctgctcggcacatccagctttatgcaaaccaactgtgagagtgtaagcacacgttagcaaaccgtcagtaaggaatgcaagacaatccctggttcttgtcttccacatatgtggctagtcagtcggaaacatctcccatttattcatgaaaagaattttcaagagctaaattgtaaagttatataggaggcaatgctagctcttcaacattaaaatgtcgttgtgctccaagttaagggcttgcagtgtcttggcatctggagataatcacttagtcccttgagagttgttttaatgaaatgtttactgagctctagcaaatgttcagctgagtgctttgccaggatttggcttccgataattttgtttcttcatacagagaagcacagctcagtaaaagagagcttccgctacgtaaaccttacatgcagctctggcaagcaagtcccaggagcccctggccgaccaagcacccctaaggaaatgtttatcactgttgagtttgagcttgaaactaaccaaaaggaggtgacaggttggtttgaaaacagtctgcattgccaggcttctcacggcttgctccttatttctttgcctttcactttttattattcttgggggaaaagtaatgcaaacactgaagtatctcctgttttttttcaccccgaaactaaactgaattggtttggaacctgatggttttctctgcttcataaaaacccaaagctaccattctgatccacaaatttctgtttgaatcaaatgctgcccagcctgctaggtgccccctccaggtttctccccattcggtccacagggagctcggggtgttggtagggcctgcagttgatctggccattgtcacacgctgcagcctgatctcctcccgcactgctgtccctcttgtttctgtagcttcttgtgacctgagctgcatcgtaaagcgaaccgagaagcggctccgtaaagccatccgcacgctcagaaaggccgtccacagggagcagtttcacctccagctctcaggcatgaacctcgacgtggctaaaaagcctcccagaacatctgaacgccaggcagagtcctgtggagtgggccagggtcatgcagaaaaccaatgtggtgagtggcctgggacattcttgctaacagaacagccttgggctccataaacactcagggtaaccgaaggcaagtctggcccatcctcccttctcagggctcactttagagaacactccgggcagtgcttctgtttcagtaactgttgcgtttgtgtctgtcgtccctgctaggcccagagctccccggagtgagactgacctcattcatctccctgtcctcagcacctggcatagtatctggcttgtggtgggcactaaaatgttggttgacttgaggaacaggaaagaagtggctgatgttctgattccaaagcctgtgctctggtcccaagcagggtgaatttcagtaattagatttctccaggataaactgatgtccttttcctaagtatcagtagaatcatgaggcccaagcttagctaaggagtaagaatcccatttgtatttctaagtaagcaaagctgaatccaggggcacttgttccagagaattgtcagccttaggcccacagctcaaatttgttgctttgccaaaacttagtgaaaatcaagtgcaaaatcaagtgtaactgtctacaagaggctggtttccagatagtcttgattttcattccagctgattctcttaaaaagaaacaaagtggaaaaaagtaaaaacagcccagctggttgatctgttctcatttaaaattctaagagttccagtttccgtactaaaatagtggggagagttggctgtggctgccctactttccaggatgagttgcagaaactgtcagggccctcctggcctctcagggttacactgcacccctcccccgtctgctatcctgttggggttaggcctcacggacgggccagggagtctttgtggccagttaaaaagtcaagaaaacctaatgtcaagggccccatggactggctcccagtgagggtatcactaatactaccatgggtatgttcctggggagtaaaggcccaaggataaggagcaggagttacttaacaggggcttcatgaccacaacagcctacgaaagacactcggggccaggcatgatggctcacacctataatcccagcactttgggaggccaaggcgggcagatcacgaggtcaggagatcgagaccatcctggccagcatggtgaaaccccgcctctactaaaaaaatacaaaaaattagctgggcgtggtggcgcgtgcctatactcccagctattcgggaggctgaggcaggagaatcccttgaaccagggagttggaggctgcagtgagccgagatcgtgccactgcactccagcctgggcgacagagcaagactccgtctcaaaaaaaaaaaaaaaaaaaaaagaaagaaagacactcagtagagggtttgtgtagctgtggtggtgtgtgaatgtgtccctgagatgcttgtcatgctaaattaggtttgatttgtttctaggggagccaatgtgtcttgtctcaggagctcccaaacactggatgaattctgtagccctcacagcatcaaatcaggtccaggtctgacagcaatgttgaagattttaccatgcagagaaaacggctcaagcagttaccagtgacattccctcttgctgctgagggaggaagtgggtgtaaagaagtgtcaggtgtgttaattagaaaggctttttatccagaaggcagcatgtggcatagacaaggctgtgtgtgtgtgtgtgtgtgtgtgtgtgtgtgtgtgtgtctgtctgtctgtctgtcttctagtcctggtctatttgatggtgttaggacttcataaagaccaggcttgctgatgttttctgagctctggatggtacagtggagacaagcttaggatagttccttttagaaatgattttcggtatttgcagaaaagagctcaaaaaaagaaaaatggagtcacttccatctctcctggggggagagatggaaccattatgtttatctttttaaatattttaaatttagttttcaattatgaaagtagtgcctgtttcaaatggcacagaaatgtatacagtaaagatgaaagttctctccacagctccctaatccaactccccagcagtaatcactgttatagtttgctgtgtgatttttccacaactgtttttatgcacatataaaaaggaaattttatatagtcattcaataaatatttattgagcaccaattgtgtgccaggtaccattctagatatcaggaatccagcaataaagaaacacgcaaacatctcagccctcacagagtttacaattttagaggaagaaggtagacaaccaaccaataaacgaggaaagatactactatcatgtagcagagggcgacagggatatggagagcagggctgcagggaagtggaatggaaagtgccaggccaaggtgaggggtgagggatgaggagcgtactcccccaaagtgcagactgtggtcagggaaggcctcattacaaagtgtcatttgggcagagacgcaaaggacagcaagaagcaagctatggagatatctgggggaagagagtttcaggcaaagagaacaacaaataggaaaaccccaaggtactggaaggaaggccagaaggatgagagctgagagaggcagggagggagagcaagggcagagcagtagcagagggaactcgaaaccagggaggaccctgatcccgaatctgatgagaaaggaagccagtggagggctttgagcataggagtaactgacatgttttcaaaagataactttggctactgtgttgaaagtagactgtaggtttacgtatgaatagatatatctttttaaaaaaataggctgggtgcagtggctcacatctgtaatcccagcactttgggaggccgaggtgggaggatcacttcaggccaggagttcaatactagtttgggcaacatagtgacactctgtctcactatgttggttggtagcacctgtagtcccagctactcgggagtctaaggcgggaggatcatctgagtccaggagttcgaggctgcagtgagctatgattgtgtcactgcactgcagcctgggtggcagaccaagagcctatcttaacaaaataaaaaacaaatatcaatacaatttgaatagtgctatgtgttgtttttaactgtagttagatcaagaacatctctctaacatgatagcggagcaacctcatttcttttacagcttcccaggctgtatttgtttgaagacaccagtattgattagccctacccctactggtgaacatagaagttattgctaatttttatatggcaaatagtgctcaatgaatatcattctttgtacacatggccaatatttctgaaggatagacttgcaaaagtacaatggccgactcaaagaacttgcatatttaaaactttaatagatactgccaaattactttcccaaaagatcatgcctatgcatgtcgcttccaacgttggaagcatcctacatctttgctaacatggattatttatcattgatccttttcatttttgcaaatctggtaagcaaaaaaaaaaaaaaatagtcattttaacttggttttctttattagtaagactaagcatgctgtcttatgcctgtggtcatttggattccttcttctgaaaacatctatattctttgcctatttttgcattgaactgtttgtcctttgtatagcattaaaaaataaattttaaagtcccaatttacaccagagaaaataatcacttctgaccaattgtatattttctttcttatcattattttatatagtaaagtttcattaatttggcatttggggactttggggacagcctgctctccaagtgacctttgtaccatctgtgatcaattttaacaagatggcaaaaaaaaaaaatgattatagggtccaaggaacaaatttcttaagctctgtagtacttcataaagttcttcatgtctaaagaaaattaactatatgacatggatgtctagctattgtactttcataataccagctaaaagataaattatttaagaaatacactggataatatatatgtgtgtgtatgcatgtgtgtgtatatatgtatgtatgtatgtatgtattatatatactgtatttggttgttttgaaaacttgctgagatttttagaagaaacaatccagacaactggcaaactgggaagtattttagtgcctgggttcttgagagactaggaacatttaattccttttgtaacagcttactgctgttcctctgcagcaaccttggatatgttgctaaggagcctcaactttatctctaggtgacatgctgccattggaggatttactcgggaagtgtccaggtcatatgtgtattctagaaagatctctctgactttactggagggagcagaattagaggcagaaagaccaatctgggggcttttgaatgtgttgcctatgagatactgagaacatgcaggtcctagatagagaaacagcaatgggttagagaaatatttaagagggaaaatgagcagcatttggggatgacatggattggggactgagaaggggaaagaggtgggctgagctcagaggattctgatgtggcctgtgatcctggcacttgcttcccatacatccctcatctcaccatgccctgtttcatatgcaggaggcactgagaaaacgccagggggttggttgaatgatgaaatgaatgtgatcactggggaagaaataatcagaagagatttataggagaagcaggaaaaaaataggctcttgagagagcatgagaaaggatgaaaaagatacataaaaggaggctaaagcctgaatattgagtcagagaaactgagaggagtgcaggaaggcaaggcaaggaggtttttgagccagggagtgaagcaatcagaaaaagagtttagaaaggtgcatctgatggtagaatggaaagagtggaggcagggagggacagaaagccaggggaatcttggaaggttactgcggcaatccaaataagagacggtgaggatctaagggacattcatgccatggggacgaagaataggggatagagagaagggacacagctgtaggatgctgccgctgagtgacagggcagtgaggagagaagccagggagagctgtgatttggagccttggtgcctgggaaaatagagatgcttctgtaagaggagtaaagccagaggccagggagagaagtgctccttgggcaacaagatttctaggcagaggtgtccatgggtgtctgggagtctagcgaaacaacttcttctcttcatgtccagcctaacttgcctaatcccgagtctgtccacacaggctcagacctgcctcctgttaaaatggatgggcagcccatgcctctaaggcccccctctatcttgcactcaagctggagcctgttctctctcagcttcttaagaatgttgcccatgctgtccccatcaacccctcccatctcagaattcttctcctctgctagatcatttccaacatcacacaaacccatctcctgtcttaaaaaccaaacaaaccctccattgacttcatgcatctctatagctactgcctcatttctgtgtcccccattctgtgtagaacgaagctctttgaaggagccgtagtcatactgtctttgcctccttacctcccatttctcttcagtctgattttcatgcctaacctctccacagaaacattttccaagattcctaaccacctctgtgatgccgaatccagttgcctttcctcactcctcatgaggcatcctctctgctgatcactccctctcctggaaacactttcttcctgtgggtttcagacacaacacacttctgcttctccatacctcactggctgctcccttttcattttcaatgctggttccggttcctcccctactttctgattatcctagggttgaatccttcgtcccttcctctgtcttcacactctccttggtgaccttacccagtgccatagctttaaataccaccacatgctggcgattctgaaactgccctctccagctcctttgtcccagagatgctgaacatttaagaatgcacacacacacattctctctccctctaagtaaaatatatatgaatgtttacttatttataaactatatacttacactattggctagtacactatgttcatcacaaaagacagaacaagataaagattaaacaaatttaaaaataactggctagcatcttaaggtagaatctttacaattgggcgaagttcattattgatagtggtggttgcaaatccatttgtcctatagtctttttgactattgctagtgctttaggtgaactcttgacagaccagattaaatcgtaactgtttctgtctcatgatgtagtttgacaaagaggtaatacactagtgcctccttataggcagttttgctttctgtggtttcagttacctgggtcaaccatggtccaagaatatcaaatggaaaattccagaaataaacaatttgtaagttttaaattgcccactcttcagagtggtgtgatgaaatctcgtgttgtcctgctccatcctgcctgggatatgaatcctccctttatgctgcgtacccacggtgtataccctccccatcctgcctggaatatgaatcctccctttctcctgcgtacccacactgtgtaccctccccatcctgcctgggatatgaatcctccctttctcctgcgtacccacggtgtataccctccccatcctgcctgggatatgaatcctccctttctcctacgtacccatgctgtgtaccctccccatcctgcctgggatatgaatcctccctttctcctgcgtacccacgctgtgtaccctccccatcctgcctgggatatgaatcctccctttctcctgtgtacccacggtgtataccctcccccatgttagtcacatagtagtcatctcagttatcagattgacagatcacaagaagggtgagtacggtactataagatactttgagagagagaccacattcacataactttttattataatatgttgtgataattgttttattttattattattgttaatctcttgctgtgcctaatttataaatgaaactttatcatgaataagcacgcataggaaaacccctagtgtatatagggtgtggtactctccgaggttccaggcacccactgggggtcttggatgggaaacctccgctccactgtggacacgggtggctgctgtgctaggagcagaagatgcacccacgggccctctcctgtggtgcggacgcgcgtggctgctgtgctaggagcagaagatgcgcccacggacactcctgtggtgcgcatgggctcgcgtcacgtttacgcccttcagtcgggtgttctttccgggaatccatcaaagctgctttctattttgtgatggttagtttagttaaaaacacgatcatataggtcaggacatctcattacccaggcatagctaagctgtaactattctctatgtattgagaggcgagagtcagtcagtgccctgcgcccgagttgtgggtgccagtgcttctcttttcttggcgaccctggctcctcacatgtgtcttgtgcctcacagagatggagactggctgggaggctgctcttacaccatattctaaaccagaggagcttcgtttgtttcttattttaggtgaaaattcgtaggcatgggtgtagaaacgtgctcccacccggtggatcatcttgtcaacccccgaggtgtagtattccgcctcagagaccaacagtagaacccgtgccttcctagtgtccgcacttggatggccaactggcatctcaaactcagtgtttccaaacaaagcttcttatcctctcaagcttcaaatcaaatcaaaccagcatctcagtaaggggcacctcgcctcacccagttgctcaagtggaaagcctgagtcatcttgacctctccctttctgttgcgttcctcatccagtccgtgtgcaaatcctgtcagctctgccttcaggtaatttcctttatctgaccagttttctcctcctccgttattattactgctctgtttcaagccaccgtcatctctagctcagtctgttgtaccaggctctgaattgttctcctcagccttgcctggcctccatctgttctccacacagcagccaggacatctcttaaaaacataaatcaggctgggtacagtggctcactttcggatgccgagacagaggaccacttgagcccaggagaccctatttctacaaaaagttaaaacattagctgggcatggtggtgcaagcctgtagttccagctactcaggagtctaaggtgggaggatcacttgagcccaggaggttgagtctgcagtgagccatgatcactccagcctgggtaacagagcgcaaccctgtctcctaaacgaaaaaagaaaagaaaagaaaagaaaagaaaagaaaaacataaatcagattgtgtcactgccccatttcaaacctccaacatactttgggtaaggtctaatttccttaccatggccttcaagcacccatgtgatctggcccttgcttgctttttaaagttcctctcttattgccctacccccttatgctgtgttcctactacactgcctttcttgctattaggcaatctcattgcaaggctatttcctgtttttttttgttgttgttttgtgtttgtttgtttgtttgttttttagacagggtcttgctctgtcacccaggctggagtgtagtggtgtgattttggctcattgcaacctccgcctcctgggctcaagctattctcccactggcatgcactaccacgctcagctaactttttaaggtgattttggaaagacgaggtctcactatatttcccaagctggtcttgaactctgggctcaagcagtcctcctgcctcagcctcccagtgtgctgggattacaggtgtgagccacagcacccagcctgtttcccacattttattctggtctctgttcagaaaggcctttcttggccacagttctaaaatagcatatatacaaactccatccctaccccctctttgtaatcttcccctgttttccttttcttcatcatactactacttgcattctattacatacttatttgcttgctcattgagatttattgctcatttatttactgccctgagaaccccattagaacagggtcatgtctctcttctctgctgtgtctccagctcctagaacggtactcagcacataatgagtgctcaataagtacttattgaatgaatgagtaaatgaatcttcacagggacaacagatgaaatcccaaggatagtagataacattaagagaaaagagggcaaagggcaaatctttggagaaatatttaaattgagggcaaaaaaggcactctaaaggaagtgaaatttcagctccagttaactaggcatgaaaagaacatagtgtgcatttgggaacccaataaggaagaaggcatcaagctgggctcatttctctgcctcaactacaggaatgtttttaaagagcaaacctgagcacaggtcaaaaacctggacaatgaaaaatcaatctctcagcccaagaaggactgtcccctgttatcatgggggcagtcatttaaagagagctcaaaccaggatcctgaggccaactctgcctggggcatcagcacctctggactgggacaaagcagcagccctggggcaccctgggaatccacgtgggctgcttatggctcttcttcagaagtcaaggcgtgattcttaagaaagcagtcaaatactagagggtgaccccttttattaggttcatcatcttagccacagagagaccatagtgtttgtctatagcctgaaatactcaaaggccacagtgctgaaaagaggcggaggcttcaagcttctttgtcgccattaatcctcatcctgctggtctgtcccttttgcatcagaaaagctttctcgtatcttttttaaagaaggagaaaaaacagctgtgtgggatttgagaatgagattttaatggtcactgaaggcacacaaaagctttgctgtgatagtgaagtgttctgggggcaattgactcctttgtcctgggcagcaaaacaagctggctgctgaaggagaagagagaagccactggaacgtgtgattgaggtctctgcaggccagattctcagcacatttgcaaagagcggttttcaggcatcccttcatgatatttcagagttgccttttagtgtttagctcatttttaccttgtgaaagaatcaaatatatttgggaggtgcttggcatgaattatttctgcaggtctttctctctggaaggaaaatggacactgtgactgacaatatgagtttgtttatgtgaagcaggcctttcattgtgaggaaaaagaactggtgccctcttttccacagggcagcctgaagggtttcttggcacttcgagcagttaagaaatggcacagaggtgggatattgtgaggtctctctaaaggtcaccttgcaaaggctgtggaggttgaaagagttctcagcagcagggacagcagagcagcaggagcccatcctggtccctggctcagtgagaaccaggcctggtgttgtccacctgctgaggacatctgttttctgccagaggaaccatgatggaacagaccatggtgatgtgactctacgttatgattaatggggctgttggaatcattgtcaccatatcggcactttcccttccgtggatgagtattgtaaaaacagctcttcttcagatagaaatggctgagcagaggggctctggacagccttggttttacctgcttcatgacaggtgagctccttagagccatgaaggagttattctctgatatactggcctgctacagacactgaaagagtcaagtgggacacagggtaaaacgtgagttcgtaatacagaattcagcccagctttacatgagagatgggctggaaccagagcgatatggaaaccattatccagtagggctgcatttagagaagaagtctggaattatactctatttgccatcagtctcattataatattgtttgccaataaaacaagagtttggttcacttttaattttttaaaaatataaaattgtagtcggccatggtggctcatgcctataatcccagcagtttgagaggctgaggcaggtggatcacctgaagtcaggagttcgagaccagccaggctggcatggtgaaaccctgtttctattaaaaatacaaaaaattagcccggcatggtggtgcttgcctgtaatcccagctacttgggaagctggggtgggagaatcgcttgaacccaggaggcggaggttgcgatgagctgagatcgcgccattgcactccagcttgggcaacaagagtgaaaactccatctcaaaaaatctatatatataaaattgtatttaaatgatacatgaatgttgtaaaagaaaatccaagaaatatgagtattaagatttagatatttggatagactttattaattggttacattgaattgtagaaataatatttaaaatgtggcatattttttgcttaccatgatccaaaagcctgattttttttttaagattttggaatgaataatgaaaagacatttttatttcttataacagagaacgttcccatgtttaaccctaagaatatatatgcaaattgcatttgtagaataggatgaaaaccgatctcccttgttacagacactggagagctgtaatagttaactttatcatgtaatttttttctatttcttggcagcttacatatagagaatgtttgttccagtcaaactctcctagccccatagagaatccttgataaagtcttcaactgcacttaaatctgcccgtttgttaaataacttttttcccttttaaactcaaagctcttgatcttacagtaccataggagtatttcacaaattagctgtgggactttggccaaattattaacctctctaagtctctgtttctgtaaaagggtgctaataatagtacctagatccttagggctgtgttgaggaataaatgaaatactatatgtagagcttttgacatggtgtctggtataagtactcaacaaatgttagtcattagaaatgcgatgactctgatgatgtttgaatagtagggagccaaatttggtatgtttgcttcatattcatagcctaacataaggtacaaatctacatttaacagtactagaaatagaaccagaagcaacattgatgaatttccttatttaccagcatttacactttgttgtattgattttttttttctttgagacagagcctcactctgtggcccaggctggagtgcagtggcaccatctcggcccattgcaacctccgcgtttgcagagctcaagcaattctcctgccttgcctcccaagtagctgggattacaggtgtgcaccaccacacccagctaatttttctgttttgtttgtttgttttttcagtagagacggggtttctccatgttggccaggctggtctggaactcctgacctcaggtgatccgcccaccttggccttctaaagtgctgggatcataggtgtgagccactgcgcacagcctgttgtattgtttattatgaacctgaagtgtgctattttgtaagggtcttgagatcaccacccatcccagccggccaccagagaatgaacttttcaaaacacagcttctggacatcttcctcttcttttctttcttcttttttagagaaggggtctcattttcactatgttgccaaggctagactcaaattcttaggctcaggtgattccatcttagcctccccagtagctaggactacagacgcacaccaccatgcctgactcctgtcctttcaatgattcctttacctgtgacaataaaatccaaatgcctggcactcaagaacttttgcagtctattcccaatcttttctttcctctcctcctgatttaatgcatgaacttttagaacctgccccctttcccaactgcgaagatcctattcatccttcaaggcctgacacaaatgtgacctcctctaggacacctttcgggatgccaccagacagaattaataacactctgttcttccagcactagacctatgttcaatgaatgattttaacctctataattgtgtcaacagccctgtgaagtagggagatccaggatttttaaaaatctctcttcaaccatcaagtgcttgtgctacaaaaataattcgaacccctgtgatccctattctcaaggagctcatggtctagggagagacagagctgtaaacacctctaacggggcaatgaggatcaagctgtgcagaggtgtgcagagagaaccaaggcagggcacactgcgtattcagggagtttgcatgccgtgggtggtgtggtcagtgccatctatttgccttcatctctagaactcacatcatccttccttggcctttgtgtccacactgaccaggttgtttcccttttggctagtcagttgcagggctgggacctattatgatggagcacgagaacgctgcattttatgtccaaatggaaccttccaaaatgaggaaggacaaatgacttgtgaaccatgcccaagaccaggaaattctggggccctgaagaccccagaagcttggaatatgtctgaatgtggaggtaaggatgctgtctgttccttcctactcctcccatctctgatgtcattgtttagacagaaggcatctcaaggactccagacaatgcacactcacccggggcttcctacaagcagggaccacgttggctcgattcatctttggctcaccagtgcctaggtcagtgcctgacacatgctgggcagatactcatttgagcaaataaatgaagatggggtagaatacactagcagaagagcgtaagtgttgaaactgcgtgctttcttcactggaaatatatacacctgaaacctgagtgatttccctatctataggtactgttttgaaagtgttaaaatgaagagaggaggtctgggtttttctccagctttggtctcaaattcttagcttttttatttaaaacaaatatatccgtttattttgttaaaactgggacctcctctgtgaagagcttttcattatctcttataaaatgttaactttgaagtcaatctcaagctctgtgggctttcctatttattttattattaaatgtcttccttttattaaatgggagaagggctggctgtattgacactctgtgggctccaatggcaggtgtgatctgaatggtgatttatatctgatggccacggcagagtgaagaccccttgtgctgctcccacggctgtccttggagtgactcccagcctcagctttatttcccacctaaataactccaaactgaactgcaaggctgtttctggcttaaaaatcaaatcctcatattgactgtgtgactcctatcatctctttggtctgttataaaactccaaaactaactgcaaggttgatgaggggtgacattttggcatgaatttacccttgtatgtgacattattattatattttcttgagacagagtctcactctgtcaccaaggctggagtgctgtggtgcaatctcggctcactgcaacctccacctcctgggttcaagtgattctcatgcctcagcctccagagaagctgggattacaggtgcgtgccaccatgccctgctaaattttgtattttagcagagatggggtttcgctatgttggccaggctggtctcaaactcctgacctcaggtgatccacctgcctcggcctcccaaagtgttggtattacaggcgtgagccactgcacccggcctatgtgaccttattaagaaaaatttaggccaggcatggtggctcatacctgtaaccctagcactttgggttcaggatcacttgagctcaggtggctaaccctaaccctaagaccagcctgggcaacatagtgagacctcgtttgtagaaaaaaattaaaaaaaacaaaaaatagctgagcgtggtggcacatggtaatctcagctacttaggtggctgaggtgcagggacagcttaagcccaggaggtcaagctgtagtaagctgtgattgtgccactgcactccagcctaggcaacagagaccctgtctcaaaaaaaaaaaaatgacagcaataagaatattagtaataatggttattatagctaccatgtattgaatatttacctatgccaggcattatgctaagtatattatatgaattattcacaattcatataatcattacaactccacgaggctacagtgactcttttaaggtcacacagccaagtggaggatgtggaatcagaacccaggtctgacaggctccaggctcctcccaatggtgtgtgttcttgaaatgccatcatatctataacttatgggggaaaatgagaccactatgattaatagaggagagatgattaagaatataagagatagatagcagattttgatagcatcttgccaatgactaattcctgaggaacatgtgcttttagaaatccttttgtttgtttatgactgtgtttcttgtcccaggtataacatgtgtaagatctaacttagtaaatattattgttaaaacaggggagactctttgggtcactcttttttttttttagagacaaggtctttctggatcacccaggctggagtgccgtggtgcaaatatggctcactgcagcctggaattcctgggctcaagtgatcctcctgcctcagtcccagagtagctgggactacagacatgtgccactatgtctggctaatttttaaatttttttgtagagatttcgccatgttgcctaggctggtcttgagctcctaggctcaagtgattctcctgcctcagcctcccagagtgttgagattacaggcgtgagccatcaagcccagcccggatcactctttatatcaataggctgtaatcagctgggtaaaggggtacttctgggtctaattaccaaattggtcccagggcagagaactctctctcctgcattgcaggggatgcctaggcagtgtgtaggcctaagcctgagaactacccaggccttcccatactttggaagcagttgacacttgacttcttggtttccatctttgcactgtgctgtgtagccctgtgtgtaaacagcaggcactcatgtgccattgactcagggtcagaagcaccacagcattgactgtgtgctctctgactgaggtgggaactgcggtcagcactgggtaacaggttggactgaagttggtctcatttggagagtggggagcaagggtctgcctggaggccttgctcacgtaaggctattggtccttccaggtctgtgtcaacctggtgaatattctgcagatggctttgcaccttgccagctctgtgccctgggcacgttccagcctgaagctggtcgaacttcctgcttcccctgtggaggaggccttgccaccaaacatcagggagctacttcctttcaggactgtgaaaccagaggtgagtacttggcagcttgcctttttctaggactggatttcccttctaagtatcatgggagtctcgtgaggctccagtcaagcccagcctgatgcagtgccccagtggctgggggttcaggtcccagctccactcgccccagcaggatgtgcagggggcactggaactcactggacaagctgtcctccagccaccttagcccctttggacaggctgacaagggatgatcaggcactgatgagccagttggtacacaggttcccctggttccttcctctagccctcctccatctcagtgccctgacctagagcttccccccaataccccttctccagaaccccactccagctgccttttcccagggagcccaactctaaacccaacctcagttctgcaactgcctgccccctatactcacagacgtgctctgcatgaagactggagttgtgatcattgatgcctgactctgcatgaaccataaactctttggagatacacacatatcttgttcctctatatttctctatttcatgagccccatccacactgcctatttagggaattaagtgttgattagccccagattggtaggaaagccctacttcatttgcacataaacatttctttcacaaactttaaaatctttgtgctgcatttgattaaaaataatctttctttttttcattcttttcaccctcccttgacccacagttcaatgttcacctggacatttctacaacaccaccactcaccgatgtattcgttgcccagtgggaacataccagcctgaatttggaaaaaataattgtgtttcttgcccaggaaatactacgactgactttgatggctccacaaacataacccagtgtaaaagtaggtccctctctaaggcttttcatagttctggctaagaagatatgtgtctgggtccacctcagagcagggggcacggggcagaggtcccaggttcactcagaaccatgtagatgttatgagcccagctcacagccatgcagaccagcatggagagagagcagggcctgactgtgcagagcgactcatctttattgatcctggctacttcctcaggcacacttacaagctgtacttgccttaatttcctccctggggcataattttagtccagccttgatcagcatgcattgcttgaggacctgttacgtgcccagcattctgctgggacttggttgatattaggcagaatgagtcggcatcgctgaacctgcaaggagctcaggcagtgaggctgcagaggaaggagcgattgactctgtctcgagagatgaggaaaggcttctggagggtgtgagaaggttttgatggagagggtggggaaagagtaggagaaagagccttatgtttgagagagcagctgggggaagcacagatcgaggcaagcaaaggccttttgggaggagacccctggacctcaggctagaatgtgccgaagggagtctcaggcagaccaggaggcaaagcctcggatggatgctgaggagaccggtttgtgttttataggaagggggaagcaaatcatttaaggacttgctgtctaggctttttttttaaagccactatttataaccaaaattacaacaaaaactctgtagtaaaggccaaaagtaaatcccagctaatctttaagatagcagtcagaggagcaaggaggccccccctaaactggaggagcttgggactgaggggggcagtacatcattagaactttatgattgaaagatcatctggttttctctctattgcaaggaagtccttttaacaacatctttataagtagccttccatctagtctcttcttgaatacctgctgtgacaggaagcttgctacctcatgatatcctagcttgttggtggattggactttagaaagctcacagtgttagaacaagatgaatgttcccttgtattccaccacctggcccttggttggccccatgggagccttatggcacagttcctagggcagcccttcaggactgaaggcaattctccgccccatggctcccccttcctcctcttttcttccaagaagaaaagcctatttattttttttctagtaataataaatcccagttgtaactagagagggaaaaagtaatcccttcaacatcttctcttgcacagatttacctgacagtattaaataatgagctccttgagagcaaagactgtgtctttctcatttctgagctctcagagctttgggtgacacttctgggatgaatgaagatgcagctgggtgctgtgggtgaaggaggggtctgtgcaagcatgtgcacatgtgtgcagcctctgtctttggtgccagacgtaggtatccagcatgccctgtacctactgatagctaattagaattttcttccttccttaaaaataaaatgtgggttgggtgcagtggctcatgcctgtagtcctagcactttgggaggacaaggccgggatagcttgagcctgagttccagaccagcctgggcagcatagaccttgtctccacaaaaaaaaatgaggaaaaaaaattagccaggcctgatggcacttgcatatggtcccagcttcttgggaggcttgagcccaggaggtgaagggcgcagtgagccatgatcgcaccactgcactccagcctgggcaacagagagagacctcatctcaaaataataataatttttttaaaagatgaataaaaaataaaatgtggtcttaaccagagagaaaagtgaaaaatatatgtctgtcttcatcaaagttctctgaaaaagggtcagatagtctctgcagagcaatgagctctgttccccctattttgagagacctagaagttctgtctcatgggttcttctggcacttggacttggtaaacaaaatactgaaagctaaatttatccttttgttcacaattacctgccctgaccgtgaacactttcgggctaatgagaaaacagtgcctcaggaactcagaggggtagactccttgtggggagctaatggtttggctcccacagggggccctctgggaaggacagactcattcccagatggtgtcattttcatgccccattcctgggtggcaacaggggtgctgcggggctcggcaagctagcggtggtcaggacagagatgacagtgtcgtgccataactcggggcatctcctttttcagacagaagatgtggaggggagctgggagatttcactgggtacattgaatccccaaactacccaggcaattacccagccaacaccgagtgtacgtggaccatcaacccaccccccaagcgccgcatcctgatcgtggtccctgagatcttcctgcccatagaggacgactgtggggactatctggtgatgcggaaaacctgtgcgtctcactccctccctccctttctcaggccagctgggaagcctgatgacctgctcctcaggctttcaatgtgaggaggcaggcctagaacgtcacctccatattagagcagaggtgaacatgagtttatagagttggtgagaaacaaaatttaaatgaaagccacacactgaagcgtcttgctgggccccagaggtagtgatcctgcaggtcagtcttcccctctgtgctcactggggcgttttggaccctcttccacaaggacccagagagccagtgaggatcatgcagtgttggccccagacaaggcctcatactgagttgcaactgatggcttggagactgaccgagcctggccaggtggggacctgtcctcctatcctgattcatggtccagtgtccataaaggaagactgctgtcaacacagcttatgggcagtgtaatgaggggctctctgcagccagactgcctggatctctgtcccagttccacctcttactagttctatgatctcgggcacacattctgaatctttctgcacttgtcttctcatctgttaaaatggggctagtaacagttgctaccttataaggttataagggctaaaggagttcatagatgtgaaacacttagaataggccaggcacagtggctcacacctgtaatcccaggctgagggaggaggctgaaccaggattttgtgaccaggctcggtgagaccctgtctctatacatttttttttttttaattagctgggcatgatggtgcatgcctgtggttccggctactcgggaggctgagatgggtgaatcgcttaagcctgggaggtggaggatgcagtgagccgtgatcatgccactgcactccagcctggtagacagagccagaccttgtctcaaaaaacaaacaaacaaacaaacaaacaaacaaacaaagaatgatgatgacacatggagccactatataaacgtttgctcttcttattagtggttaaaatgtctgaagtcaagtataggtttaaatccttgttttaccacatactggctatatgaccctgggcaagtatttaatctctctattaaaaaggtaacggttgcaccaactttctgtggttttcagaagattaaatgagacaaagtccataaattgcctagcatgctgcctgatcttaggcagcaaatggtggtgatgacaattagatgacagcaggtcagttctggaatgggaggccctcacccagctcctacagtgaacggtacagcctgggctgctgctgcttgccaagccccaggtctttcaggtgtagcctcccctgggggtccacaattaccagctgaatctactctgtttccaggacctttgacttatgatggctcagctgggcctgaagagcttttgagcataacttattgtatggtttgagtgtttagaaagatgagcatctactctatgcctgatcagtgatgagtcttgaaccccacccttctccaacttcccttggcagcttcatccaattctgtgacaacatatgaaacctgccagacctacgaacgccccatcgccttcacctccaggtcaaagaagctgtggattcagttcaagtccaatgaagggaacagcgctagagggttccaggtcccatacgtgacatatgatggtaagcacagcctgcagcacatggaaagagcgtctctgctttgaacagagccaacttcggagccagctggcaaactgctgacaagcacacatgctcagaaaggcaggcaagatgaggggaaaagacattgctgactcacaagtgccaaattttaacaggcatttggggacactgacaataggaggaaaagatgttttataaaatatattaaaagtgagcatagcttggtgagtaagaacatgggcactggagtcagactgattagcctggctatgatttctctgtgactgtgtatgccaccatctctaagcctcaagttcttaatgtgcgaatgaggataatcattagacttatttaagagttcagtgagagttcctaaaggacgtgaggcagtgcctggcacatagcaattgttcagtaaatattaacttctgatgattgtggcttttattaggtagaatcctgaggcagggaaggaccttagttctggtcctggctttttcactgactcactgtgggatcttgggcaagtcagatgacttctgttttaattttcttcatgttagatgaagaggtggcccatctgagccctggggctctacctagctctgagacttggttggaaaacattgactaggagcataaaatgaactggatctttgtcctggaggactacacagtcctgtaggagaggagtcatttgtttcttcctgagcttatttgttcacctagccaacaaatatttaatgagcatctactatgtcaggcattggcctaagtgctggaaacaacatggttagtgacagaaacacaaaatatatatattgttatagctgctataacagcccaaagccctatgtgagcatggaagcagcagcagcagttaattttacatgagcttttagaaggaatagagcaaagtcttgagagatgtgggtcttgaaataacatatacattttgagcataaatgggggagaaggacattcagaaagagggaaggacataagtcaaaggatgaagtaccccggtgtacgtgtggactgacgaatggtcttatttggtcagtgggttgggtgtgtggggcttggcagtgagagaggagactagaagggaatggggttcagctgtgaagagccttcagggccaagctctggaggatagacttaatcttagaggaagccactgaaggattttaggatgacaagtgccaaaattgtttgggaagacaatattctatggctttcctaaaaagtaacaaaagcacggatcatcatctttgtcctacagatgcctgaaataatgtcaaacaaacacccaagacaaggagttttagtatctcttggggtggacccaaatgcctcccacatggctctgctgagagagacagagagcctcatctacccaaaagcaaccaactggcaacctctcctatctggaatcaggaagaaagcaaaaagacactgagacttcaaaataaatatggctgttctcaactctgcctttgtgacacatgaaaatgtcttgattttttttaaaatgaaaaagagttgtagctccaactggggaaaattacgcataatgcagtgtatgcccacgagagtgagtcttgcatgtgtcacagtagagaatagttggaaactgctattttccccacagagaagctcccaaggccttcactcagagttttttttttttcaaacatatatttccaaaaagtttgatatcttcttttcaaacccagaaggatagaaatcacatttagaaggtgcacatgaggctgctacagacgggccctctgagcgctggacaacggtgagaactgtagctggggctaacacacattgagcattgctgactgccaggtacatgctgaagtgacttttacatggtgctttcctcacaatcactccataaagtagacttgattatttcctgattttatagatgaggccattcaggcttagagatttaaggaactgacctaaggtcccagcatggcaaggttgcaaagcaaggtttgaaccaggactgtgggactccagagcctggattcttacctgtaactttcctgcgtttctaatgagttggagcaagtaaggaaacacagtagttcttaaaagcagaagaaatattttttttaaacgatagcagtcgggaagcatttggtggagtggcaaacagctgtctagttttctattacaccagaacgcagcacagcaaccgacattcttaatggtaagtcccatcaacaaaaagaggagagatactgccgcagaggaattcaagatgaaaagaaaatgtattctcatattttatattcactaaaataaaagaaagacaccacactaatggagtaccaatgctattgtaaacatatcgaattagtaattgtgactattataccattactttccatttgccatcccttaactgagagaaacttttcaagagttcctctcacacaatttcaatgatgttctcataatgtgtttggctttgtcgcacatgatatgcatacaaagaggcattttttctgtgtctggaatttggaaaagattgtgctttgcatatgcttaatttgaatgatgcctataggaagtaagctagacttcaaagggggaagattggcatttggagaagtacagcatgcactgcatttaatgtgtatatcaggacaaaaaatattaatgagagaacacacacagttttcttcctccccgaccagccaaattctccaccctccagccccattcaaataaaggagagaagagtctttcttggtggataagaagcttgattgttttacataatacaagaatagagaaaaaagcgggaggtggggaggtgagagggaaaggagagcctgatgagctcaacaggaagtgagtatagacagagaagagaagaccaaggactaagccctgggaccctcctttggtaataggtcagagagaagaagaaaagcaaagaagcctcagagaagtaaccggtaaggtaggaggaaaaccaaagagcatggtgtcctggaagctcagtgaagaactggatcaaggaggaggagtgaccagccaggtcaaaagctactgatgcatcaaggaggatgaagaccaagaactggccgttgggatttaacaacatgaaggtcattgctggtctcaccaagcagttttggaggagtgatgggggccaaagctgattggactgggtttaagagagaaagaaaggaaaagaattagagacagtgggtgctgacaatttttttaaggatttttgctgcaaaagggagcaggtaagtgagatggaagctggagggagaaatgaggtcaagggagggatttttaaagtcagagacatacagcatttttgcatgctggtgggagagacgaatagagagaaaaatgtatcatgtaggaaagaaagagcagaattactagaacaatgcttttgatttggggagagaagatggacctggcatgctaagtggagggatgagcctggactggatgcacagaggctcgtctgagggaagaggggacggggaagatgggtgcagatgctggtaggtgaagagaggtggtggtgggagtctgtggaagttttcttctgactgtcttctcagtaagcagaatggtaagtgatagcagccacagaaggggcatttctcagaaccttatcaaaaagtgaaagagtgagtttggaagcaactaaatcataagaatgcaaaacatgttctttattccaacagaggactaccaggaactcattgaagacatagttcgagatggcaggctctatgcatctgagaaccatcaggaaatacttaaggtgagtgcctggctcaggtggacatggcagttatccacagagcttcccgagtactgttggagaaggcttctcctcctgctccttgttgccacctttcagacacggagcctgtcctgggccaaggtcagttttataccttcaccagacttaatttttaaaaaaatcaggttgctgtctttagtgttgtcaagtgaagttgtatttttcaatttggaaacttgtggaggggcagggagaaatttgcttataaatccaaaccaacagcaaataatgtttttctattaattccaaatagttgaggatccttggctctttatgtatacttcaagcctaaaattcaccaaagtttaaatacttataaataattagcaataaacacttgtggtatcactaatcctacaaatactcccaaatcccagtgttgcattcatctggttgggaaaaagaaaacaggattttacatattaaagttttatttataaaagtaattcatacttcttaaaactaattaggaaaaataaaaactggaaagaagataaaaatcagaggaaacaatttttgcaagtgtttttcagctaagcaagctacggcctaatactgggtcattatagttccatgggcaaaatgtcagcatatttaaatattttggcccagtaacaaaaattctgttctttttaggataagaaacttatcaaggctctgtttgatgtcctggcccatccccagaactatttcaagtacacagcccaggagtcccgagagatgtttccaagatcgttcatccgattgctacgttccaaagtgtccaggtttttgagaccttacaaatgactcagcccacgtgccactcaatacaaatgttctgctatagggttggtgggacagagctgtcttccttctgcatgtcagcacagtcgggtattgctgcctcccgtatcagtgactcattagagttcaatttttatagataatacagatattttggtaaattgaacttggtttttctttcccagcatcgtggatgtagactgagaatggctttgagtggcatcagcttctcactgctgtgggcggatgtcttggatagatcacgggctggctgagctggactttggtcagcctaggtgagactcacctgtccttctggggtcttactcctcctcaaggagtctgtagtggaaaggaggccacagaataagctgcttattctgaaacttcagcttcctctagcccggccctctctaagggagccctctgcactcgtgtgcaggctctgaccaggcagaacaggcaagaggggagggaaggagacccctgcaggctccctccacccaccttgagacctgggaggactcagtttctccacagccttctccagcctgtgtgatacaagtttgatcccaggaacttgagttctaagcagtgctcgtgaaaaaaaaaagcagaaagaattagaaataaataaaaactaagcacttctggagacataataatgtacatttattgccagccttcctcgttgcaagcttccaccctgcagcaaatgcactatgctgactctcgcaccttcagctgtgccctctgacactctgctggccattgcctgagggactggggagttcaggtgaaatgtaatttcctcagtggatgagaatcatcaattgtcatgaaaaggcgatttcaccaaccctgagtcggtattgccaagggttctactccccaagtgggcttcccatcacaagggatctgaggtccaggtgggtgtggtgaggcccagcctgtcatgtatgccttccttccccagtctcaaatgtgagagacggactctgctccgtggacatgagcagccccttgaagggtggtctcattctctaacagtaacagcactgccagaaacaccccctgaatgccacacgatcatctcactttgggtcaggccagcagggcctcacgatcatttcttgaacttgaattttcagtgttattgaatctttaaacatttaaatccccaagcaaaaatctcattacagtgaataaaaaggaatccaatcaaacaagccaccacttccctaatggatggactacctacaactatagtgttttgttatttcaataacaattctatgcacagccaattctccataccaaagtactaaaaaaatgtttaacaagcatttttgaagaaaacaaagagaacttcattatggttaaacttgcttttcatctcagtgttgctttttttaacctgttaataacattgattcttaaaaagtcctaatcaaacttctttatttggatgggccctaaatattcattttcagatttctcttcaaaagtttgaacatcatcattaaaaaaaaaatagcattaaaacaagcacttggactttgttatactggagcttggcctatatttctgagtctaaccataagatgaaaattcgaatgtcacataaacccgagttagtgaccgcactgatgtgaaggtgagatgagctgagctgcaccattctgtccaggcatgttagcaactttgtgctcatgactgtgtgatcctgtcttgctgatttcacaagaaggctagggatgggaatactctgggggttggaaggaggctgcataaacccggtcactatggaggagcatcctccacggggcagccccatgcaccagagctgtgttgctggtacacgcacaaaccactgacgcacaggaggtataaagaggagcttcctctctattccctcaactaccttaagagatgctgtgatcctgttgggggctggctatctggagatactatttctacctgctacatcaatatttatcaaacttctgcctggtactctaggccctggggatgcggcgataagacagacaaggtccctgccctcatgaagcttacattttagagggaagagacagacaaagaacagataaatcaacatgaaaagtagcagctagtggtaagagctatgttgaaaattaaaataggttactgtaacagatgattgtgtggctactttaggattggggattatagatggcctctatgcggaaattacatttcaattgaaaactaaatggcaagaagaaaccagtcttgggaaaattagggggaagagctttccagagagaggaaaaccaagtgcaaaggctgtcaggcaggagcaaccatttgtgtatattgtagtctagtgagaaggcaggtcgtacaagatgaggctagagaaccagacacggccagatcacatcgggctttggaatctataatgaggggtttgagttatttctaaatatgttgcaaacttttgaatggatttaagcagaggagtgagataatctgatttatgttttaaaagggtagctgtggctactgtgtgaataggaagccagcacggaggcagagagagttattcacagactactgcaacagaacaagcagccatccagttggcagatgaaggtattgtctggattagggtgttgtagtggagatgagagaagtagaaggattctggatgtgttttgggggacagtcaacagaatttgctgatggggattgtatggaagtgctgagggaaagaaggaagtcaaagatgactcctagttgcctaagaaactggtagatggaggagactaggaggagcaggttcgggatatgcagcagttttaaaacatgtttgcaaattctttgaggttccttccatggacagttggggtctgtgtcacctccccttgactctgggctctgtgactgcttgaccaatattaacatggcagaagtaatgctttacgaggcccagggcttaagacactagcagcttccacttcctctccttaggacactcacacttgaaactcagtcaccacgtcatgaggaagcaagccataacagcctgtggagaggccatgtggagaggaaccacagtccctccacccaccggccaggctgagcttccaggcgacagccagcaaaacttgccagctgcgtgagtaagccatcttggaaagggattctccagctgctccagctgacacttcatggagcagtcctcattgaaccacagaaaaattagagatttgtgtgcaaaattaatgattattatcttaaatgattgataggttttgaggtgacttcttatgcagtaatataacagtgaaaaggggagatggttaagagttccattttggccattctaggttctaggtgcctatcatatgtccaactggagggttcaaataggcaaatggttatacaaagccccaggagaggtcagggctggaatataagttttaatgtcacagagtaaaggcatgagactttaccccggttaaggtcacctgggaaacatgtaaataaaagaagaccggggaactcttaattctgggatttcctgtgtgggcacaggaaccaggactttgaggagctgcgtattaagtaaacaggaagaggtcagagctgagcttccatcttccctccaagagagctagttctgtgggtgaaccctgaatgggcatggatctgtacagtccttccttctagctgtagatattgttctttagccatttactgaagtgctgcatctatggatttaacaacatctcccttgaatttccaatgctaataaaaaagtgtttgccttttcacactaacagacaattatcttcactttggaaaattgcttcctctgaatcatgccctgagctgttaagtgtgtcgtctgtaggcactcactggatttaggtttgcaggtgatattaaaatgtcatgtggcaacctggaaaaggcagtggctgcacagcacagtgcaaggacttgcttaccctccggcagatctttgcaggaagatgcaccggagctgttgcctgcagctgaccaccacagctggtgggcctatgtgctggaaaacccaggggtcattccaggcccagctgtaatcttcttagccctgaagagatgcctcttactgtcagcatctctgcttcttttcacacagcaggatacgtcttggagccttacccaagtctgcgctacttctagccagcatttgggaggcaaatggactagctgaggctggagtaaagcagttcctcaccaagttgagggaatcttgttgcatacggccctctagctaggcaagccatcagctgcctacaatttaaggtcctgggagtggccagtaggggcccatccacagaaacttagaggccttggtgaggcttcatttctgtgaccatcttccattccaggggcttgtgagcccagctcagaggtgtcctaatatttgtagtgccctgcctccttctcccttcaggcagtctcgatcagcctgcaggagaccacccttagggacctgttaacacagcaaggctgctcctgtgatccatgtcagtgatatagccatgaagatatcactactcagcagggagcactttccagagaacacagtggcatcaaaatagatttagaaaatgaaaccactctaatataggcagtttgccttagttgaataaaagcgatacaaattaaacctacctactgcaagcaatgacagtaactcagtagtgcttggttttcagagtatctcataaaggggatgcaactacagaccttagttactaataatttcttattatgtttttggtcattcattcatttatgcaacatatatttatggagagcctattaagtgctagacattgtaggagccagggatactgcagggagcaaaagaagctccctgctcttgtggaatttaggttccagtctggggagacagacaataaacaaatgaacatatactgtaaagtcaagtagtgatgagtggtataaataaggaagggctaaaggacagagaatgaggaggtggtgggagggagctgctgtcttaggatgagctcatcattagagtcatgaatccaggcccctcctagagcactggctcctcaaaccaagcctggcagcactggccctggcaagctcctttatccgcccagcaagaccttggcatttcatgtcaagccaagctgaccaaagcttcaagctgtgaacaagccatttggcagttcctcgaacaggtgccacctagtggttgcaatatggagtcgacctgtgtttctgtctcccgtcccactgcctcagaccttacatgcccataattcaagacaagatcttacccaaggggccctggggactagggctgtgatttgacaactgattggtcgcatgttgtttgacacagccctcggagtttattttgtttagatattttccttttttctctgcttggcagagaaaaactagtgaccaagtccaaactcattgatctaggtcatttcaaactatcaacaacgctctgaatctcacatacaaacaccgcatattcatgcattcactgttacggtctaggcaccagggtaggctggatatatagtcctgagtcagaagggaaaaggagttgaaggaatgatgaggacaaaatctactcctcaattataatcttgcatgttttaccactttgtagttccaggagctccctaccacactcccctgccttggattgttctctgatcctacacagtatcctaggactgaaggataattttgggccacaggttgaagttttctgtcttttccctacaaaacgcaaaaagtagaaatacaagcctacctcaaatttgagcttcggtgctggctttgccttattacatgtgtggcagttgaaaaaaattaacagctgctaagcaggaattggaaccaatgccccagagaagacagagcccagtaatgtctgaagcagcatgcacagcagaacagcatggaggtacagagtgtgagcttgtggtgaaccctggccaagcctgctaagtgcggccctctgcagccttgtgggtaacctatcctgtgtgaccacaaattggtcatcagcacacactgtcaatgcagcggtgtgtgtgtgatgcctgatcatgctataaaactgtggacagtgtagcacattggaaccccaatgttacttccaggtgacttggcttgaagaagtcagcttttagcagccacatcaggtacctaaactggagttttaagtaatgcaggtgccaagtataagaggcttgatagggccaggcacggtggctcatgcctgtagtcccagcactttgggatgtcaaggcgggtggatcatttgaggtcaggagttcaagaccaggctggccaacatggtgaaaccctgtatctactagaaatacaaaaattagccgggcggtagtggcgcatgcctgtaatcccagctactcgagaggctgaggcaggagaattgcttgagcctgggaagcagaggttgcggtgagccgagatcgtgccactgcactccagccttggcaacagagtgagatgctgtctcaaaaacaaaaaacaaaacaatttaaaaaaagaggcttgataaaccatcactaaggctccccatgaggaactgggatgactcaaacagcgtcactcacccagtaccccccgggcccagtattcctaatgtacttctctgaaaacgcattatctacatttatcacactgataggtgccttctctaagatttatgattcataatgctcatattctccaagactcccattatgtcctttacggtacctggatttgtatcccagttctgccacttattagctatgtgaccttgtggaagttatttaacttctctgtgcctcagtttcttcatgtggtaaataaagataatgatagtacctacaagatagagctgttttgagaattaaataagttaatacctggaaaactcttgaaacattgcctggcatgtagtaagggcccaataaacgttaactgtcatcctcatcgttacatttcacttcttgagactttagaagttaaacccaagaaacattctttaaaggggttcactctctgctgggtttccccatttcactgagatggaaagttctttagtcacagtttttctagtggggtatgtcctagcaacagaaaaattaaagcttgaagtaggaatgaaaggctatgatgcctgatttgggttctcacacaaggccttccaaacacccgtgtcctcctgagctgggaaggtaaaatgagctcttccaatcgcctgagcttctcttaggtcagggacggcacagacacaagtgcacatacacagcgcagcctctcaatccttcattttttctgagttccaatcctcagcccctggtatgtgaggatcacagtacatctccttgctgagcccagaagcacatgttttccagaactgcctatttctattcgatgtttccagcatggcaacatccaacttcagagtccaagaaggcagtactcaggtctctaggcaggcaaggtcaatgaagacactcactgtggcaaggtgtgaataatttgcatgaaacctgtggtcattgaaacaaagcccctttttgagacatgaggacacaggcctggccaaggtgggtctgaccactgtgcagcatgtgccagggagagtacagaactcaaagtgcaatgtgctaacggagtgtagacagactgaaaagagtgaatttcatttttttaaacatcatgaatgagataggaaaaaagccagtaattatacagcagagaaatcaggcaataccttgaccagatgatcaaaattagcatgtccaataaaggacagatggatatcatgtgcctacagatgtgatagcctgagaagaacgtaccatcacctatactgtactcaagccaaaaatgcatcacctcaatctcaatacaaggaaaatgcagacaaacacaaaatgaagaatgctctattttaaaaaggggagggaagttgaaaaacaacttgcacatcagtgaaattttaaagcttgtgtgcttcaaaagacactattaagaagtgaaaaggtagcccatggaatggtagaaaatgtttgtaaatcatatatctgacaagagactaatagctacaatatgtaaagagttcttacaagtcaataataatgagacaaatcactcaattaaaaatggacagaggaggctgggcatgttggctcacacctgtaatcccagcactttgggaggccgaggcaggtggatcatgagatcaggagaccgagaccatcctggctaatacagtgaaaccctgtctctactaaaaatacaaaaaattagccaggcgtggtggtgggcacctgtggtcccagctactcgggaggttgaggcaggagaatgccgtgaacccagggggcggagcttgcagtgagccgaggtcacgccactgcactccagcctaggcgacagagcgagactctgtctcaaaaaaaaaaaaaaaaaaaaaaaagatggacagaggattttaatagacatgtttccaaagaagacaaacaaatgaccaataagcacctgaaaagatgcttaacatcattagtcatcagggaaacacaaatcagaaccataatgagataccatctcaacctcactagcatggctataataaaaaagacagatggtaaaaagtgttgaagaggatgtgaagaaattggaaccctcatacactgctggtggagatgcagaatggtgcagctgctttggagagtagtctgttaattcctcaaaggtcacacgggctaccatgtgacccagcaattctactccaggagatgaataaaaggcacaaaaagatttccacatgagatttcttagcaacattagtcgtaataccttaaaagtggaaacagcttacatatctatcaactaatgtacagctagacaaaatgtggtagatccatacaatggaatattatttggccatagttaaatactgatagatgctacagtatggatgaattttgaaaacactgtgctacgtgaaagaagccagtcacaaaagaccatgcattatatgattccagttacatgaaatgtccagaataggcaaattcatagagacaggaagtggattacaagttagttgtctagggctggagaaattggtaggcaatggggaatgattaatgggtaccaagtttctcttgggacgatgaaatgttctagaagtcattgtggtgatggttgcacagctctctgaatttatttaaaacttgaattgtacacattaagtacaattgtatgaattgggtgaattttatggtatgtgaattatatcacacacagaaaccagtaactaaaaagggttaactggtttttgtgttaaccagttaaccctttttaatgacactgacagttttgaattttaacattttgaatgtcaaaaatgtctgtgtcatggaggacaaagaaagctgtggaaatgttccagattaaaggaggctaaagagacatgacaaccaaatacaatacctgctcctagcctggatcctgtactggaggaatgtgttataaatggtcaactgacaaaattggaacatgaatagtagcttagataaaagtattgtatcaatgtaaatttatcaagcttctatctgtattgtggttacataagagaaaaatctctatttttaggaaatatacaatgaagtattagtggtacaggatcataatgtatgagtaatctatcctaaaatcgttcagaaaaaagtgtgtgtgtgtgcatgtgtgtgtgtgtgtgttttgcagggaagcaaatgaaattgaacatttttatgagtcaaaggaagccatcaagaaagtgaaaaggcaactcataaaatgggagaaaaattttgcaagtcatgtgtgacaagagacttgtagctagaatatataaagaactctccatttgtttgtgtcctctcttatttccttgagcagtggcttgtagttctccttgaagaggtccttgaagaggaagaatcaatattgtgaaaatggccatactgcccaaagtaatttatagattcaatgctctccccatcaagcgactattgactttcttcacagaattggaaaaactactttaaatttcatacagaaccaaaaaagagcccacatagccaagacaatcctaagcaaaaagaacgaagctggaggcatcacactacctgacttcaaactatactacaaggctgcagtaacaaaaacagcatggtactgataccaaaacagatatatagaccaatggaacagaacagaggcctcagaaataacaccacacatccacaaccatctgatctttgacaaacctgacaaaaacaagcaatggggaaaggattccctatttaataaacggtgttgggaaaactggctagccataagtggaagtctgaaactggatcccttccttacaccttatacaaaaattaactcaagatggattaaagacttaaacataagacctaaaaccataaaaaccctagaagaaaacctaggcaataccattcaagacacaggcatgggcaaagacttcatgattaaaacaccaaaagcaatggcaacacaagcccaaattgacaattgacatctaattaaactaaagagcttctgcacagcaaaagaaactatcattacagtgaacaggcaacctatagaatgggagaaaatttttgcaatctatccatctgacaaaaggttaatattcagaatctacaaagaacttaaacaaatttacaagaaaaaaacaaccccatcaaaaagtgcgcgaagaatatgaacagacacttctcaaaagaagacatttacgcagccaataaacatatgaaaaaagctcatcatcactggtcattggagaaatgcaaatcaaaaccacaatgagctaccatttcatgccagttagaatggcaatcattaaaaagtcaggaaacaacagatgctggagaggatgtggagaaataggaatgcttttacactgttggtgggagtgtaaattagttcaaccattatggaagacagtgtagcaattcctcaaggaacaagaactagaaataccatttgacccagcaatcccattactgggtgtatacccaaaggattataaatcattctgctataaagacacatacacacgtatgtttattgtggcactgtttacaatagcaaagacttggaaccaacccaaatgcccacaatgatagactggataaagaaaatggggcacatatacactatggaatactatgcagccataaaaaaggatgagttcatgtccttttcagggacatggatgaagctggaaaccatcattctcagcaaactaacacaagaacagaaaaccaaacactgcatgttgtcactcataagtgggagttgaacaatgagaacacatagacactggagtgggggcatcacacactggggcctgttgcagggtagggggctgagggagggatagcattgggagaaatacctaatgtagatgatgggttgatgggtgcagcaaaccaccatggcaagtgtatacctatgtaacaaacctgcatgttctgtacatgtaccccagaacttaaagtattaaaaaaaaagaactctcacaattcaataataagaagacaaagaactcagttaaaaatcggcaaaggatctgaatagacatgtttccaaagaagataaacaaatggccaataagcacctgaaaaacacatggagtaaaatgttagtaacaggtaatctgtgaaaaggatatacaggtgttttttctactattcttatgtttgcaactttttgtaagtttcaaattttttttacaaattaaaagtttttaaataatcctgaatgacttttctctttgggcagtgtagatctgtgcgaaaactggtcagacggaacactatgagtgtgagcgcgtgcacatgtttgcacacctgggagtctacacatgttccacagagcacttcacctctctgctgtcactggcccccagcccctgtggcttgcccagcatgcacaccatcacatctgagcaacatgcttagttaactggggggaaggaggtagagccctcagtgctcctgaggtagacagaagttacccatcagtgtgagccacgctgcaggcattgtcccctttggctggggctgacataaagagataaggagcaggtgggttaggcctatgctttgctgtattctgagagacttgccatcttcagagttcttgtttctatactgcagagtttcccactaggctcagaagggccactctttttctgggttctctacctatgttggagaggggaaggaaagaggaacaggacatatttattgagagcccactttgtgcctttatatattatttcactcaaatgagacagaaccctgcaagatggataaactgaggctcagagagcttcagtaacttggccaaggtcccatagcaagcaaggggtggaaccagattcaaagctaagcctagactcctcacttccccacttccaccagacacacgtccttcagatactggtgtttgttttctttccattatttctcctcttttgctgtctgagttgaggtcaaagcctgttctcatcccgggaaatgaaaccaaatcactggtgactgtaatggatccaaaagacccaggcaactttggaaaacaccagcagggctgccatcagccctgtttcttgaggtcatggtgatgttggcaatcactctgaaggaagaggacagaaatatctcttatctttgctttaactgccaaagcagacacagtttttagagctgggtgccaagtcaggggtaccatgtagccagagatcctggcacacatctggatagctgttcgaagaatcttcctgccaaagggggttggggtagtggtgaggacatctgaggaggaaagggatcctacagctataaggatggggtggtgcatgatgagggtcctaggagtggccattctgacttcagggtatggccaagggcaatatgcatgggtagggagggaatggggaggaaaatttcttggcagtctcccctttatcctctgctcttctcctctactttttaggcctccaaggctcagcactcatcctgtttctcattcttaaaggcctctctgttagctgaagacccaaaagagggttgctaggagaataggttgtaagcctagagtcacaaatagccatcagacaggaagggtctgcctacaggggcatcagctcagaggaaagcagagctgaaacacagtgataatgtcatttgagtctttggatccagccatgcctgaagccctgcacttttaaattaaggggaccaaaaatttgcattttcacataagaaattttcaactgggtatctgtcacttataagaagaataacgtgaatagcattctaacactgaaacagtactggattttctagtatgattttcaagtacaggtcttctataacagccaagggaggatgcagagaactttaggatagagccattgcacatggaaagtccagaatctggagacactgaggagaggaagagagctggccagcccctgcctcagcaggcctctgctctagggatagggtaagatactcaagtctggcttcgtgtctgaagctctgtagggaagcctggagaaaggataggccagccccaattcgagggttctgcaacctacagtttttcctgaagttgttccaggtaatgatggttgctaccttctgctgagcctatgctacatgaccaatgtattacactgtctatcgttttatttctcacagcagccctgagaagtagagatattggcacaattttctagatgaagaactgaaagctcacaatggtgcagtaactaactagtcacatagctagtaagcagcagagcagggattcaaatctagtgtattagactccaaaacctgtgtttttaacaaccatattgtatgttacttcctccaagatgggtcaatgaggcaggggacgttgattggctatatggagaattaataataatcttttctgttggtacagccctagagagtttacaaagcacaattgtatatgcagtctcactacatccattttacagatatggaaactgaggctcagaggtaggaagtgatttactcaaagtcatttgggcaaacaggataaaccacccagagataactctccttaaattaagcaggcagtctgtagtctgcgaatactcataatgtgtggggggaggaaggagctggcctcaccacactgaaccttgagggcagtgatggtatcagtctgtccaaggaaggtctcagacaggtgaggggaccaacaggtattgcagccacagacccaactgcagaacacaaatcccactacaccaaagggctctgaattcacaaaaagattcccagttccagccgggcaccatttatttttcagcaacacttgacatgggcaaattccagttcaactagagagattcagcttcctggtgttcccagggggatctagctctgaaaagagcccctttcttctgtcaggacatcctcagcaaaaaaggctgcaggtctgagctgagcagcctggagagtggggattccaactccccccgagagtgtctacctgcctggcttcctccctgaggaaagtcactgtcccagcccaagccctaggggccctcactgttggacctgccctgatgctttgccaaactcagaggcacctctcctagacggacaaggcaaagctgactttcactgttccctgggtgatctgcacctggaggagtgatcaggcagggatccaggtgatgggacagaaggggccagggcagccactgttgttcactgctggaagtgtgccaggggactggaaggtgaacagcaatcccacctgtctcctagagactctgtcctccgtgtgtaggggaaagtaggggatgggcacacagggaggaatccagccctggggcttccttgaagccaagtgagcagccttctgtatttgttttcccacaaacagtctttgaaactggggcaagtgttgaaggcagaacagagtaaaagaagcagcttcatgaggccaaacccagtctctccaggtctaggtagtccagcacaggttctgggagtaaatgccagctttaccacttgatttctttggtacgaccttaactttttgccatcctttcactagtatttattgagaaccctctgcatattagggcatcaatgctaagcaaaaaatgggttcagtcaccttcctggaggttccaatcagtggaggagacaaatattaatccaacaaccagtacccccctacccctacccccacagaaagtgtcaaatgcccaagagatagatagtatataattagagagacttcactctctctggaaggtcagagaaggctttcctaaagaaatgataatggagctgaggtctggaagaagcataggagtttcctgaagagggtaggagggggcactgcacacagagggaacaggacagtcaaaagcaggccatttggcaacaggtgactggaaggaactggaagaaggcccatgaggctgaagtacagagtgaatatgcagggtctaggcagaccatgcaagaatgtgggtttctcctaagagcaataggaagccttttgaggtgctcttagcagggaagtgagatgatcacacttatcgtttgagaagattactctggcagcacagtgaacaacgtattggaatggaaccaaggagcattcaggaggccagacagaaggtatcaggtatttgcctgtaaaatgggggtgatgagaatactatcttacaagctgttgccaggatccaatgagatactgcattttaagtgtctagtctagtacctggcacatagtaaaggctcagtaagcgtcgatattgttacttttatcattggttctttgcagagtgcacatatttcttatccaggtctgctcctgcgtgatggggtggagggagtagttgtggtttccagagtgaaaacgtgatttgtgtcaaatcacaatgtcgagaccagaatccaggatgcctgaaggcccgattagaatggcttaaaagtatggattattcaggaagaaaaacgggttccaatcgctcctactaaggacgctggagggatggtgaacgatcctttagatggtaagccctagcacttattgagaaaaacaggtgcttctttggtcggagagcaggtgtagggctcgcagccgcgtgcgctcccgcggaggcgggggaccctcgccactcccccgccccacgcccacccgcgggcttccgactgcacctgctcccccggctcggaaacgcgggccgggtgccgggctgcaggcagagggtgcccgggggaggaggtcccgaaagcctcctccacacgcctgcaccggctgccccctccccagtcacgtggcccggtgggtggggaccgacctgaagttggagaaatccggagcgctcccaacctcggagggagtcgccagtcctccgggcccggacggtggaccctggagccccggctggcggcgtggaggtgcgtttctgagaagccgagcagcggcgcgggcggcgggactcgaggcatggcccggctgtcggtgatccccgggtcggccacggcgtggacaggtgagcaggtacccgcggccagcggcagagatggccggggctgccagggcatcgggccccagagcccacgccagtccaggggatgcggggcccccacgcaggagggggcggttgggtgaaaaggccgcggtggattctcggactgccgggtcagtccccaccagcgccgccgcctcctcgccggctttgccaccgggtgagcaggagacgcgggacgcgggacgcgggacgcgagggagccgcgcggggcgtggactctgtgccggccccgccccccgcgcgcgcactggctgctccccgcgacgtcacgctcggctataaaaggcgcggctcggggcccttgcggcgctggaggagctcgaggctgaggctgccggggggctgtgggctaccgggccgccggcgcctcagcgatgttttactcagggctcctcactgagggcggccgcaaggagaccgacatgcgggaggcggcgtcactgcgacagcagcgccggatgaagcaggcggtgcagttcatccacaaggactccgccgacctgctgcccctggacggcctcaagaagctgggctcgtccaaggacatggtgagcccccgccgccgttctcgccccggccccggcggcttcgcgcccgccgttttccgaggcccggccgttgcggctttcactgagtcacggcccggcccgccgctgcccttggctcgcggtcgctgcgtcgcggattcctccccttccagtacccctgctgcggtttcggtggggattccgtcgtagcttttctagcttgcgctcccctcggctgtgcctcctccctggatgtctcttctccagtagaaagaagaggtcctgccctgccctcttgccctcgggtcttctttctttttccttattcttaataccgaattttgttcacggggcttgtgcctcctatgctgtgtggctgttcctatgacccagacagaggtgattcctaatggctttccgtgagggggaaagaagtggaaagagggttttttgacagttgccggatccagaggacttttgttgaatccattgtccccctatgcaaaacccacttctctagttttggtcctaactttgaccttccatcctgagtggggagagagaaaaggggccaaatgtgaaggtttcctgaacccccaacatctcttcatcattctcctcttccagccccgcccccaaggagtgggtagagggaggaagccaggctgctgcatgtcaccgaccagctaatgtgtgcatttggagctggggtgggtgcagtctttttttctagcacagttgttcctggcattaagtagaagcacctcaggacagggggcctggggtcaaagatggtactgtcctctttctatagaatgggatggatggctaagggttaccaatataaagaactgtatttgtcatccctcagccactgtagtggtcctgggccaagtttatgtttaactttgtagttttatctggagttttcttgtagtttgattgttttcttgaatttcacaatcgctttattcatttgggtggtaatatgtgaaacactaattaaatgtcttttaacaaatgaaataggtgctctgcataatttttctagtattttttattttaagcttttgaaatatttaattttggatgtggttgtcggccctagttcactgaaattgccatttctggccccaggagggcagagcttctgcatccatttcctttttttttttttttttttttaatttaacagctctaatgatacacaggtacattatattatacacagtataatataatatacaaaaattatacacagtataatttttctcctccctgccattagttacttctgtgcagagtttgtctacttcagttatcttgctctgttttttttacaagttgtgtttttttgttttgttttgctttttgcacaacccacaggatagtttatctgatttatgctaacccagagtgataagtgattgaaatgtgctcctgcaaaagagataactctcttttcccttctttcactttaaagcaatctcgattcatttaacaaatcaggttcgagaagtattctttccttcaggccaaataatcctatcctagttcctagaatgctcagcaatcaataaagaaggaagtattatattaagagaagaattaaaatacagagtttttaaatgctggatttggttgtccctcgttgtcgaggagtttcctagccctgagagctacctgaacttccttctgcctaggatttcttatactacttcatgctgtgtaagaattccatccgcttttctgactctagtctgtctcagttgagtcacaaagggctgatagcatacagcacaggcagcaggctgcaaagaggaaggagcctcaagaagcaggatattgccttgagtatgacacatacacatgacagttgactgtaaggctctgaatcatggttcacgctttctgtgccccaccgtcatggagttgatttccctctctcactgttttcacacctataatgtacaagtgattgcacagaacagccaggttacagaaaccaaggcagaccgaggtagggctaggagagccgcaagcgctggggtgaggcagcatgcttaaactctcttggaactgttattgcagccttagtacaatcttagaagtgaccttagaagtacattattattcttttactttataaatacatgtgggatagaccagtgttgactcaattttctctcactgcaagggaaatttggaggatgttaaaattaattgaatagttcttacttggagtagtttatagtataatctcgatagaaggagtccaagaaaagggagaggatagcatcagagggagataaggaagagagaggagaaattagttgttattgacttttgggtttgtgaagattgtaggttgtttttcctcataccagcaacctatatttgaatataccgctgggatttctgaattatctacctcttactatgctgtttctgtaatgttcactgcttgataccagcctgccagctcttttaggactggcagaaggcaaccataggaaatcaaagggggtcatgttctcttggccccaggaaagtgcctttgcctattcctgtgtatctggagttggctgatacaaagtcttctgtggaaattatatttttgtctgccccttttgcttttatccttttatcttgtattgttcattctgtattagattaagaactaaaaccagagatatgagtgagtaatattatatttgattttttttttaagagacgggttctcactctattgcccaggctggaatgcagctgcagtcacatcttactgcagcctcgacctcgcaggctcaagagatcctcccacctcaacctcctgagtagctaggattacaggtgcacaccacaacaccaatctaacttttgtattttttgtagagatgggattttgccatattgcccaggctggtcttgaactcctggtctcaagcgatctgcccactttagcctcccaaagtgctgggattacaaacatgagctaccacacccagccctgattttttttttttaactcagtgaagctggagaaaaacatctccgttcttggaaatttgcctattgtaatttatcttgttttagctaccaggttcataaaagtttttctcattgtgctaaggactttttaatttttaaaaacagtcatgttatgtggtaatatgctgtctttcctaaatgatattatacttacctgtaggcattaggccatattcttacttgtctggcaatagagtttttctttcctacatatgattgcttctgatcatagctaaatgctttttcaaaactgactagaattaggaatgatgctgggggaaagatggttgaacacagtaaagcaaacttaccataaaatacctgaacagaatctctgtctattagagcaggtctgtgtggtgtgccctatagattagctatccatatcaccacaaatcatgggctggagaatttcagaggcttagaaaagaagcgtgaaataccagtataacaccaagatctggcacaaactgaagatttgcagagtcgtgattgcatcctcgtaatagcaaacattatttgaatacttgctgtgttcaggacacagtctaggggctaagacacaaataggaagacagaaaagtttctcattataaacaggtttataggttgggggcagggaaggacagatcagttaatttaatatacaaatatttattgagtacctactacacatgtcatgcaataatttaagctttggagatataatagtgaaccaaaactgagttcctgccttgacggaactttcattcttgtgggaggaaggaggcagaaagtaaaattaagtaaatgtatataaggtaataataataaatattttctatggagaaaataaatcagggtaaggggaatagggaaggcagtgactggggtggggtggagtctggctattttgtacagggttgtccggcaaggcctatctgataagattacatttgaggagatactgaagggaattaaggagcaaagtttctcagggaagagtgttctaggcagaaggaacagcaagtgcaaaggactgaggtgtcactgtgcttgatataactgaagaactgtaagaggaccagtgtagctagatcaaaatgagcaagggggagggtgatagaagataacatcagagatgtagtaggaggccattgtgcaggcatttgggtggttttttaaaattattattttttttattttccactcttttcagcgcatacctatgcatttgggttttaacctgagattggaaacgagtggaatattttgagcagaggggtgatatgatacatacaacttattttacaaaaagactactcaggctactatgtgggttacactgtaaaggggcaagagtagatgaagcaggaagactgattaggaagctattatacagtaattgaagtgagaggtgatggtacctcagagcagtgtgataagctgtgaaggagaggaggaaggatcaggttctggatatatgttgaaggcagagctgacaaatgtaattgatgcattggattaagagtgaaagagtaatcaaggaagaccatgaggtttttaacttagccattggaagaacagaattatcacttgctgaagtggataagacttgcagcggggagcaggttgaggatggcaaataagaatgaagagtttgcgggctgggcgcactggctcatgcctgtaatcccagcagtttgggaggccgaggcgggcaggtcacgaggttaggagatcaagaccatcctggcaaacacggtgaaaccccatctctactaaaaaatacaaaaaattagccaggcctggtggcgggcacctgtagtcccagctactcgggaaactcgggaggctgaggcaggagaatggtgtgaacccaggaggcggagcttgcagtgagccgagatcgtgccaatgcactccagcctggacgacagagcgagactctgtctcaaaaaaaaaaaaaaaaaaaaaaaaaaatgaagagtttgatttttgaacaagtttagggtcccaattagttacttaaatgtagatgctgaatagacaattctagaagaagataagtaacaccaccagaaagcctgtgctagttgccaagatgtaatagtcagatgtgccagaggagtccagcggaagaagtgatttctctaacctgatgtgatgataaggatggagactggcatctatttacacctttaccattccctttgagccagctgactgtgagatggtatggagagaaggctgcctctagagtgtgctttgtagaacctcagagtaggaagaattttacaggttatctggtctaattccttgcccatttgtgaatcctttctaacaaaatgcagcctccgtgagcagctgagaaaccattatctcagactaatccacaaaacagataataatgaggaataggttgtttgttgggtcatgagcaaaggcaaagaaatagaacacagaaggcctggggcagtgtaacagcctgccttatgtttttgagcaactgcaaactgaagaacaatctgtgtttccatggggtagaatgggtcacgtgttatatactcagctagtaagcaaagagaaggcacaaatattggtgaccttttggatttccaaggtcagagatagagacatgtatactgggcttgactcaggagtccatgtttatctatagactgtatatgaggactaaaatggagtagaatgatttcaggcccttttggggtaaaagaaaaagtgaatggtatccatgacccttgttctaactaagctctagttgtggctctgttgctagctagtgaccttggatttctctcttgggaataaatgctacaaagaaagcagacccctaccatttcctctgttttctagtttggttcattctgtggaccacagaaatccattagtttctgtctgggtagcttgggtaaagggattgagagagtggctttaaagttcttgctcaaattatgattctatggtatcctgcactatagtctgattcctctcacctctcttttcttcaaactctatagtttggttagaagagatgtttaagcagtgtgggtgccagattgaggaactgtagctattttcacccagaatacagcacttcccatagtgttcatttcctttagaagctcttgatggcgatggaggcagaatatttgaacttgcctggttagagtttagatgcctctagcagccacatttcaggaagagtagagaagcagggactgcttaggttagtagctgccttgttgaagtttagcataaagcagaatccacgtcagaaagacgacttaaaaattatgtctaaatggccaccagggtatctgcagcatccatctagcaaattagtactgtgtatccttttttctttcttttttttttttttttttttttgagacggagtctcgctctctcaccaggctggagtgcagtggtgcgatccgcctcccgggttcaagcgattctgcctcagcctccccagtagctgggattacagacacccaccaccacacctggctaatttttgtatttttagtagagacagggtttcaccacattggccaggatggtcttgatctcctgacttcgtgatccacctgcctcggcctcccaaagtgttgggattacaggcatgagccactgtgcctggcctccttttttctttttttgagacagagtctcactctgtcacccaggctaaagtgcagtgtcgtgatcatagctcactgcagccttgaactcctggcttcaagtgatcctcccacctcagctcccaaatagctgggactacaggcgtgtgccatcatgcccagctaatttttaaatttttaaaatttttaattaaaaaaaattgtttttgtagagacacaatttcactgtgttgctaggttggtctcaaagtcctggcctcaagcattcctgcctcagcctcccaaagtgctgggattataggcaagagccagtgcacctggtcagtactgtgtatcttgaaagacaggacagcccttggaaagccaatatgtcaataaacaaatgagaaccacttaaccatatttataaaacagtcatagactggggatacaaatagtagaaactctttaatatacaagtattgaagggattctgaaagaaagaattcaatgatattaatcaagaaaggctttttggctgggtgtgatggcccacacctgtaatcccagcactttgggaggccaaggcaagtggatcacctgaggtcaggagtttgagaccagcccggccaacatggtgaaacctcatctccactaaaaaggcaaaaattagctgggtatgctgctacgcacctgtagtccagctactggagaggctgaggtgagagaattgcttgaacccaggaggtggagatttcagcaagccaagattgcgccactgcactccagcctgggagacagagtgagactccatctcaaaaaaaaaaaaaaaaaaaaaaggaaaaaaaggctttttgaagaaagaaggggtagagatttctttcagtactatgtcaagagctgaggatatagctgaaatcaagacagtcatggtccctgcccttgtgcagttaacatgctggtagggcaggggtgaaatataaacaagtaaatacacaaaataatttcatattgataattactatgaaagaaatagtgagatttgttagtaactaaaaaggtgacctacctactttaagttgtatggtcaaggacggtatctctgaggaaatgacatttgaacagagacctggaagataagagggacctaactattagaaatgttaggggaagaacatttcaggcagaggggacagccagtgcaaagggattggaatgggaaagaaattttgagcaaggaagtgagtgtggatggtgttgaatctgaatgaataaagggagagtggtttgtatatggaaggagaggcaagggccagttggtacagagctgtatagagaagggtaaaaagtttggattttttctgaagaacaatgggaagccattgaagggttttgagtaaagtactgtattacctgacttatgttttaaaaagcttactctggtttccatgcaaagaatggactggagaagggtaaaagaagaggcagaatgcaagttaggaggctgtgacagtacagataagaaattatagtggtttggattagattggaggtagtaaagatggggagaagcagatcaattccaggtgtgtttcagagtacaatatcacttttgatgggaggtcaggaaatgaaaaaatcaagaatggatgtatggtggtgccacttaccaaggttgttggaaaggaattaacccaatatgttaaaactgaacaagtctttggagctcaaacctcctttatgactgatcaagagagtaaggtttggagaaaagtaatgctcatagaggttagtgatttgcccaagctaatatgtgacaagtggtaatttgctgaaagcagaaagccttcatggagtagtaattaaaaagatgagattgggaaggaggatgaatggtagtggaaggtcttgaatgctaaattgaggatttttctttgttacaactagcaagagaaccactgtgggggaagaggaccatgaaagtaatgttaggagattgggcttagcagtaacgtaaatgaagaagaaaataagaggaggcagaatttcacccaccgagatagggaataagggagaatgcgcaagtttgatagaaaatatcagtgggataatttacatttgaagtgcctgtggaatatctaagtagagaagttgaaaaaggcagttggatctatgggtctagaattgaggtgacatctggacatgagatagagtcatcatcataaaggtagtaatttatgcaatgaaaacagataaaattgccctgggagtatatgtagagtgacaaaggaccaaagatagagcgatgaggaacactaacatttaagaaatgaacataggcaaaggaaccagtgagagagacaggaacagaataaacaggtggttttagaggccagtggaggagcgtttcaggataaatgaaatgttgagtttattgcagcattgtttctaatggcaaacatatgaaaataatctaaatgcccattagtaaatagttaaggtatgcttataccacaaacttgtctgtcaaggatgtgctgttttaaaatgcagaaagtagggcagacataagaaaatagatgctaagctggttataagataacctggcattatacctgcctaagttacattgtgtgtgtgcacatgctttagtttttgcatctggcagacactgttagttggctaaattatcacccatccttagcccttttctttatgctgaactcctctatagagattataaaagctaaattctctcccaatgtctgttagagctaggagtggccatatgagttctgaccaagaagatatgggcaaaaaactgctgaaggaacttctgggaaagcttttccttttctgataaaagcaattgatggtgttagtgtagtccctcctccttcctcatttcttgaatgtggatataatgcctggagctggggtattcatctgtgaccatgaaggaatgtccaagagaattaacagagtcaatagccctgaagttgttaagctgctgagttagtatcagcagcttctatgtctagacttcttgttatgtgagaaaaataaatctccatttaaactacggtaagttggcttttcttgtggctgaactcttttctgctacatggggtatatttttatttaaaatttttaaaaatgtaaataatttaaaacttttaaaaatttaaagctgttgcttgtgttagggatctccatatctccaagtaaatggtgatactgctatttcttaattaactgtcttcatcactatctatctagtcttactttttttttttttttttttgaggcagggtctcgctttgttgcccaggctggagtgcagtggtgtgatcttggctcactaccacctccaccttctaggctcaaattagtctcctacctcagcctcccaggtagctggggctacaggcgtgcactaccatgcctggctaatttttgtattttttgtagaggcagaatttcaccatgttgcccagtctggtcttgaactcctgggctcaagcaatccgcccgccttggcctcccaaagtgctgggattacaggtgtaagccaccgcacccagccctgattttctattataatggataaaaacttaattctcttacaccttcccatcatattcactcttctattatactaacattctgttaaataactattttgggtcaaataagcatttattgcttacattattatgactatgttcttgttatttacagctgagtcaaatgtactatttcttttctcataaaaacatttttctcaaaattaataatttccttggtgtttaaaaaaagtttccatgtaaaatttaattctccttcaagtaacttaaaactatagatggtctagcaagtccattgttttcttggaggatccttcctagagccccctatcttttcatttcattttggactggctgcttttaaggcctgtaggcaacctgtatcctggacttttccttcaacaccattcttagaactgcctttgcctctctattggattctttcattcttagatctcatgtttttctccttgttgtttgtttcccttgctttggtgaagcatgcatatctttcagtagcttcttgagaagacacaggaaataactttcttgagtcttgattgatagtttgactaggtttacaaattatgtactatcaaattttttttttttttgagacggagtctcgctgtgtcacccaggctggagtgcagtggcacaatctcagctcaatgccacctccacggtgagttccagtgattctcctgcctcagcctcctgagtagctgggataacaggcacccaccaccacgcccggctaatttttgtatttttagtagagatgggatttcaccatgttggcttggccaggctggtctcgaactcctgatctcgtgatccgcccacctcagcctcccaaagtgctgggattacagacgtgagccactgcgcccggccccagatttttgaaggcattattctattgtcttttagctttgactgttactgttgaatagtcctctactattctgattcctaatcctttgtattttgatcatctttttctctttggaatcttgtggaatctttgtcatcaatgctattccaaaatttcacagtgatgtgaaatcttgatgtggatcttttttccttcattatggtaggctccatgtgggccctttcaatctttaaactcatgtccttcagttctggcttagtatgataacccacactacccttcagctgttctcgaaatctgaaagcctagccaagctatcaactaatcagtctttttatttactcttacaagaagagtaaacttttggcattctcctcagttctccagatcaagtgagtctcatgaagactttagtctatttccaaccctaattgcatccttcaactgtagaggttctgatacctgtaactcctcagccttttaattttagtttgagtagtacaactgcttttacagctagatgcaaatatataacagctcaaacaaaatagtttattttttcttaagtaacagtattagtggaaaagtcagcaagacagcctcttccatatagtcctttagagactcaaactaacagtagctcttctgtcttcaacatgtggcctctgagaaggtaaccatagtggtcatctccactccagccagtcagaagaggaaaagaatatagagaagtatgcacaggagatttttatgggccaggcatagaaatggtgcatgtcacttccactcacattctattctgtagaactcagtcatatggctatgcctaactacaaagagggctaggaaacagtctaggtatcttctcatgaggaagaggagaattttaaagaggattttaaagagcaactggcagcctctgctgcttcagctctctgtgaagtgaaatggtataaagcacttagctttctctagtccaggtcattaattgctgcttttctgcctgctattcagattccagaattttgtcaacatcttttttttcttctttattgttctttttgttttgtgggtttaggacttattcttttactgtcattttagtgaaattttggctgaaagcagaggtaaatatgcagctatattgttacttaagatatagtatatgtaggcataataaaatgaccagagaaaaacatctctgaggttcatatgggtttgttggctgtaaattttctattcctgaactatattatgagtactttttaattatcaaagagaatgaaaagaattatgtatattgacatagaaaatgcctttttgttttgagacggagtcttgctctgttgcctgggctggagtgcagtggcgcgatctcggctcaatgcaagctctgcctcccgggttcatgccattctcctgcctcagcctcccaagtagctgggactacaggcgcccaccaccacacctggctaattttttgtatttttagtagagacggggtttcactgtgttagccagaatggtctccatctcctgacctcgtgatccacccgccttggcctcccaaagtgctgggattacaggtgtgagccaccgcacctggacagaaaatgcttttatatattaaatgaaaatagaaaatttcagaacagttttatagtatgattagtcttttatatgtttataaatgtattaatattttttgaaagatatatttctaaatttaatggtcattatttgttgggagtgggactgagaagggcttgagagattggggaggtttttgcttttaattttatttatttatgtatttgttcatttatttattgttttgagataaagtcttgctctgttgcccaggctggagtgcagtggtgcgatctaggctcactgcaacctcggcctcctgggttcaagcaattctcctgtctcaccctctctagtagctgggattaaaggtgcatgccaccatgcctggccaatttttgtattttttcttttagtagagacagggttttgccatgttggacaggctggtctcgaactcctgagctcaagagatccgcctgcctcggccttccaaagtgttgggattacaggtgtgagccaccgtgcctggcctttgctttttattttatatatttcagtgatacttaagtattttacattgagcatgtgtttgaaccttttttggttactaaagaacaagtaaaggaatagtcagcagggccaaatgcactagaaaagtctggtaaaattaaggctgaaaatgtctattgtatttggaaatcagaggtaattattggtatgggataagaagtgatctcagtgaagaaaatatgggatatcagaaaatagatgtcatggtttagtctttttttaaaaagaccattccagataaggagggtgattaaaggaggctgtagagtaaaggcagcaggatctgacattttgtggaggagtttgctccccaatatctaggaacttttagtatgttttataacttttggaagaagaatccagtagaaagaggaaaatacagaaaagggatgaattcaagcataatgatttcagaacttccctcgtttgtctcatctgtccactaatgattaggttcctttgcaagattaagaactagataaagtgtttagcaagaccaatgtaggaagacatccccaaactttaggtaagagggctttgtttaggtggtctttgaaactccttccaatcttcacttctacaagtccagttttatctgagttggtcctggtaagcatggatgtaacagaaacaaacaccctgctttagtatggcttgagctaggaatccattcttattggtgagagagattcgaatgaaacattttcatttcttttgagaagcaaagcattatcccagtgttgcatcacaaaatctgacagagttagcacttcctctagctcctagtcaagctaagaagctctcattttctttacaagtgcctctccctccacttttcccaaagataccagtttagaatgtgctttgccaagaatcagtgtattttgggaatccatttcttcatctcactagggttacaatgagtcatggctgtgactgcattcttccttaggaatctgaaaggtggcagatacactgaagacctccagtgccagcccctccccttgaaaggttctaggctctgggcttctaagagtgacttccttccccatagaatgaaagtgtcatctggtatatgttagatagaaacttggggtgaaacactctcctttgagggattttaggttaaacactctcctttgagggattttaaatggtattgtagccgggacataagatatttgtgtatacagatttctccagtcaaaggatttcttttcaagagatatcttaaactttctggaggccactttgaatagaaacagtggagcatggttatatctgccctaggaactctcctaagctctatcaaagtgtagacttaaactcacacttctcattctgcttcttaacattaggcatcctggcatgcatataaggtctaattaagtcccctgcttcttggtcagtgtctttccccttcatacctccactttttgggccattgaagggaagggaaatggatgacaagatagggcaggagaaaccagtgttttgaggaccaggggatgccaacatcgatgattcttgtgtgttctctcaggtttcaaagtgtgtctgctgagaggcttgctcagcaagtgtgaattcctgtcttttcaccctatccacccatgggtgactcagtccacaggacagccagccactaaggcttctgcaggctgcatctgaaagataagagagtgagacttgacacagaagtaggcagagcttctgaatacctgtgttagctaagtttcttcagcctatgaaaatgagctgccctttctataaggcagtgatttgctgtcacctaggaagatacagagattacttactctagactaagaccacttttcccttgaaatgctcttgtaaggggaagaaaggtagcaggcctaggttagtccaaatcacaagggttctcagttctcttaagccctagaatatttatcggccctctccacatttcccagtgtcatatcttgcattttcattcattcagggtggcctactgcaaattggtgtatggtacctgctctgacaataccagtgaagtcctcacttgaaggaagtataaataagaagcaaagatagagctcagttatgggaggctccttcattatttttatggcacctgggggacaatgggaaagagggatgtggcctgtcactaagaagtctctgctttctatccctcaagcaacctcataatattctgcagaggcgcctcatggaaaccaacctgtctaagctccgaagcggtccccgtgtcccttgggcctctaagacgaacaaactcaatcaggctaagtctgaggggctaaagaagtctgaggaggatgacatgattttggtttcttgccaggtaatgttctgagaacagcttttccagggttttctggaaagtaggatgtggggccctctcctcctgactttatagagtgtgggtctcatggaattcataagtgagttttaaaaggggcactccatgcaacactggaagtgtatgcaacattttgtaagcatgtgcatctttatgggaagaaggaacaaagctttcatcagatttacaaatgggtatgtgatttttttaaaaaagattaagagctatttggtgtatagcatgaaacacctagagtttttgggggatcttctgtcagctctggattcagcaggaacaagagccagtcaaaggcagacttagcagtgggtaaagatgggacactataacccataattgggaggatgctctccaaccctgcctttcatatgacatctgctgcttgctgtctgcatctcctttccctttcgcttctctggctcttattgaacagtacatttcctccccacagtgtgctggaaaggatgtgaaagccttggttgacacaggctgcctatataatctcatctctttggcctgtgtggacagattggggtaagtaggcacttgtgctgagtggaacttagatgtgactgtactcttcgcttgactctattttatggttagagatggtgagggtctctacagcagctcaaagagaagtatgcagagttcagatctcagctggaaccagaatccttagtagaggggaggagtagtgggttatccggcaagtgggagaaatcagtgagcagggaaacctttggctttctgttaactccccctattaagttttgagcaaagacctctaaacttgaatgagagagcctgagacctctggctcattgtgtgccctgccctgatccactagatagcaaattaaaaggagctgtcctgttggtatactccatccagatgagtaaaagtagggatgtggtggggcttagcttactcagagtctttctggaggatgcattgcaggtccccaagaaacatccatcagaactgagaataggactgcagctgctactgggcctgggccatcataagggtaattagccagtagtttcttttgtttgttttgtgtggcggagcctcactgtgttgcccaggctggagtgcagtggtgcaatctcagctcactgcaacctccgcctcctgggctcaagtgatcctcctgcctcagcctcccgagtaactgggactacgtgtgcgccactatgcctagctaattttttgtattttttgtagagagggggttttgccatgttgcccaggatggttttcaactcctgggctcaagcaatctgcccgcttcagcctcccaaagtgctagcattacaggcgtgagccactgcacccagccctgagcttttgtgtggtaaaaatatgaagtatagtgcaacatgatggttccagaaagactaacaatgtcctggtgcataattaggcagcagactgccatgattccagaggaattaataaccatctgtaaaactgcaattatttttcttttggatgggctataacaccaaaagagaggaaatagaggaaagcagaagtattggcacagaaagttcataattaagtatttatccaccaacccataatagctcgggtgctagctattccaatcagcttatgtaacatgtgaaaccttggtactgtttctttccttcctcccctgcacagacaagttaaattaacaaggattttctccatgatattccttgctgatatgaatatcagtgcacttaccaaataagtacttgcctccattaacattatagtctaagacagactgatgaagacagagtgaaatagaaaggacaatgagaaaattacacattgaacaaagcaccttataaaattaggattaatctgacttctctagtatctgttactcacagatgggtaaaaggatgtgtcaactcaattgcctcacacaatagtggggatagtaggatacagaataggattctctgaatatatcagttcccctctcttcaccaatacacataagtgatgtaaggtttttgagaacgggagatgagtctttagtgtttttatatctccctggcatgtttaggacaaagtgctggaacaacatatgtaggatggctagcacttttcggtagattaatcccaggagatccctggagaattccaattgtaggtcagaaggtaggcattgcaggattctaccaggaatctctgtcaaggggattttggtatcttcctctttggtacagactcaaggagcatgtcaaatcccacaagcatgaaggagaaaagctttctctaccccggcatctcaaagtagtgggccagattgagcacctagtgatcacactgggctccctccgcctggactgcccagcagctgtggttggtaagcagaattgagggctggacctatggaccctaacggaaaccctctccctacccccaacaaaacctcatgtcatctcatgcctgtaaatattgactttttcaaaatggttcccatttttttgtactgtagaccttgtcccaatttttgctctccaaagtaatagatgggccctgagctacattcaagacatgttgagaatcaatcagtaaaacaaatgtggaggtcagataaaaaaaaaattcggccgggtgcggtggctcatgcctgtaatcccagcactttgggaggccgaggcgggcggatcacaaggtcaggagatcgagaccatcctagctaacacggtgaaaccccatctctactaaaaatacaaaaaattagccaggcgtggtggtgggcgcctgtagtcccagctactcgggaggctaaggcaggagaatggcgtgaacctgggaggcggagcttgcagtgagctgagatcgtgccactgcactccagcctgggcgacagaacaagactccgtctcaaaaaaaaaaaaaaaaaaaaaattcaaggagcaagaggccgggcgcagtggctcacgcctgtaatcccagcactttggggggccaaggcgggcagatcacctgaggttgggagttcgagaccagcctgaccaacatggagaaaccccgtctgtactaaaaatacaaaattagccgggactggtggcgcatacctttaatcccagctacttgggaggctgaggtaggagaatcgcttggacccgagaggcagagcttgcagtgagcagagatcgcgccattgcactccagcctgggcaacaagagcgaaactccgtctcaaaagaaagaaaaaaaaaaggagcaagaaaacacatttttatgtataggtgaaaatgtcccttgagagctttccatgaactagttagagacagagagcaacttacttactcctttgccataaatcccttgataatttcccaccagtttccacacttctctacattttactcttgactactccaagttcttggtttttgtgtaaaggcctttgtcctttagagtaaaaaagacctgggtttgaatcttggctctattgccttgtaagtttaatgatctaggaaaattacttaatataacacatgctcggccaggcgcggtggctcatgcctgtaatcccaacactttgggaggctgaggcgggtggatctcctgaggtcaggagttcgagagaagcctggccaacatggcaaaaccctgtctctactaaaaatacacaaattagccaagcgtggtggtgggtgctggtaatcccagctactccagaggctgaggcaggagaattgcttgaacctgagaggcagaggttgcagtgagccgagattgcgccactgcactccagcctgggcaacaagagcgaaactccatctcaaaaaataaaaaaaaaataaaaaaaaaataacacatgctcaatatatgtttattggatgttattggatggatggatggaacctaatagtgattaggccaacttctaagcaagcatggaaatggctaaatcttaatcatttttttgtttttattagatgacaatgagaaaaacttgtcccttggtctacagactctccgatctctgaaggtaagattgactccacttaccccttgatacttcctctctgaggcaggtatcctcttacacaggaactcatagtggtatcactgacaagttacctgttttcagtgcatcataaacttggataagcaccggctgatcatggggaagacagacaaggaagaaatcccttttgtggagacagtctctttgaatgaagacaagtgagtgcccaaatgggtcagatcaagtcacatccatttgtcatcagctgcgagcagggtggtggtggttctcagacaggacatggggttgtatcctgtctttggctttcaattatactacaaatccacccttccccacacccagagttcatcaccccacaaaactctgtagtgcacacatcagaatgagcaatggtgatgccacacagagtggtagggaaatgactagctttgaaagcaaaattttacttgccttcagcttaactttttttgaatttggcattatttctcctgatatttatttctcatttcagcacttcagaagcataactacagcctgcagcatgtctgcacgtgtgcatgcatacacaccgggttgacagattgagaaaactgggtttgaaccaaatgccgtagtgacttgctgtggaccaagtccttccatctaatagaagctccaggggctccttcccattcagacctctctagactatagtctatgcttagagatcttgtctggttatggccattgttttttactactttgatcacttaacttatagaccttttttgacactgccagtctcacttgtggcctatttctctgcttcttccaggaatttgcttttattagtcaagtataggggctgccaggttctgtgtctccatagatatatgtgcttcttttcctatagctaaatgtataataaacaggaacctgacctttacctcctttcagctgtttcaaacaggtgccaggatacctatgtcttagaattagagtttcttcaaattgattcattgatttctcaagtatggattatgtgaaagagcccagggacattatccattacagtttaactctttcatttaaaggtccagagaggcaagtgaattgtctaagttcatatattaggtcagtgactgaagggaccaagaacgcagacctgatttccaagccaagactcccatgctgcctcatttgtattcaagcctttaacaggagggcaaagaggtgagaatgtgttaaaaaaaaaaaaaaaaggcagagcatgggaggaatattctctggagatggatgctaggatgatttgggtagctctccctcctgtgtgccaagcccagtaaaagttccttgccccaaactgtcacatttaggccctcatcttggtgcctaaaaacgagcgtacaaagatgaatgaaatggtttctcactgtgaacctcttggaggaaaggaggaaccacagacagaggaatattaatccctctctgatatggaattgaaggcttaagtaaatcagagtgtcactgtcagacgttgattactcccaagatccgatcagcatttctgcccatcctgttatgtgtctgtcaaggactgaagtagctggaaaccaggagtagagaaagatgggggaaaaaaaagagcaaggccagaatagaagggagtagactgagtagaatcaattggtggagaggcctatctagataaacctttctgggaggcagggaatgacattttcaggcagggaattgagatgttcagttctgtcctgatacaaggaaagaggcagagcaggagccggcaatgttaaggacaactttttataactgcccagtatttcctgacccctgtcaaaggttggggagaatacaaggtttcttgaagctttttgactggggtgtcacattaggcacacaggtgtctataatggaatctccccttcagtttggtcatagaagtgcttggacaagtcagaaaaatagctagctgtgggtatccctttaagatattcccaagtctaccctgtgtcatagcagtagttctcagagtgtttgtttaaaggatcccactttgaactttgccaagtactaccaactaccttgtctggtgttcagcaactgcccctactgaacagccctttggaactctgaatgatttgggcctcacagaagctccctaaagcctaggaacttggtgactatcatttgaacaactaggcagccatactgcagtcagttgtcatggggtcattccctaggcccccttcctatcagcctctacctaaagaagctagataggaagctaagcacagccatggttgggaggctacatctaaagctcatgaggggtgatcccggggttaccagccttcagcactccctctagcaacaccccattctcttacctagcggggatttgtacctttccactgaggcctctccatgctccttccctacctttcatggcaatactttggcctgcctcttatcctggtactaagttgaagtaaagctcaccctttacttccctacttgaaagttctactctgagccttgactcttagccacagtgaggcatgttgaaggttcctgctggtttattctttttttttttttttttttagacagagtctcactctgttgcccaggctggagtgcagtggcacgatctcggttcactgcaagctccgcctcccgggttcatgccattctcctgcctcagcctcccaagtagctgggactacaggcacctgccaccacgcctggctaattttttgtatttttagtagagacgggtttcaccgtgttagccaggatggtctcgatctcctgaccttgtggtccgcccacctcagcctcccaaagtgctgggattacaggcgtgagccaccgcacccggccttcattcactttctttaaatgcctccaagttgattattctcctagctcatatctccttgatgtgcatgagggagcactgggtctaatttttgggggctgagaaggtaagaaggtgaggtcagtttttcccaggagtcctaaaaaattctggtaccttacattgagggtgtgggagaaagggtgtcatagttctgaaaataggcagtagcatgaagcaccagacctgtctcattccttattagatgtctatctcaaatgacagagtttgaaaaatattggttttatcatttgatatttccatgcctgactcgggaaaataacattttctgacttttttctattttcttgccctgcacagaccctacctggtacaattttctatttcttagctcaaagtgtctatacaatgggttgcctggtatgtcagctgccctcactcttgtgtaatagaaatatattgccaggctggggacgtggaggagacgaactggattcctccctcctcctgttgccaggcctctctgcattggcactttatcctttcagtgtttctggctgtgttgggttcatttgtgagactgatgtaataataaagtgaaatcttcccctctgtgtgcttgtctgacaaagtctttgtgtcagggccccagtctggaaggtgggggagactaggtaaagtctaattgcatcagcatttttctcttagggtctcctgttcctccattgctactggcccttcaggtgtctcttactgactgtatgtcgagcacattagcaaacctcactgagcttggttttgtaatctataaaacagaagtaataaaagtgcttacctcacagtgtcaaataagaaaatccatatagagtggttggcatatggtagtcactcagaacttcatatacgggaacaatcttttatggtggacctgtcagcagtccgagagaacacttctagaaaaggaaatatagctggacgcggtggctcacacctgtaatcccagcactctggaaggctgaggctggaggattacttgagcccacgagttcaagaccagcctggaccacatagcaagacccccttctctacaatttttttttttaattagccgggagtggtggcatgcacctgtagtcccagctacttgagagactgaggcaggaggatcacttgaagcctggaggtctaggctgcagtgagccatgattgagccactgtactccagcctgggcgacagggcaagaccctgtctcaaacaaacaaaaaaaaaaaaaaaaaaaaaaaaggaaatatttagttcaaacaaataggagaggtttgggaagggaaagagttgaatgaaccttaatatatagttaaagtcattgtccaaatggcatctcaaataaatgtattttcaagatgatggaaacttaccttttaagtattgatgttttttttttttttaaacaactaattcaactctgtttatttttgacgaaaccgatttctttcattcagttcatactacgcgtccacactgtgcctccaaaaatatttgcccttataactgaatgctcagaaaggctaagaaatctgcccaaggtcccctggcaatccagccagagatgtgagtcactcttttttatttatttatttatttatttatttatttatttatttattttttttattgatcattcttgggtgtttctcgcagagggggatttggcagggtcataggacaatagtggagggaaggtcagtagataaacaagtgaacaaaggtctctggttttcctaggcagaggaccctgcggccttccgcagtgtttgtgtccctgggtacttaagattagggagtggtgatgactcttaacgagcatgctgccttcaagcatctgtttaacaaagcacatcttgcaccgcccttaatccatttaaccctgagtggacacagcacatgtttcagagagcacagggttggggataaggtcacagatcaacaggatcccaaggcagaagaatttttcttagtacagaacaaaatgaaaagtctcccatgtctacttctatccacacagacccggcaaccatccgatttctcaattttttccccactcttcccgcctttctattccacaaaaccgccattgtcatcatggcccatccccagtgagcccctgggcacacctcccagacggggtcgtggccgggcagaggggctcctcatttcccagtaggggcggccgggcagaagcgcccctcacctcccggatggggcggctggccgggcggggggctgatcccccccccccaccctcccggacggggcggctggccaggcagaggggtcctcacttcccagtaggggcggccgggcagaggcgtccctcacctcccggacggggcggccggccgggcggggggctgacccccccacctccctcccggacagggcggctggccgaccccccccccccccctgcctccctcccggacggggcggctggccgggcagaggggctcctcacttcccagtaggggcggccgggcagaggcgcccctcacctcccggacggggcggctggccaggcggggggctgatccccccacctccctcccggacggggcggctggccgggcggggggctgacccctcccacctccctcccggacggggcggctggccgggcggagggctgacccccccacctccctcctggatggggcggctggtcgggctgggggctgacccccccacctccctcccggacggggcggctggccgggcagaggggctcctcacttcccagtaggggcggccgggcagaggagcccctcacctcccggacggggcggctggccgggcggggggctgacccccccccccacctccctcccggtcggggtggctgccgggcggagacgctcctcacttcccagacggggtggctgccggacggaggggctcctcacttctcagacggggcggttgccaggcagagggtttcctcacttctcagacggggcggccgggcagagacgctcctcacctcccagacagggttgcggcccagcagaggcgctcctcacatcccagacagggcggcggggcagaggtgctccccacatctcagacgatgggcggccgggcagagacgctcctcacttcctagatgggatggcggcggggaagaggcgctcctcgcttcctagatgggatggcggccgggcagagacgctcctcactttccagactgggcagccaggcagagaggctcctcatatcccagacgatggggggccaggcagagacgctcctcacttcccagacggggtggcggctgggcagaggctgcaatctcggcactttgcggggccaaggcaggcggctgggaggtggaggttgtagcgagccaagatcacgccactgcactccagcctgggcaccattgagcactgagtgaacgagactccgtctgcaatcccggcacctcgggaggccgaggctggcggatcactcgcggttaggagctggagaccagcccggccaacacagcaaaaccccgtctccaccaaaaaaaaaaaaacgaaaaccagtcaggcgtggcggcgcgcgcctgcaatcgcaggcactcggcaggctgaggcaggagaatcaggcagggaggttgcagtgagccgagatggcagcagtaccgtccagctttggctcggcatcagagggagaccgtggaaggagaccgtgggaagggggagaggggagaggggagaggggagaggggagaggggagagggacgtattgatgtttttaatatgacttaaacagcatggttaaatagtcaacaagcaacacgctttcattatgacaatgattatcaccatctagaactatggttttactactactcaagatacttccattccacctcaaagtattttgttttgtttttgtcaatttattctgatgataaaaaatgtcaagtggttcacctgcctggtccttaagcgatgaatgacagaatcaatattcataataatctcaaaagaataaaaccaacaaattaaaatttacacagttaagaatatatattgttggccaagcacggtggctcacacctgtaatcccagcactttgggaggccgagatgggtgtatcacaaggtcaggagatggagaccatcctggctaacacagtgaaaccctgtctctactaaaaatacaaaaaattagctgggagtggtggtgggcacctgtagtcccagctactcaggaggctgatgcaggagaatggcatgaactcgggaggtggagcttgcagtgagccgcgatcacgccactgcactccagcctgggcaacagagcgagactctgtctcaaaaaaatatatatatatattgttaccttcatttttaaatatttattgcacttgcatagtgggggagaacttggattaacagaaattcacattaagatgatactgatgttttaattgattatacatttcatgtagaaatattaaggactctgtgtataggagatgtcatttgtaaggcagggacatgtatacaatgtgtggcacatccagaaaaacacaatggtagtgtgattattgtcttcagagttgtcatgtggaaggtgtttttttttttttctggtaccagaaggcaagcatttctaatagatggggaggtagcagagaggtatatcttgattcaattggaggaaagcatttactgtaaaccagggactatgctatcccctgcaaagaaggtagtattgttcagttttacagaaaagaaacctaaggctcagaatagtataaagatacaactattgagcacaattattattttaacagtatcttcatgacatttaatattgagcacatcccagcactttcggagtccaaggtgggaggatcacttgaagccaggagttcgagaccagcctgggaaacataatgagaccctatctttacaaaaaaattaaaaattagctgggcacagtggtgcatgcctgtagtcccagctacttcagaggctaaggcagggggatcccttgagcccaggagctcagaggctgcagtgagctatgatcacaccactgcaccccagcctgggcacaatttctcacgccaaattctttgactctagaacatctttattaaaatggcattgtcaatcaaatgtagcttcttgttgactcacacattatggcttgtttgaagggttgcaggctgctgttctcaagagcagagacaaactagtctgtgtgttattgcttagactcgtctgtcagctgctgcttcaaacttctattatcaatgcatcctgagctataatacagtgttgtcctatttcatactcacctgtctggccagtgacctactggaggctgtttctcacatggtgtcaagtacaagtacatggacattgtgacaactgttttctcagagacctttttattgaagggttgtggtatgttcctttttttttttgagatgggttctcactttaccatccagactggagtgcagtggtgcgatctcggctcactgcaactgccgactcctgggttcaagcgattctcttgcctcagcctcccaagtagctgggactacatatgcccgccaccacacctggctaatttttgtatttttagtagagacagggtttcaccatgttggccaggctggtctccaactccttacctcaagtgatcctcctgcctcagcctcccaaagtgctgagattacaggcgtgagccaccgcctgaccagtatgttctgaaagactcacgccaccaggtgcctgaccagatggacaaaaagctgggtctttacctgcttttagatagtgacttgtccaaaggttctagcagcctgatggctataggccttattctttctttctagtaccttttttacattcttttctggacctatgcctcttccagcaaatcccagccaccataatcagagaggggacttcaatcctggtattgcttttactggagccagagtaatctcccagtctgtaattaatacagaaaatctaactctccagggaccccagatactccgatgttgttgacatacacaaacactgccagtgcccttaaacaagagaagtgggttgggaagagggagtatggttattctagtagaggtacttgtgtttgccaagggatagattggggggcagaggatatggggacatagaatctcctgtactctaaacctgcataacaggaatttaactctgctttcatcagttagcaaactaatcagggggttctgttatgaaatgctggactccttgaaaacattggataaccttgtgcttaagggtgggtgctatagtgataagtgattttcatcctgcttgttctggaaatgggtaaggacagagaatttgaatggtgctggagctgaccataatgaggaggcaattaccctgttttgtaagtcctgcagaaactgagctcataagagtttctctatggtatacaggaacaattggagaattgaaagtatatatctatatatagatctatatatacctatctatatctatatatagataagatatattttggagatggagtcttgctctgttgcccaagctggagtgcagtggcacaatctcggctcactgcgacctccgcctcctggattcaagtgattctcgtgcctctgcctcctgagtagctgggactacaggcacatgccaccatgcctggcatatgtatatatatttgtatttttagtagagatagggtttcaccatgttggccaggctggtctcgaactcctgacctcaagtgatgcaccggcctcagcttctcaaggtgctgggattacaggcgtgagcctggcctaaaagtatattgaagtgaacaggtttcataaagaccagttggagcacaagggtgtaagaaggggacctgttctaaggcctgaggaatggcagtgaagaagaggatccagctgtggatgcccccggaagagtggaattttagaaatggtaagattcattttcagcaggtaagggatgagggaaaggacaggaatggaaaagagggacaattagaagaagaaatgcagtgggaaactcagaatcagcctaggttgtttccaccactgggattcagatctgtctgtgtataccagaagcctagtgggtggacccatcaggaatttgtgtgtttgagggactaagcagcattctgggaaaagtcaaccagtcagacatgtctgaccccttaacaaaactcttgacaactttttaaaaaacagtggattggcccggtgtggtggctcatgcctgtaatcccagcactttagaaggctgaggtgggtggatcacttgaggccaggaattcaagacaagcctggccaacatggagaaacctcatctctacttacaaatacaaaaattagccagttgtagtggcgcatgcctgtggtcccagctactcgggaggctgaggtgggaggatcgcttgaacccgggaggcagaggttgcagtgagctgaggtcatgctactgcactccagcctgggtgacagagtaagactctgtctcaaaaacaacaaaaaagaacggtggactagaaacatggcttcctcctgaaatgccattaaaatgacagtaaaggaatgttaaatgattaaggacaaagaatatgagagaaaagatggcagcatccaggcaatgtcaacaaaatctttgaatccggaaagcaaaaaacaaggaacaaactgagtagaccagagaaagcagaagtctggggcaggggctggtggagtgttactagcaataagcaagcatgtttgtaccacagaaccccagaaaaggcttaggaattggaggcatcagttatctgaaaagcaagaggtagtaggtagagggctaaaaacaagatgattacttgaaagactataaagtcctgagatcctcgccccttataaactcattcattcattcatttgttcattcgttatctcctggggaagatgaactagttgaagccaccaacaacaactgggagctgaggggagacatcctactgaatatagggatttaaaactcagcattctgtttgtttttttgagacagggtctcactctgttgcccaggctggagtacagtggtgtgatcatggcttgctgctgcctcaacctcctgggctcaagtgattctccacctcagtctcttgagtagctgggactacaggcatgaaccaccaaacctgggtaatttttgtattttgtgtagagatgggatttcaccatgttgcctgggctggtcttgaactcctggactcaagtgatctgcccaccttggcctcccagagtgctgggattacaggcgtgagccactgtgcccagcctaaagctcagcattctaaagagtcagaaacctttccctggcttggatcccagcagtctgaaacttggctgctaccttaggatactgctttcactacagccctctcaaggtgatttttttctcccacagtcctcctattactggtcctggagatggggtagatgatgttcttgctcctcattactacttctagacacgtctcctatcttcccttaaaactctcagctttgagttccataccatcaaataatatctcttctcttcattgctatcatctacaaaatctacaaacccctgggtcatcccctctcatttctcagtaagtttagttcactgctcatttcatttcccgcagcactactcctgatttaattcttagcaatttttaatctttcaacaccctgactataggttctttgaagagtagttttccactgaccttgttctctgctattctcatccattcactctcagtcataccttagatctctctcgttattaccaaaaactgtaacccctccataatctatctcattatctgaccaccacagtctgtcttccagacatctagtaacttaactccaacactcctttcactaccaccttttcattgtccctaatctccaagttccttctgttcctgtcataatcaacttaaatcccaggatcactcattataatcatgcaacttgcatgtacttttaacttagtctacccctttttgtcattttcagtttgcaaaatcacaactttaaagccagctctttgcctttgtacctacttctgtgcagcaactatgctgtttagtcttactttaaattcatgtccataaccttcaggccttaatgctgcctgataatcatatttccctactctatataccttcccatcctcctagatcaggagtcagccaactttttctgtaaagggccagataaatatttttggcataggaggtcatagtctcttttgcaattattcagctttgtcactgtagcatgaaagtagccagaggcaatatgtaaataaatgaaatttgaattgcatttatttgttacatgctatgatgtaatatcatcttaaatttttttcccaaccgtttaaaagtaaaaaagtatccttagcttgtggactgcaccaaaataggatttgaccaaaggctatagtttgctgtgctgtgtcctaaattatttcacaccttctcttttcttccaacacttcctccccattttcactctcagatgatgaccttgttttctacttcattcatccaccacatccaccctcttaccagcatctatatgcatatgttcagctttcccttctgttgctgtgttacctagcgcaagatctaaatactatataacccactgtttatctccctcactagaatctagtcccaggagacagttttgtctgatgtatacccagaacctggaacagtgtttggcacatagtaagtcctcaaccaatacctgaatgaatgagtactgtctatcagactagcatgcaggcaaaagtttagagaattttactccaggagaacttatctccgttttttttttttttttttttttttttttgagacggagtcttgctctgtcgcccaggctggagtgcagtggcaatctccgcctcccgagttcaaatgattctcctgcctcagcctcccgagtagctgggattacaggcgcgtgccaccatgcctgacttattttttgtattcttagaagagatgaggtttcaccatgttagccaggatggtctcaatctcccgacctcatgatctgcccgcctcagcctcccaaagtgctgggattacaggcatgagccaccgcactgggccggaacttaacctctctaagagaaaagacctacctgtcctgacagttggagatctctttgattatcctaagttgtactttttcaaatttctttgaagaaacacccacaataaaaaaaaaaactcccattttatgggatcaaaccagtacataatatgtatatatgatatgtgtaagaaaccaaagtttcataaaataattctctttctatgtagatgtattctgaggtggtgttttctattctgttctgtcatttgggggaaataaaactgattatattgatttcacaaactactaatgggtttgcgaccagaagtttgaaaaatactgcagtatgtcctaccaattacaagtcctaagtatgtacacagaactttttttttttttgagacagagttttggtctgttgcctaggctggagagctcactgcaacctctgcctcccgggttcaagagattctcaagcctcagcctcccaagtagccaggattacaggcgtgcgccaccagcccggctaatttttgtatttttagtagagatggggtttcaccatgttggcaaggctggtcttgaactcctgacctcaagtgatctgcctgccttggccttccaaagtgctggggttacaggtgtgagccacctcactggccagtgtacacagaactttctattggctttctagtgccccactcttacatatgaatggatggccaaggatctctagacgtttaagaaaagcttccaacacaaaacagaaacaagccttaaaaattcaacacagacaattcaagaaacaaaagaaaacattagaaatattcttagagtaataagatactgcatccaccaaatggaacagactgctatttaaaaaggggaagggggtggacaagaaagtgcttccctggaggacgttatgctgaatggaataagccaggcacagacagacaaagtcacatgattcctaatgtagaatctaaaacaaactcacagaatcagagtagaatgatggttatcagagagtagggggaaggggtggtaggggaaacaaggagatgttggttagagtacgaagtttcagttagataaagggaatacattttttgagataaagagtatagcatggttaataataatgtactgtatatttcaaaattgctgaaggtaaatgtcaagtattctcaccacaaagaagtatttgtagtgatggatatgttaattagcttgatttaatctttccacattgtatacatataacatcactttgtaccccataaatatatccaatttgtacttgtcaatttacaataaacctttaaattacaaaaataaaaaatatttttaattaaaagagaggttgacaagaaagtattctggcaaatttaaaacataacagaaattttaaaattcaaaagaaaagctggaaggtggaaatctttcagaaaaacaaaaagaagtggaaaacagggtagaaaggataaaattatttcaggacaaaagctgtgcagtaggcttagagaaaaactagtccacagtgaaggaggatgatgggctcctagagagttgtctccaatttaaaaaataaactgattgatagactacttgatgtgtttcaatgttttgaaaggacagtttggaataaattgattatagacacttgaatgctaggtacttaagaaagttgcatggagaaagaggcaatagttaacttcaatcaaaataaaggaaatataatcatattatgctaactggatcaattacatacctttataatagtataatgaatagtactctacctatatagggtgatatagataaactgaaggatggaagatggagaaatacatgtgtgtattaccagtcttcagagtataaacacatatcttatttcctatagaaaaagtaaaataatggcccaaactgaaaaattaagaattagtagtataagcatgctatttagaaatacggagataaataccagaagaggtagctgggtgaatagagattatatctagggagtagaaactgagagtgtggagggctgggacagggtctgctgtttttcattataaacctagtgatactatttgatttttaatgtaatgataaaaataaaacaatatgattaatgtggtatttcatttatttgaaaatcttaggagggactgtattcattaagtttttttgttttgtttgtttgtttgttttgagacggagtttcgctattgttgcccaggctggagtgcaatggtgcaatctcagctcactgcaacctccgcctcctgggttcaaggattcttatgcctcagcctcctgagtagctgggattacaggcgcctgccaccacgcctggctaactttttctatttttagtagagatggggtttcaccatgttggtcaggctgttcttgaactcctgacctcaagtgatctgactgcctcagcctcccaaagtgctgggattataggcatgagccaccatgcgcccaggctggagtgcagtggcatgatctcgactcactacaacctccgcctcctgagttcaagcgattctggtgcctcagcttccggagtagctgggattacaggtgcctgccaccacgccctgctaatttttgtatttttagtagagatggggtttcaccatgttggccaggctgttcttgaactcctgacctcaagtgatctacctgccttggcctcccaaagtgctgggattacaggcgtgagccactgcacctgacctgttttcattaaatattctaaggtactgggaaatcaacaatattgatttagcacctctaaaaggaactaaaaattctccccactttggtactcacctgcactgtggtgttttatttcagggaacccagtaacatcagcagtggcaccagcagctctagaaacatattctgtccccataaattgttgttatcatggtgaacaccagcaagtgatgcacttaggtggctttacaggcagcagtaggctttacagtgggctgaaaaatcccactaaacagggctgagtaggagggagcatcctagtgggtgcacacaataaagaagagggctcataagacgtttccagagtatgctcagaaataactggaaggatgtgtgtgtccccagccataaccactggagccacaatacaaggaaatcaccaatgttgtgcataactccatttgttctcctggactggtgttgcctaggcaagtgctgggtagatcagaatggatggggtggaagaattaaggggcatccagagagctatttgatcactggaggggaaagggcatggggggatgcagacaggtggcaaaacctgggtccaagatatatttgtcccagatatataaattgtcacttttctccctccccttctgacttgcacacttacaaagaaggttcctcttccttttctaaccatcccccaccagggaatttttcaggccttacaaagaagggagaggacccaggccagttgggagggtacacgtggacctacatcactctttttgaggaagtgagtagggaaacctagttataaggaagcaaggaaaatagagggagagtgagtactaaggccagcgccgtctataaacagaacaattcccgtgtgacctgaaggtctaggaagacccgaggtgagaaatcttcactcccctgcctactatggtgcgccggatcccgccatttgcacatctttgggcatctcagcatcccctctcatggtcagaaagaaatcaaatgaggattcaagtaggtgcctgatacttttcttttagactaaccagaggagcctctcccattccccttttccctggtccccacaaacatcatattgttttaatctgtctccaggtataacaataataagacaaagtccttaccctcagagagctcacaatattttggtggaggtttgggtataaaggcaaatgtgaaaacataattttactataatggggtaaagttaagaaagagatctatgcaaacatagaaaggagtgcacttaagtcagtgaaggttttctggcttagaagaaccctgacctaaaggaagagtaagagttacctagataagagcagggcagaacaagagaaactgatccctccacttctattgagtcacctgaaattatattcattttttggcagacatatacctcccccaaacattcggctctagttgtgccagttcttccttgtcagccctcttaccttggcctgaggcttcattgtctccagtcaggcgactatctcatagtcacactccactcacggcagccacattctgtattccagaacagcacttcctgacagcactataacattttctagcagccacatttaagaggtcaaaaaacaagtgaaatattttactaatatattttatttaacccaacatatctaaaatatttaaaccatatttttaaattattgaaatattttacattttaaaaatattgtctttgaaattaagtgtatattttatacagcacatttcaattcagtctagccacatttcaaatgctcaattgccacatgtagctagatagtggttatactatggagctctaaaattccgcccagactgagtgcgcttggtgtttctccattaaacagatgaggcccatcagtctgaggcacaactatgtattttctctaagtctctgtacccccaaggccttgaaaacaattcggaaggaagagaaggcctatgaggtttcagctacagcaggcactccctttagatgccaagcctagaaaaccctaaactgatgcctaacttgcagctgaatcacctttcagcaatcagattcagtgcctcaccaacacatttgatccagggagtctccagtttgtcctttgtccagtagaagacccactacaaagccttgataattcatcaaagtgacagcaccttcactgggcagtctggtgagaggacatctagccctgccaccctggttcctgttgggaacagtatcagatacgttgtgttagattcacatgaatctaagaatcacatgggcgaaaaatattgagagcattctgttaaaacatttccacaaattgggaaaagaccatctttaaaaatctgttggggccgggcgcggtggctcacgcctataatcccagcaatttgggaggccgaggcgggcggatcacaaggtcaggagatcgagaccatcctggctaacacagtgagaccctgtctgtactaaaaatacaaaaaaaaaaaaaaaaaaagaaaaagaaaaaaaaaattagccgggcggcgtggtggcgggcgcctgtagtcccacctactagggaggctgaggcaggagaatggcgtcaacccgggaggcggaggttgcagtgagccgagatcgcgccactgcactccagcccgggggacagaacgagactccgtctcaaaaaaaacaaaaaaatctgtttacagaggtaaaaacacgggtattacatggagcataatttgaaatccattccctcatattcagccaagaactacaggcccagagaagggaagtgatttgccaaaggtcattcaacaaatccctaggggctgtgatgatccctgtgtccttgccattacctcccttgtctccactaacaaaaatatttcaatgggagaatgtgccgatctaaggcactcctaaagtacttgctgagaatgacagccctggggagacaggtcggcagccctgaacaggcactgccttacccgggcgtagtgccccaattcgccacctcttggagtcctaggcggaggatactactggggcagttgtttcgccaattccacatctcccggagcctggcctggcccagcccagccccgtcgctgtgacccacttcctagctgcaggctggaccaaggggaggcacatggggagctccacagggaggccacgcccacgagggcagctcacagaattagaaagccgacggggtgctgtggtcaggaggcgcgtgggcggcaggttagtacttaaggtgcagagaccacccccaaccctttgactggcggtgggcatcccggaaaggcatggctcggccaattccagccccgtttccacgctcagcacccgccctgcctgtgcgcgaacggctccggcccgcacgggtcgccagaggcgactgtgtgacactcggagtttgctggggtctccgtgggcgggaggactttccagcgcaatggcgactccctaagccccgcagcttctgcgcccgggaaagatatccaagagatgcaaagctctcctgggcccaggctgccaccccagaggcccccttccgtcccggggccggggctaggccaaggcgggcaccaggactgcccagcctcccggcccttcgcactggtaaccggttccggggcggatgctttttgcatctgacccggcgcgcccggtgacgccttcgcgtccagacggaagtgcgggcggaggatccccagccgggtcccaagcctgtgcctgagcctgagcctgagcctgagcccgagccgggagccggtcgcgggggctccgggctgtgggaccgctgggcccccagcgatggcgaccctgtggggaggccttcttcggcttggctccttgctcagcctgtcgtgcctggcgctttccgtgctgctgctggcgcagctgtcagacgccgccaaggtgagtcccgcccagcctcgctcctgacggaagctcctcccctaccaccggccttgcggaaactgggtctgccaacctgctccttggcccattcctgacagccatacgcctggcctcacagctccggcagacccccgccgccaccagccccgcccctcccgactgcccggcggcactctcgccctcagccccgacagcctggcaggcagcgccccacggtcgtccccagccccgacagtgcccacagtccggacagcagccccccaccgccttaacatttcccttcccagccccggctgcacgcatcttacacttgacaaccttttcacctccgagagcctttaactttccaccctaagctcttgacagcccacctgcgccctccgccagcctcacaggccccgcatgccccaagccagaatgataggaagcccccatctgacagagccttccctgtcaagggccgactcagctcagctcacccctgaacacttcccttcctgtggtgggaacttgcccctcctggcctacttccctcccaatagggcctacggagcatctctcacctgcttcatattctcacctaactccctccacgagtcccttggtgcctttcttgctttctctcttcctgataatttagtgggtaagggaagaaccaaactgcaagagaggtgaggttgtggcctccctggttcgatttcttgaccttctagttccctcatactgttctctggtgccccagctctccagacctgccctagctccatgcatacctgtgcttcctctttgatgagctagctcatcattgggggagaacagaagggattcacattagtatgatgggaaaacagaatgacattgcgtttttaaaaataagagctttaatttataatatctttaaatgtaggagtggggaaaggttacaggcaggcaaatgtttttgattcagagattctttttgaaaccatctctacctcctaccagaaacagggacagcagcacgtctcctgactttgaaaacattgctggcaccctctgcatatcttgcctcataactttatgtattgtgatcatgtatttatttttcagtctcctttactagggtgtgtcctggttatgggcagaaaccatgtcttatgcttatctgaatccaccttattgagcacaagatctaacacagagcaaatgctcactaagtggttgctgaatacgtttgtgaattgtcaatagctctgccagacatatcactgtatataggaggagtgggcaaggtcctctggggaatgataagccacttccttctcaaacagattcccctttgctgaggaagcatctcttcttttctctatccagatacttagtcacctgttcctccacctcttgaaacttgttttgttggtagttgttctgtctgtcaaccaggaattagaagcaaagtttcctgggaagagtatactaaactgatctcagagtcaggctacttcctgtgtgtacttcctttctagttgtaggtgggtgcctctaacatttcatcccttctacgggactctggcccaacccgttttatcaatgtcagtgccttctaccagagggtgaaaggatgataggtagaattgtgaccttttttgtgaataatttttagtttctttcccatcctttagtaatgaatattcttatttacaggcacaactatctgcttaccatgtgtctttctagtggcagatagatggtaataacattaacataatttgattgtcatgtgacccataaatatggttaataagtcttagatcatgtattaggtattatttcaaaataactacatgtaatatataatgattcattggcattaccataaaggactgtggcttttaaaaactgtgtctgttaaagttttaaatgaatgattttagaatacttggtattctaaagaggatgcttggcaaaatgtatatggtacagtttttaaaaatattgatgataaactgtcaacgcactatactgtttccattttggttacagaatttcgaggatgtcagatgtaaatgtatctgccctccctataaagaaaattctgggcatatttataataagaacatatctcagaaagattggtaagtatctggattactgaattacctgtcacatttgtttctgtggttgtcagtgttatcccagaatgttcatcaaatgcatagttttctttttaagtatttcatttgaagcaaaaatgtgaaattctacttccatttgaaaaagtgagagtgaggccctacgtgcatgatgcctgcaggcctaaaggtatacagccaaaacactaagacccatgtaggcagagtttcatgggagcatatgactgggtttgtggcacctaaactacccatagctatcttgctgtactccctcaagttttggtgagggacctttctccctcttgcttttcagtggaaggttagcaagcctcgtttgtctgggttataatttttacaacttgtaggttttgatgatgtattgccaagtatgggaagctatgtttaaaagtgtcagaaggctcaagaagaagtggaaatgagctatgtagtcagagtttcccatttggtgtaaatgaagaagttacagttgtgccaagatattgacctgttcagtccttgggcagtcaggcaggcctgtgatgactgggggatcctgactgactagccaccagcagccttctctgcttatcccagcagacctgacaaatagctttttctacgtgtgccatgaagcagttgggatgcagttgtattacagcaggatgaatgtgttccttcccatagaattgtgatgttttatggtttgtaaccacggtggaagatggatgggataggaatttaggaaaaatagttccaaatggtaggagctttcacgtgtatctgatttcatagctaaatagccatcaaagagttagaaagcaagattaaattcattcagttaacagtattccaacctgactttaaaaaagaaaaggcagcctttgagtatgtttagtttctctgatgccactgtctgttcttccctgatacgcatttaggttcagtctcatatttgttaagtgtgttcttgagaacttcttgtgaacctctatgttccactgtaagtggtgtcatattaaccaagcgatttggccatattcttaaaggttttatatcaggaagttactttatatgatacaagaatgttcaggccgggcacggtggctcacgcctgtaatcccagcactctgggaggctgaggcaggcggatcacctgaggtcaggagttcgagaccagcctggccaacagagtgaaaccctgtctctactaaaaatacaaaaaaaattagccgggcttggtggcgggtgcctgtaatcccagccactcgggaggccgaggcaggagaatcgcttgaacccgggaggcagagcttgcagtgagccgagatcgcgccactgcactccagcctgggtgacagagcgagaccctagctcaaaaaaaaaaaaaaagaatgttcaaataaatctttatgttacttctataaattttccaaatttattcagtgcttacagtttattctgttatcagtaatgaaatgcaatgcctgtcttttgagtagcaaatgaactcactattcaagtggttagcactaatcttttcactaacttttcattatttcagactcagacaggaccatatgtcattaacccctggttattagtaaaaatagctttggctttgaaaacagttgaggcaggacatggtggctcacacctgtaatcccagcactttgggaggccaaggcaggtggatcacttgaggccaggagttcaagaacagcctggccaacatggtgaaaccccgactctactaaaaatataaaaattagctgggcatggtggcacacgcctgtaattccagctactcggaaggctaaggtagagaatcgcttgagccgcagaggtagaggttgcagtgagctgagattgtgccactgccctctaacctgggtgacagagcatgactctgtctcaaaaaaaaaaaaaaaaaaaacagaaacaaagaaaataaacagttgagaataaggcttgcttggggtttttcttccctctctcccactctcccttgtttcttttctgcagcttagcatttttctagggataagttcccagctggcactgaaaaattttaactgactttacggggcaggcaagttatgattcaccagaattatggctttacgaggcctccagtatctgtgagggcctagatatagttttaccttttgttttctgggcctttcattttgtccagtttttatctttaagtcttcattgacttatgctggctgacttaaaacttaagagtagttggagtgctctagtttgtgtttggggtgatttaaagctaatgatgtgttacttttggcactagggggaggtgttgcctagttccttaagtggttaacctctgactaggtctagctctgtttgtaatgactggtcagccaaaatcaaccttcctgctttctctccagctgggcacaacttttgcacagcactcaagtatctttttgttattaaaatatatccttcaaaagaaatactcaatacttacttagcacttaaaattcccaagtcattcttaggtattgttgccaaagcttctgaagctgaagtaggaaactaaatagatcagtttcattttcccgaggttcagaggtaaagaactgacgtaggaagcaggagtcctggattctggtcctttctgttttttttattgctagagtgcagtggcacgatcatagctcattgcagccttgatctcctaggctccagtggtcctccagcctcagcctcctgtgtagctgggactacaggtgtgtaccatcaacctggctaatttttatttttgtcgacactgggtctcactatgttgcccaggctggtctcaagttggcttcaagtgatcctcacatgttggcctcctaaaactctgggattatagggataagccaccatgcgtggcctgatcctttttcaaatatgattttactctgtgaccttctctaagcctgaggctagatgagctctctgatcctcagatagataacacctgttatgggatatagttccctctgcccattttgtgcctgcatccagttgggtacatgcctggtcttctgtatatttggaacagatatcacacacttttatggtgagagttgtggggccttacccgtatttgaaataccatcagtggaaatttaatttttcattactacctttgttaaaattaaattacctgttaagaataacctgggccgggtgcggtgactcatgcctgtaatgccagcactttgggaggccgaggcaggcacatcacctgaagttgggagtttgagaccagcctgaccaacatggaaaaaccccatctctactaaaaatacaaaattagtcgggcatggtagcgcatgcctgtaatcccagctactagggaggctgaggcaggagaatcacttgaaccctggaggaagaggttgtgttgaggaagatcacaccattgcactccagcctgggcaacaagagtgaaactctgtctcaaaaaaaaaaaaaagaataacctaacaacttctatcatataccgttttggttattttttctaatgccacagtttagagggaacagaacatgaaaatatgaatttctagaaattaacttttttttttttgagacagagtctcactctgttgcccaggctgagtgcaatggcgcgatctcggctcactacaacctctgcctcccaggttcaagtgattctcctgcctcagcctcctgagtagctgggattacaggcatgtgccaccatgcccagataattttttgtatttttagtagaaatggggtttcaccctgttggtcaggcaggtcttgaactcctgacctcatgatccaaccgcctcggcctcccaaagtgctgagattacaggcgtgagccaccacacccggccttttttttttttttttttttgagacggagtttcgctgtcattgcccaggctggagtgcaatggcacgatctcggctgaccgtaacctccacctcccaggttcaagcgattctcaagtctcagcctcctgagtagctgggattacaggcatgcaccaccatgcctggctaatttttttgtatttttagtagagacggggtttctccatgttggtcaggctggtctcgaactcccaacctcaggtgatcttcccgcctcggcctcccaaagtgctgggattacaggcatgagccactgcgcccggctgaaattaatttttaattgacacaataactgtacgtatttatgggatacatagtgatgtttcaattcatataagatatagtgatttgatcagaatatttagcatctcagacatttatcatttctttgtgttgaaaatattcaaaatcctccttctagctatttgaaactataatatatattattgttgactatagtcatcctacagggatatagaacactagaacttattcctcccaccaagctgtaactttgtttccaaaaagtacattttggtggggaaagagaaggaatcactctatagagtattgggtgtccccaagagaatgggtaagataagataggatggtgtagtagagtgcttgaggcagccaggaatgcctaacgaagagatgccaaaaggaaagaaaattgtccaacagctggcaggaggacaggaaagctttccctaattttgctgaaggtgatcagagtcatagactcttaatagttgaggagaataataatttagttattgcttagaattgacagatttctaggaaaaatctgatagcactgtgtttacacaaaccataaataattagccttgaaaatggggttggggaaataagtaacattcaacaaaaacactcatccctttgttagtttttatttagttctttggaataaccagtttttgttttaaaatattttagttattctatttctccttgctttttcagatttgctcattaagaaaagtgattgtttcttcctgtgtgtggctttgagggttcaattttcagagtttcagaatttaccacgctgttaaacgtggttagtcattcatacaccacactggcagttaagaatgatgttggctgggcacggtggctcacacctgtaatcccggcactttaggaggccaagataggaggatcacttgaggccaggtattcaagacaagttaggtcaacaaaccaagacctgatctctacaacaaatctaaaaattagccaggcatggtggcaggctcctgtaatcatagctgctctggaggttgaggcaggaggatcacttgagcccaggagtctgaggctgcagtgagctatgatggcaccactccactacagcccatgtgacagagcaagaccttgtctcttaaaaaacaacaacaaaaaagaatgatgttaattcacaaaagagataatcttatatttgaacagtgccccatatcactttaaaccattttaagtagttttccttagtaactgaacaagtctaaaggtgacttgatttgttaagtagtttttcatcccatttgggattttttgtgtgcgtttttgtaactgttaacagtagcagctttgaaaatagacactactatatgtgtgactttgtggcttcttaaatggttaaaacttaccaaaatgctaatattgagagcagaaattattttactttatcttattgattatttgttttttatgctctttcattgggtaagtttagtgattattctagatttcaggaaacttttggtcagagcaagcagaagagctagctgggcttaagcagcattttatctttgttttttcagtgattgccttcatgttgtggagcccatgcctgtgcgggggcctgatgtagaagcatactgtctacgctgtgaatgcaaatatgaagaaagaagctctgtcacaatcaaggtaaaatatatatccctctatctacctgtctgtctgtctgtctacgtcttttctgcttctggatggtttctagacaagacagaaaaatttggacccctaccccaaaaggaataatgggcctgttctgcctgcctcactgacatggtttgtggattagttagggtatgttagatagatatgtgaaatggcacaaaaatgccctatgtgtaattagcatattccagaaagatatcccagcttctgtgtaggccatgtgtgccagaggctgagagagcagcatttataagccctcctctccttgcctttccagccctttgaaaaaattaaatatatagtaattattctagaactattacttctggattttaagatttcccctcttcatttcctgtaggacagtggtccccagcccccaggccacagcccagtctgtggtctgttaggaactgggccactcagcaggaggtgagcagtgggcaagtgagcaaagcttcatcttatttacagctgctccccatcattcgcattaccacctgagctccacctcctgtcagatgagcagcagcattagattctcataggagcatgaactctattgtggactgcacatgtgagggatctaggctgcatgctccttatgagaatgagaatctaatgcctgatgatctgtcactgactcccatcacccccatatgggaccgtctagttgcaggaaaacaagctcagggctcccactgattctatgttatggtgaactgtataattatttcattatatattataatgtaataataatagaaataaagtgcacaataaatgtaatgtgctagaatcatacccaaaccatcccctaccacccctggtccatgaaaaaattgtcttccatgaaactggtcccgtccctggtgccaaaaaggttgtggagtattgctgtagtaaatgggatgtagatcactctcatcaccatttgtatttctaatgagttcagttactttattatagtggctaatggtttttcttccaatttttttttttttttgagatggagtcttgctctattgcccaggctggagtgcagtggtgtaatcttggctcactgcaacctccgcctcctgggtccaagcgattctcctgcctcagcctcctgagtagctgggattacaggcatgcaccaccacgcccagctaatttttgtatttttagtagagacaggatttcaccatgttggtcaggctggtctcgaactcctgacctcgtggtccacccatcttggcctcccaaagtgctgggattgcaggtgtgagccaccgcgcctggcctaatttttttttacatggcacttcccattcctttccccccaaaaggccctgtggggaatgtggggtggttagttataatagtcacaaacatttctgctgtgattgaccctgtggaagagctcttgctccagcagggtgctgaactttagataaatcctcactgtactattatttaacagatttgtaaaaaatatacaacttatgtaccctaaaagtcactcactataagtatacaattctataaattttagtagatttaaaacattttaaaatccagtttcaggccaggcatggtggctcacatctataatcccagcactttggaagtccgaggcgggtggatcacttgaggtcaggagttcgagaccagcctgtccaacgtggtgaaaccccatctctactaaaaatataaaaattagccaggtgtggtggcacgcacctgtagtcccagctacttgggaggctacggcatgagaatcacttgatcctggaggcagaggttgcagtgagctgagatcgtgccactgcactccagtgagactctgtctcaaaaaaaaaaaaataaaatccagtttcagaacattcccactaccccaaaaagatccctcatgcccatttacagttaattcccatttccagccctactcggtcactagtctactttctgtctctgcatacatggacatttcatgtatatggaatcatataatatatagtcttctgtgactggcttctttcatttagcacaatgtttttgatgtttatgcaagttgtagcatgtatcagtacttcgtttctttttattgctgaatagtatttcactatatgaatatgcatttatcagttgatggacgtttggattatgtctgggtttttactattatgaataatactgttgtgaatatctgcacatatgtctttgtatggatatatatgttttccattctcttgggttaattccttagaatggtaaaattatgtttaactttttaagagactgccagattgtttcccaaagtggttgtaccactttacattcccaccacagcgtatgagggctgtttctccatatccttgctaatacttggtattgtctatttattttattgtagtccttctagtgggtgtgtcacactgtactttttctcagtacatgaattaaggtcacaagaaaaaatcaccggcctagaaaatacttttgtatatctaaattgagctaaagagtagctgaatttaggacattatgttcagctgggaaaagaaacaaactgctgtgctagcagtggtgacaggtgattagcagtaggtgaagttggagtcttgaagacttgcaaaaaaatcccaaagatctttcctctttttttcttaaataatactttggtgaagagttgagtttatttcttatattgctatctggtttgtatagaaatcctataggcttagcagatatgtcagtcagttttactattatcatacaaagttctgatttatgggcttgaacaaagatgtaacttaattttcaatttcctttaggttaccattataatttatctctccattttgggccttctacttctgtacatggtatatcttactctggttgagcccatactgaagaggcgcctctttggacatgcacagttgatacagagtgatgatgatattggggtaagttcccagcctgccctagctgctcatggccagtccctgtcatcattcgatgtgaagtgcaagtgaaaaatagtcatatatagatgttcacgtgctgaagcagatcctcaactagagaagctaaaaacagctctgatttcagtatatacctctttatgaagaaattgcttgatgaagccataaatgtgatgatttaaacgatgatctttggtgagcatgctatacagggccttgctttcagtaccaaaggcacaattttattgccattccctgtttacattgagaaaagtatcagagatggttttctctccaagctctcctgcctgaaacaccttctctgtcaatatcaccaaatattttagaaggcagagaggttttcatcaagggaagtgtgaagatcatgatgttcttttcttaatgaagtacaacttgataacctgctgatgttttatatttcctttttttctactgcttaaaaaaaaatctgtgggccaggtgtgggggcatacacctgtaatcccagcactttgggaggccaaggtgggaggatcacttgagcccaggagttcaagaccaccctggtcaacatggtgagaccctgtctctacaaaaaataaaagcattagccgggtgtggtggtgcatgcctgtggtcccaactattcaggaggctgagacaggagtgtcacttgaccccaggagtttgaggctgcagaactgtgatcacaccataggactccagcctaagcaacacagcaagaagcctgtttaaaaaaaaagaaaaaaaaaatctgagatctttagagaaaaataaaaccatgactaccatcactccagattctcttcctgtctttaaatctctcacacacacacacacacacgtgtgtacattatatatgtttatatatatatatatatatagcgtgtgtgtgtgtgtgtgtgtgtgtgtatatagttggcataatctgtataaattgcttcatggtctcctttttgttttaatattcgtttattcaaaaatgtccagaaattgacttagtccacaaatctgtttttcagtgtagcttagagaatgttttttttgttttttgagacggagtctcactctgtcgcccatgctggagtgcagtggcgtgactttggctcactacaacctcagcctcccaagttcaagcgattctcctgcctcagcctcccaggtagctggttctacaggcacctgccaccacgcctggctaattttttttgtatttttagtagagacggagtttcaccattttggccaggctgctcttgaactcctgacctcaagtgatcagctcgcctcggcctcccaaagtgctgggattacaggtgtgagccactgcgcctggctggatatttttgtttcatcattaccctgtatgaaattgtttctgaattttcctttttttttttttttgagacgcagtctcgctctgttgccccggctggactgcagtggtgcgatctcagcgcactgcaagctccgcctcccgggttcacgccattctcctgcctcagcctcccaagtagctggaactacaggcgcccgccatcgcgcccggctaatttttcgtattttttttttctagtagagacggggtttcactgtgttagccaggatggtctcaatctcctgacctcatgatccccctgcctcggcctcccaaagtgctgggattacaggcgtgagccaccgcacccagctgaattttccattctttcattattatatataattatttttttagaaattactttttctcgtggattattatattggactatgttccttaaaatgggtaaaattcagaatagttttaaggttcaattcaaaagccaaacccagagtgagcccttgccagccagtcaaaagtccttttaccctggaatggctcgtgcatctataggcatagacgttgaaagtcttaaacgacatccttcctttacagcgttaaatatctgttcctgatttcagaaatagacaatataataacacaaaacataagagaaatggatgtagagatgaaaacatgtagggcaggcatttaattggtgggatcacatgctcagtaattgttttgtccaccagtgattgattctgcttgtgtattgactatttgagaacactgtctctgtgaggcctggctgactcttggatgtcttttaaactgattctaggcagagaggttttctgaccagagctgtgaatttatggtaacaactctacaaaaataagtgaattttaatttttaaaactgttgcttatccaagatgtgagttctgcactatttatatactttaaaaatgtttttgttgaactatcagttttcattttttctgtttttgttcagtgtagagcattttaaagcaaataaaagtgagtacaaatagttaagctcactgcaagtagtcacaatatttactatatcatatatccatgacacatcatcgttattaccaaagcattacagtaaaacatgttttgtatttattgtaattttatcaggtgtgaaaagaacaaacataaaaagggtaaatctctatttgcattcccccagcatctgtgaccatgagcagctagttcaatctcgttctgatggatagagagcagacccaaaggattagctggtttgtttagtcttttgaacttgttccttaagaagatttttctcccctaccttgaagaatagataacagcactaggcaactgagaggtcctctgctgatcaagtacatccttcttcccagtattgcttatgtcaaaacaaaccaatggtgataatattttcctcctctggtccttgacttcaggggatgatattttatacacaaattcactgaagcaccatattcttatagtgtcattttaatctacctgaccaaaatctgtttcgagacaatataacaccaagtcagggttaggcaggctaagttttagtctttatgctaatttgttaaatgaccttgggtcaatttattgccataatggaaaatcaagcaattctataactttagcctgcctcctttttttttttcttttttagcttttttcttacattttttaaaacattttaagcctcatgaaattgcctttattattttcatttgtaaggttaaaagtttaaaaataggctataggtcccagctacttgggacgctgaggcaggaggatcacttgaggccaggagttcaaggctgcagtgagctgtgatcacacctgtgaatagcccctgccttccagcctgggcaacatgggtagaccctatttcaaaaaaaaaaaaaaaattaagttcatggccagtctgggcaatatagtgagaccccatctctttaaaaaaaaaaaatccactttttaaataacttgagttttaggatttgtacaagccattacctaaataaagtgaaaagttgaaggaattttgacaaagaagaggaggaaagattctttataaaaactctttgatatctttcaaatgtagacattgtataaatgccttgctataaaaacaagaccaggtgttctaactcctataattatagttgtatatatagttatgtggttatgtatatagctttccatatacatgcagactcctgccctggatatataatagagctttttcaaacatgcacagcaaaataatgttgtttctctcctagaggcaaagtttagtataagaggtacaacttgtgacttggatcttctgttggaacattgagaagctttgctaacacggggttcaagaaaaagagatcaaggaaaaggcaaacaaaagcaataaattactattgaatgctttttgtcatttagacagctgtgtttatatctcattcatagatagattagcatggtggtttcctgtgtaatgactacaaacatccagttgtactcgtttactttgaccaggttaggttggttttctatacagatacctgggcaacccttcaatagcctctttcccaaggcagcaacttacatggaagccactgggtgcttaacaatggaagattcaatctttgttgaatagagagggtgattgtagcacttgagctgtgtctcttttcattacacattggggaagtggggaaatgaggaagcttttggaagctaatccatttagtgtgtgtgttgagggtacagggagagattaaaaacaacccaagataagactctgtcgctcaccctcccagagtgatgtggccccaagctggcaagaaaacaattctaatggagacaggaaattaaaagacagatctttcctctgccacagattagctttatagtatcgaataaagcaaggaaagaccctactttccatatctataacatggagagatgttaacatgaaaatagattttcttttccctatcagttaaggaaggcttctctttaacacaaatgaccactgtcttttgcttggtctccacttctttaagggaaatatctttggaaatggcaatccatgggaacgtttcacaaatactctgtcatcgcttatgtttcttgaaccacctaggtctgtacttgagttcatactctatctggtagttgagcgcttaggagtgcttagctaaatagatgctctgttgtttgaaaagtccacctacccctatttctgtggcgggctggtcactgttgtgtgtctatgttttacactgactgtgccatctctaatgttctccattcctggacttttaggatcaccagccttttgcaaatgcacacgatgtgctagcccgctcccgcagtcgagccaacgtgctgaacaaggtagaatatgcacagcagcgctggaagcttcaagtccaagagcagcgaaagtctgtctttgaccggcatgttgtcctcagctaattgggaattgaattcaaggtgactagaaagaaacaggcagacaactggaaagaactgactgggttttgctgggtttcattttaataccttgttgatttcaccaactgttgctggaagattcaaaactggaagcaaaaacttgcttgatttttttttcttgttaacgtaataatagagacatttttaaaagcacacagctcaaagtcagccaataagtcttttcctatttgtgacttttactaataaaaataaatctgcctgtaaattatcttgaagtcctttacctggaacaagcactctctttttcaccacatagttttaacttgactttcaagataattttcagggtttttgttgttgttgttttttgtttgtttgttttggtgggagaggggagggatgcctgggaagtggttaacaacttttttcaagtcactttactaaacaaacttttgtaaatagaccttaccttctattttcgagtttcatttatattttgcagtgtagccagcctcatcaaagagctgacttactcatttgacttttgcactgactgtattatctgggtatctgctgtgtctgcacttcatggtaaacgggatctaaaatgcctggtggcttttcacaaaaagcagattttcttcatgtactgtgatgtctgatgcaatgcatcctagaacaaactggccatttgctagtttactctaaagactaaacatagtcttggtgtgtgtggtcttactcatcttctagtacctttaaggacaaatcctaaggacttggacacttgcaataaagaaattttattttaaacccaagcctccctggattgataatatatacacatttgtcagcatttccggtcgtggtgagaggcagctgtttgagctccaatgtgtgcagctttgaactagggctggggttgtgggtgcctcttctgaaaggtctaaccattattggataactggcttttttcttcctctgtcctctttggaatgtaacaataaaaataatttttgaaacatccatcagtgtatctatctatgtctcctagttttttcctcctccctcttttgctgtataatgagattgaagatataaagacattttgtaccctgttctgagactactgttttataccaatctaaccgtaaaatattggtgtaaattatgtgtttgcatgtatagacagaatatatgaatttgggggtggatctctgaaaagtatactaatattttgataaattgggagatttcaaattcctgaaggagtacttgttctgagaaattcttggcccaaaaaaatcagaattaaattcataaaagtgaggttttaggagccattaatgggattttggggtttagtaaaattttaagcacctacaaatatataaattatcaattttattgttagtattaaaaaatttaatttcaaccatgaccaagtgggatttatcccaggtatgaaaagctggttcaacatttgaaaataacatttctaaagaagaaaaattacatgaattttatcaatagcagaaaaagcatttgacaaaataaccccattcatgataaaaattctcaggaaactaggaatagagaacttcaactagataaagaaatgagctaacaaaaaaaccacagctaacatcatatacttaataatgagaaattagaagctttcccattaagatcaggaataaggcgaggacgtcttctcttactattccttttcaacattgcactggaagtcctagttgtactggaagtcctagccaatgcagtgagacaagaaaaggaaataaaaggtataaatattgagaaggaaggaatagaactgtctttgtttactgatgcaatgattgtctatgtagaaaacccagaagaattgacaacaacaataatagaactaataagtgattataaaggcttgcaggatacaaggttagtatacaaaagtcaatcaaaccaggtgcagtggcatgtatctgtagtcccagctactcaggaggctgaagcaggaggattacttgaagccaggagttttgaggctgcagtgagctatgattgctgcatgaatagctactgcactccagtctgggcaacacagcaagaccctgtctctaaaaaatgtcaaccgttttcctatatatcagccacaaacagtggaatttgaaattaaaaacaatactattcatagtagcacccccaaaataaaatacttaggtataaacctagtaaaatgtatctaagatctatatgaggacaactgcaaaaatgattaaataaaccaaagaactaaacaaatgaagatatatttcatattcattaataggaaggctcaatattgtttagatggcggttctttccaacttgatctattgattcaatgcaatcccaatcaatatcccagaaagttattttgtggatattaaacttattctaaaggttataaaaaagccaaagacagaatagccaacacaatattaaaggagaacaacaaagtcagaaaactaacactacctttgagacttactataaaactacagtaatcatgacagtatgctactggcaaaaaagacagatcagtggaacaggatagagaacccagaaataggcccatataaatacagtcaactgatctttgacaaaggagcaaaagcaatacaatggagaaaagatagtcttttcaacaaatggtgctggaacaactggacatccacatgcaaagaaatctagttacataccctgtacccttcacaaaaattaattcaaaatagatcataggcctacatgtaaaatgcaaaactacaaaactttcagaagataacataggagaagatctagatggtggtgatgacatagctgataaaggactgctatctaaaatatacaaaaaatacttaataagggacaaaaaatttgatttaaaaatgggcaaaagtcctggacacctcaccaaagaggagatacagatggcaaataagcatatgaaaagatgttccacatcatatgtcatcagggaaatgcaaactgaaacaacaatgggataccaatacacacctattagaatgaccaaaatctacgacactgataacaccaaatgctctcaaggatgtggagcaacaggaactttcttttattgctggtgggaatacaaaatggtacagcaaccttacaaaactaaacatacccttactatatggtccagcaattgtgctccataataattacccaatgagttgaaatcatgtccacacaaaaccctgcatgcagatgtttatagcagctttactcataagtgccaaaatttggaggcaactaagatttcctttagtaggtgaacggataaacaaattgtgatacaaccagacaatggaataatcagcgctaaaaagaaatgagatttcaagccatgagaagacatggaagaaccttaaatgcacactactaagtaaagaagccaatctgaaaatgctatatgcggccaggcgcggtggctcacacctgtaatcccagcactttgggaggctgaggcaggcagatcatgaggtcaggagatcgagaccatcctggctaacgcggtgaaaccccgtctctattaaaaatacaaaaaaaaaaattagctgggcgtggtggcgggcacctgtagtcccagctactagggaggctgaggcaggagaatggcatgaacccgggaggcggagcttgcagtgagctgagattgtgccactgcactccagcctgggcgacacagtgagactccgtctcaaaaaaaaaaaaaaaaaaagaaagaaagaaaatgctacatgcataattaacaactatctgacattgtggaaaaggcaaaaccatggagacagaaatatcagcggttgcaaggggttagagaaggaggagggatgaataggcagagcacaagatgtttaggcagtgaaactattctgtgataccacaatggtgaatacatgtcattatatacttgtcaaaacccacagaatgtaaatgtacaacaccaagggtgagccctaatgtagactatggactttgggtgattatgtatcaatgcaggttcatcagttctaacacagtaccataatgatgtggaatgttcatagcagaggaggccatgcacacgtgggggcagggagtgtatgagaattagctctgctttgtgttcaatttttctgtgaacctacaattgctttaaaaattaaagttggggccgggcatggtggctcatgcctataatctcagcattttgggaggccaaggtgggcggatcacctgaggtcagcagttcgagaccagcctggccaacatgatgaaaacccatctctattaaaaatacaaaattagctgggtgtggtggtgcacacctgtaattccagctacttgggtggctgaggcaggagaatcacttgatcctggaggcagaggttgcagtgagccaagatcacgccattgcactccagcttgggcaaaagagcaaaactgtctcaaaaaaaaattaaactcagcatggtgcagcagtctataattccagcactttgggtgggatttcttgagaccaggagttcaagaccagccaggcaacaaggtaagacctcatctctataagaaatacaaaaattagccaggcaagttggctcgcacctgtagtcccagctgctcgggaggtggaggctgcaatgagctgcggtcatgccactgcattccagcctgggctacagagtgagatcttgtctctaaataaataaggagagaaggaatgcttctaatatttatatttttaaaaagataaaagtatacttaagaagaaaaaataaaatggctatttaagaaaaaggtattggctagttcctatgatactgggttatcagaatttaacatccacattcgtgtcactaaagtccccactgctaaatccgactggctttaaaaaaataaaaagtaaaaaaaagatgtaagttcgtattgaccttcctagttctggccttaacctctatctaaaagaatactggccaatatttgcacattatgagtctattgctccataaataattttgatataatatcatataacccagaagaatgggggacattctttaaacaaaagaatttgttacaagtatccagttttgtaagcacgcctttctatttagtatggttatctgctgtcatatctacacattggataggaaaaacagccaaaccagaactgagcagttctgtttaactgtaagctactttgcatattgttattaaatgatcacctataaatcaggttaagtccaactcagcccaaaatacagcatcctgacgacaaaactcaggtaagagactattctccagagtggcccgtggggaagaataagaacatgatttttaagaaaatccctaggtacagttgataaatactgaattttgtcagctatcggattattccattatttcaaactaccaattattccccatataatggaagatccaggttttgctggcaattaaatcatctagaagagcagaaggagttttgatttggaagtcgggacactaggttctggcccctgctctgctactagctttgtaaccttagcaacatatcacaacctatgaggaagttttaagtttccttctagctctaacattccataattcaattatatcggcagttgtagctttttattttttacatgctacatatcttttatatctctgaaatttgaagcttttatgctcagcagagcatccagaatctcttacaattttatcattaagacctcatcatttatttcccagaattgctctaaggcagaatctgagattttcccaacataggtgtgtttgttagctgtgtctgtatctggaaccatggagccccagcactaccaatctgtgttgctttcttttaaaaacttatactcaattcctacaaacacatccagaccccactaggctttctatcttgattctccttgttgctgcattttatttcattttctcactctgttgccttaaattttcttctttgaataaaaggtgatcatatttaaatgctagtacattgattggtgaacttattggaaatgctcaacagaaaaaaacttctcatcaatgtgcctccagagacaccatgctcttttttcaagaattacgaaaatattgttaaaacctagaaagttttaattacttgtggcatatacaaattactcagatttcatctgggtcaagatttaagatattgtttaaatggtcttttagggtaaaaccatcaccaaaagaacgatttttgtatagttaggtttgatgacatctgctttactttttggtagcctgttaattccagcttgttaactacaggcaacaatatggctctgctgttgtcggaagtgcagtaatacgggctccacacccatttgccaccattttgcagcttctgccatacccgttctttctctcttaccctctagaattcctggcttgggaatttcctaacttgtttctctcagtaactttttctttttgacagaatcctggctagtttttagttttccagagatttttgttttgttagttatcttaggtcatttggtcagtaatttggaatctttcatttcctgttcctctgtttcgatttttaattggagctatcccacttatctcatcccaccaccccgtcgcttttaagaagagcttttcctggcattgagttcttttccagcctctttcaccatggcttactatagccctttaaccctggcactcctccctcccggcacccctgcccctgctgcccttgctgtttccctagtcccctgaccttcatacttgaattctggtcttaggggctgctcctcccactacacagtgcagcctgctgagtttttgctgtattcaggtagagaaacaagtgccaatattatctaatcttgccctaaacattaggactggtgtgtgtgtgtgtgtgtgtgtgtgtgtgtgtgtgtttagtatgccaagcacagataataacccctcactcctaaagatgctgaaaaatcaacctgctgagaaattaacaccatatttccttctttgatggaggcccacaattagacctcaagctgctttcccttctccattttaggtatgttcctcatctctcaacatgtgtgtttaggatagatcagtgctgtgactctacagtgttaaggaaaacataaaccaggttttctataaggtgcagtttagaaaggaacgctacataaggattcattcatctctaaagaaaggaaagaggcaaatgctgggtgcattataggcacggtcactcctctgtacctggggggttgggtttaggactccccttcggataacaaaatccacagaggtccaactcccttacagaaaataacgtagcacttgcatggaacctacacacaccctctcaaacactttcaatcatctctgtattacttataatacctaatgcaatgcacattctatacaaatagttgttacactgtattgtttagaggataatgccaagaaaaaatgtcagtacttatttagtacccatgctgccatcccttttttccccctgaatattttccacccatagttggttgaatacacagatgtggagctcaccaatatggagggtcaactgtagttttttcactttatcctcacaaccaccctgcagaatagttagtagctcatttggacatggggaaagcgaaagctcagagaggttaagacacttgcctaaggacacatagctaggaaggggtaaggccatattgaaacctgagggtgttatgactgagagaaaaagctctttctccccccgcctccaagttaaccggttacactgcagtggctctgtaaaatctgttgttgctacatgattacaggcagaggcaaaaagtaacagtagtttaaaacaggagaaggatatagacctattcacaaagaagaaatgcgttggtgtggaacctcttgggttatactgcttcatccttgagttctacaaaaacacacacacacaaaaaccaacaaaacttaactataggctgggtgaagtggctcatgcctgtaatcccagtgctgtgggaagatcttttgaagctaggaggtttaaaatcagcctgggcatcaaggcaagaccccatctctacaaaaaaaaaaaaagccaggcatggtagtgcacacctgcagtcctagctactcagaaggctgaggtaggaagatcacttgaacccagcagtttgagattgcagtaagccatgatcacattactgcactccagcctggctgacagaacaaaacaccacctctaaaaataaaaatataaaataaataaaaaaatttaaaaacctaaacatagctgcactttactcaatatatttacagttctacatatgtaaaaacttgtatattgactatgttttaaatgtgtaggggaagtttctcacctaaaggagtcccatagtgaacatttaagagcaaatgattccttttttatttgtatttttggttttgcctctagcacatcaggtattctttaagaaggctatgcctctgaggttgcatgatcattaactaattcataatttcccttgcatatatttgggtattttggtgtttcagcctttcccacactttttttatttgcatgtcttcacgatcaccattatatctttgttccacctgtactattatttactcactctttgtctttaaatcaaatcacgtttcttactcaagtagatttagttttaagacaaaccttatggccgggcacagtggctcacacctgtaatcccagcactttgggaggccaaggcgggtggatcatgaggtcaggagtttgagaccagcctggccaacgtaatgaaaccccgtccctactaaaaatacaaaaaattagctgggcgtggtggcgggcacctgtaatcccagctacttgggaggctgaggcaggagaatcacttgaacccgggggggcagaggttgcagtgagccgagatcgtgccactgcactccagcccaggcaacaacgcgagactctgtctcaaaaaaagaaaaaaaggaactttatgtcgctaccataaatgtgaaattactagaactcacaataaatagaagttagtaaagacactgaattctaactagacgctattgcttgttgaaggctttgatcttaggaggattagaaagcattctaggccaggcacggtggcttcctgtgtgtaatcccagcagttggagaggctgaggcaggcgggttgcttgagctcaggaatttgagaccagcctgggcaacatggcaagaccctgtctctacaaaaacatacaaaacttagccaggcgtggtgatggccacgtatggtcccagctactcaggtggctgaggcaggaggattgatgaacctgggaggctaaggctctagtgagccatgatcacaccactgcactccagcctgggtgacagagccacaccctgtctcaaaggaaaaaaaaaaaaaaaaaagaattctagtggtgtggtgtggaagacacattctcagcagactaaggttgtatctttataaccacaaggattgaaaaagaacggaaggacaataactttctcataaggtgattcaatgttatttagtgctgtttctgtgtaccatcaaaaatcctcttactacacacagaatattataacaccatctcattgtccacatgagctcagaaattggtcatcaaagcagaaaagtctttaaaacattgatctctggccgggcgtggtggctcacacctgtaatcccagcactttgggaggctgaggcgggcggatcacaaggtcaagagatcgagaccatcctggccaacatggtgaaatcccatctctactaaaaatacaaaaattagctgggtgcagtggcagacgcctgtaatcccaagctactcgggaggctgaggcaggagaattgcttgaacccaggaggcagaagttgcagtgagccgagatcacgccactgcactccagcctgggcaacagagccagactccatctcgaaaaataaaataaaataaaacattgatctccaagaaagtagatcatatctgctctctatctgaccacattgttaaacttggttatgtttgcaggttaaagaggaaatgatggacaacagaggcaactctagtctacctgacaaacttcctatcttccctgattctgcccgcttgccactgaccaggtccttctatctggagcccatggtcactttccacgtgcacccagaggccccggtgtcatccccttactctgaggagctgccacggctgccttttcccagcgactctcttatcctgggaaattacagtgaaccctgccccttctctttcccgatgccttatccaaattacagagggtgcgagtactcctacgggccagccttcacccggaaaaggaatgagcgggaaaggcagcgggtgaaatgtgtcaatgaaggctatgcccagctccgccatcatctgccagaggagtatttggagaagcgactcagcaaagtggaaaccctcagagctgcgatcaagtacattaactacctgcagtctcttctgtaccctgataaagctgagaccaagaataaccctggaaaagtttcctccatgatagcaaccaccagccaccatgctgaccctatgttcagaattgtttgagttgctgtttccaaatagaaatgaataatatcacaaaatggggtctcttacggcatcattcaatagtttttcctaaatgtaatttccatgtgggcaggaaatagctcaaatgctaacctatgctgggtattactcgcttgggcttcaattgtactaaacatgatctcatgtaggttgaggagctgctctgcttctttcacgaactctaggggagcagggggccccagagtttctgcatgtctcaccctgcccttctcacatgctcggccagaggctgagcatgtgagaagctctcacggaagcttgtgaagcgtgactgctaactacctgatgccggtcgtcacttcgctgaagcgtcgtgctgagcaatcacaatgaacttctctttatttgtcaacatttggagatttttacttattggggattgacaagaagtcaccaccatgggaaagtgtcttggggctaaagtgaaagtagtttacaaaaccttgttgttatttgaaattatttcagatgcatcattttcctgcatgcagacttcttcaggcagcttagtatagggtctaagaaggcagagctgtggccgggcttggtggctcatacctgtaatcccagcactttgggaggccgaagcgggcggatcacaaagtcaggagattgaggccatcctggctaatgcggtcaaccccgtctgtactaaaaatacaaaaaattagccggtcatggtggcgggctcctgtagtcccagctactcaggaggctgaggcaggagaacggcgtgaacctaggaggcggagcttgcagtgagccgagattgcgccactgcactccagcctgggtgacagagcgagactccatctcaaaaaaaaaagaaagtcgggcttggtggctcatacctgtaatcccagcactttgggaggccgagacaggcggatcacgaggtcaggagatcgagaccatcctgtctaacacggtgaaaccccgtctctactaaaaatacaaaaaattagccggcctggtggagggcgcctgtagtctcagctactcgggaagctgaggcaggagaatggcgtgaacccgggaggcggagcttgcagtgagctgagatcgcgtcactgcactccagcctgggcgacagagcgagaccagacctgtatctgcagtataactctgctacctcttctctatgtctcggttcttctccacaaaatgagaataacaacaacagcaattcccatgtgtttatgatgatgattaacagaccttgacatgtaataagtattcataatgattaaaaacttttttttgagatggagtctcactctgctgcccaggctggagtgtagtaatgcaatctcagctcactgcaacctccgcctcctgtgttcaaacaattctctgcctcagcctcccgagtagctgggattacaggcacccaccaccacacccagctaattttttttgtatttttagtagagatggggtttcactatgttggccaggctggtcttgaactcctgacctcatgatccacctgcctcggcctcccaaagtggtgggattacaggcatgagacaccactcccagccaaaaacattttttttagagatggggtcttcctatgttgcccaggctggtctcgaactcctagcctcaaccaatcctcccacccctgccttctaaagtgttgggattacaggtgtgagccactgtggctggccatcattactgattattattatcattatcttgttttgtccatagcatcaccattctctaggttctctaagctagaaaacttggagctgccaggcctttccttcatacctgggaaggacagtccctgccccgtatcttggggtctgccttcaaagtgtgtctatttctgcttccatggccagcttcagctcttccttctcctttaactcccaggtcccatctgtcccaaggcccagtcagtgacctatcccacactgtctatcacactcctctccactgctatgcctctatgaagtcttctccaacttcctatcctagccgttacttcttcctttattttgtataaatatttctcttgtggttgctatcctgctatctttagacactttacacacctatctctgtcttcttcagtagactgcaagctccttgaagataattcatccagccttattcatcttctattcctagtacccagcaaagagcctcaaatcaggaaggtgtcggtgaatatctgttgtcactgttttcttattccaatcccgtcacctgtgtctgggttattggtagcagtctcctgtctggcctcttgggatgcgttctcaacaggctccaccctcactctctctgaaggtatttcatgtcacttcatcgcttaagctgcctgatgacttccttctgaacgccaccttgtttaaatttatcagcttagttttcaaagctccctactgcaaaacaaagcagcaaacataagaagccgtgttttctcatttctccttgccagcaacatttcacaaagcccctgactcttaccgcaggcagctctttcgctcttcagaaagaagctttgaagacacgacaggacagagtacacgcccctctccctcctccaccccgtcatctcctgcctgagtcactacattccttaaaagataaatgacccgagttttggccttttcctatatgtaagataacatctgatgggattagcgatgatgcctctgtaatctataagcaggattactctcacacccacactctgatgtgagtctgctttaatgtgactcctaagcaagttcaatgtgattttgcatgtgctgaacccatttcccccaaacagaaaatcacagtctcgcaaatgtatccttctctcttctctcttacttcctacctaaactggaatattctccttttcccctcctccactgaaatcccactgtctcattcaagaatcattctttcactgccagagacttcatgggtattttttaatttattttttattttttgagacagagtctttctttgtcacccaggctggagtgcagtggcgcgacctcggctcactgcaacctctgactccctggttcaagcgattctcctgcctcagcctcccgagtagctgggattacaggcgtgtgccaccatgcccagctaattttttgtatttttagtagagacggggtttcactgtgttagccaggatggtctcgatctcctgacctcgtgatccacctgccttggcctcccaagtgctgggattacaggcatgagccaccgcgcccggccatgggtctttcttagactctttgtgtgccaaataactccgccttggtatacggtcctgggcagcagtcattctcctgactatgaagtgatgcttcgggagggcagtcatcagttaagaggcttttggttgcaagtaagaaacagcccaatccagagtggcataatcaataaggggaattattggctcacagagctgaggcctagagtagcagcactgcctgcaggcaggactcagtactgtcaccgagaacctattttcagctgggcgttggggtgcatggctgtagtccgagctccttggaagactgaggcaaaagcatcccttgagcccaggagtttgaggccagcctgggcaaccctgtctcaaaacaaacaaacaaaccaaccctctatttcctgaggtctatcctctctttctctgggaatagcttcagtgttcccaaaaggctgtcagaggctctcagaactatcagctttcttattcaggcataggaagaaagagaaagcctatatcccaggattcccaaccaaagtctccagattcctgctgattggagaggttcaggaacacgccactgcctgaccaacccctggggccagacggggatggaaggggtgactgacacccactctacccctggaggtgggtactttggcctccctatccacatggatctgccaactgaaacaggacctggtagaagcggggtatgaatgtgggggagacacatccaaacgtgcctgcataccaggcatataaccagtgcacagtgactggcagaggcctccaaatacgagcccctcccacaagcagaatctggacttctgttcctttgttgccagtgtccacacctctcactccaaatggtcacaacacctctgctcctcaacagagtcctgcctgttatagacaaacaggcccacacctttggttattttggtttagactagggacaaattctatcctagagtccccaggccgccagtggctcccccattcctgcctctagtgtgtacagggaggacgccctcagtttctgcggaggtggctcctccctcacaggagtctcctgggatccgtgagggcttcccaccaccactgactcttccagcagtggagcagcctgagctttggagaactgaggctacactggcctttttcccttcttcctcctcctcttctctccaaagggaaacctggagaacaccccctcccccatcacttcctgccccacccctacctcccaaggcctcctgtccccctctccgcatgctcggtgcactcactggccacagacgacagcgtccccaggctgcacccatggtaaccggcgtggcaaccaggagtcggttgggctgagaccctgagccccaactgtcagaaggagcctgaggctgaggtggaggctgggagtttggggctgtgggtaagtccttgtggggtcagacctgtggacttgggcaggggcagaccctcacggggctctggtgggctgcagcagtgcggcttgatcttgggccctggtggcagctgtctcctctgaacagggctggaaaggggatggacggccctgagatctcagcttgcctgaggccagaactagccttgtaggtggccggggaggaggaaggaggaaaaatactaacataagttgagctgctgaatacgccaggtgctttccatgtattctatcctgagtgtaactggagagcagaggttaagtgagcacacagccagcaggctgtaggggaggatttaaagctgggctgctctaaactcacagcacttgctcttccaatcccttccctgtttcctgagtggaggttcccaaggcaggtgactcaaagaggaaactgtgagagtttgtgggagcaggtagggccgtgcatggactcaactgtccccagaggcagctaactgcagagctgagccctgcctcgccccggtggccactgcttgcttcaagctgcagctcaggtaatggtggtgcctattctcaggtggatcctctgaaggccatggaatcctccacggggcccaggatgcctttgctcaaatactgcagcgtggccacaagcctgaaggcccctggctgggacggtgctgctccaccttgggacctctccttcacctacccctttgccctccaagcaccctggctcaccgggcacaagccccttgcaaggtacctgtctctgcccctctgggggaagtggatgcccttttctttttcctttgttcttggctgttggtggtagaccttggtggacagacttgcttcctgagaaggtggaaaggggtcttcattgtttggcctatgattggcatatctgtgtggggtctgtcactccagcctacattgtgctcccagagccctccagggttgatctggctttagcagagttgcagatgctgcagttggcatgagtaagagaaggcagttagggatagccagttaccaagtttatagctcattttaccatcaatgctgagacttggctgggcgcagtggctcacacctgtatacaatcccagcactttggaaggccgaggcaagcagatcacttgaggtcaggagttcgagtccagtctgaccaacatggcaaaaccccatctactaaaaacacacaaaaaattggctgggcatggtggctcatgcctgtaatcccagcactttgggaggccaaggcaggtggttcacccaaggtcaggagttcgagaccagcgtggccaagatggtgaaaccccgtctctactaaaaatataaaaattagccaggcatggtggcgggtgactgtaatcccagctactcaggaggatgaggcagagaattgcttgaactcggaaggtggaaaggttgcagtgagccgagatcgcaccattgcactccagcctgggtgacagagtgagactctgtctcaaagaaaaaacaataattagctgggcgtggtggcacatgcctgtattcccagctactcaggaggctgaggcaggaaaattgcttgaactcgggaggcagaggttgcagtgagccgagacagcgccactgcgctcgagcctagggaacagagtgagactctgtctcaaaaacaaaacaaaaccaaaaaaaaaaaaaatgagacttgctcagccaccatatgagaaatcagctaatgtggggtctccaggtccctcttcaggttccctcggtacccctcctttgtccaggattttcctgaataggatcctcagtctgctttctaaagcgtggatacaagaggccaaaggcaccacagccctatatacacatgtggagcgtgtcatctccagggactcgcattcctgctgcctgatccattctgcccacattagggacatgccagcttgaaagatccttaatggctccctttcgtgatccacccggtggaccatcctgttcaaggctagagttaagcatgggactttagatgccaacaagcacaggaaggaggctgaggggggctgagggcagctcagcatgggtctgcaggagctcctcagcacgaacagcctgggtgcagtgacggcatgttgatggcagcaggaggcagacaggccccctttgcattcagccttgcccacaaagtaaaatggcttcttcaaaaacccaaaccctgactcaacaactcccctaggccaactggccctgaccacaacattttctggaactagcatctcctttttctgtcccacagccccttagctcctctgggttgtccctgcccaaacacttcctcatccctctgaccccacagcatcaagtggcattacaatttcacaccctcggcattactatccaagcttccacgcctcatcctggaatcccacacgccgccttaggattgacctacctggcactttttttttttttttttttttttttgagacagagtctcgctctgtcaccaggctggagtacagtggcgcaatcttggctcactgcaacctccgcctcctgggttcaagcgattcttctgcctcagcctcctgagtagctgagactacaggcacccaccaccacgcccacctaatttttgtatttttagtagaggtggggtttcaccgtgttgtccagatagtctcgatctcttgacctcgtgatccgcccatctcggcctcccaaagtgctgggattacaggtgtgagccactgctcccggcccctggcactcttttcttttcttttttttgataggggtctcaccttgtcacccaggctggagtgcagtagtgtcatttcagcccactgcaacctctacctcccagattcaagcaatcctcctatctcagcctcccaagtagctgggatcacaggctcacactaccacacccagctaattttttgtatttttggtagagatgggatttcaccatgttgcccaggctggtcttgaatttctgagctcaagtgatccatccacatcggcctcccaaagtgctgggattacaggcttgagccacacttttccagtctgttgtctagtgtaggaacaagcatcaattaacttgaatgtatcaaggcgaattacattttggttgccttgaaccaactcccaatccaccaaggatggttcccttcactgtcctctccttctgcccctcccggaggtttaccttatccttccggaagtcatagattgccactttccatatggatttctgttccgcatgcctcatgtgctgtggtgtacctcagatgtacctgcgaaacgtgtttcttgatgtgtttagggcttgttgctctctatccactaattccatttgcttttttccaggcatgcctcttcttgcccatgtctccacgttgccgacccagcatggcaggggcctggctggctgggaagagctggagatgctgccaacacatgggtcctagcaagaagggaagcagatggtttttactaccgggcccaaataaaggccactcccgaggcaagtccctgaccccagtatctccctggcgtgctcctctgggtggccttgtcatacctgacatgccttagctgtgtacatctagcaggctggtttcttgcataagcacagctctcccatggccatgttgtagaagtgaacatgtaataccattgagtgtattagtttgctagggctccctaacaaagtgcaacaaacggagtggcttaaaccacagaaatgtgtcatctcccatttctggaggctggaagtccaggggttggcaaggttggttccttctgagagctatgaagaagaatcattcccatgccctgcttctggcttctcatggcttgctggcaggctttggtgttcctcagcttatagaggcatcgccttgatctctgcctttacctttatggggctttctccctgagtgtgtgtctgcccacatttccccctttataaggacatcagtcacactggattagggacctgccatattcagtcctcatcttaattacatttgcaatgcccctatccacaaataaggtcacattctgggggctaggacttcaacatatgaatttggcagggggcaaggcatgttggctcatgcctgtaatcccagcactttgagaggtggtggtgggaggattgcttgaggccaggagttcaagaccagcctgggcaacacagtgagaccctgtctctacaaaaaatttaaaaatgagccaggcatggtggcacatggctgtagtcgcagctacttgggaggctcaggcaggaagatcacttgagccccaaactgatggcatcattgcactccagcctgtgggaggagggtggaggtgggtaacgggacacaattcaatgcataacagagaagaaagtgtactttaaaagtactttgttgcggaaaattcagtgtgttgaatgaacactagcctaagggaaaggtggaacgagatatgtttgctcacatgcatgggtgtgtgctggtacagagaagcacactctcgccatgctgggggccaggcctggcctgtacttcagtggctactcacttctttttttttctttttttcagagtcagacttactttgtgaatgtagattcatgaagggaagactagtgtaaattctttaaaaatatgaatttcagaatttccaatcaaaagtcagtttttggccaggtgcggttgctcacacctgtaataacagcactttgggaaaccaagaagggtgggttacctgagatcagaaattcgagaccagcctggccaacgtggtgacaccccgtctctactaaatatacaaaaattagctgagccaggtggggggctcctgtagtcccagctgctcgggaacctgagacaggagaatcgcttgaacccaggaggcagaggttgcagtgaaccaagatcacgccattgcactctagcctgggtgacgagcgaaactccgtctggaaaaaacaaaaaaaagtcaattttcaagtaactaatatgtgaattaaaatgaaattctagcaaagctttgctcaaatataggttctgtccagtgatttggtaaaaataatttataaccagagtttatttctcttctaaatcacagagtacttgaaacagcttgtacttttaagtagctgcagcactgttctctcacttttgctattcatttgcttagctaaccctttcctcgttgactgcaagggcagtgctgagggcagctctgtggccacaatcgctccttgcctacatgagcctcataggtgaacaaccatcctgttggtcttggacacatccctggttggtcttggacacaggagcgacgcttcttgggggtgccggaaggaggagattgcattgagaaaaggtccagggaggacccaggtaactcctggcaattgcaggtcaaaaatttggtaggaggaaagaaaaccaggcaaaggaagggaatggaaaggcagaggcaggaagtgatccacaagagttgcccgaggcaggaagagattcaggggagcacaaccgtgccacacagcctgcctgtcttggctttgactggcttgaagcagcatctgccctgtcccttctttaggtgcctgtcactgtttggaaggcagcccctgggcctgatttggggggcatcgtagggaacctgggtgctccctattgtactttgtaatgccaggtcttattctgagtgttttctttcccacagctggagagacagggggtcctgcttgtggaattcgaggctcctcttgtcgcaggcccaaagctgccagcccagcagcagagagtggtcttagaagaggatgtcattcctctctcaccatctgtaggatactcactgagaccaggggataaggtgctggcactctgggagccaggccaacagcagtatggccctggcactgttcttttgggcttggagatgagagatccccagagaggtaagagaagctgctctgacccatcagtgcccagaaggagccaggctgtaatcaggccagaggagagagccaaggctgcgtctacagcttaggggtttctaaggcattaagaagagaatttttcccccttgcttgctgcttaatcttgagggcagcaacagatgcctcaagatgcacagtgtatctttcagattattaaaaaaaaaattgtaatcagggtaaatggcctaaaactctcatatctatgttggttagctaaaccatggtttagctactcacaacccagccctcaccaggtcctccagggaccagacagtcctcttctgcagggtcagtcagcaccattgtaattcagagaatgacagaatgaggcttctactgagaatgcattttggttttgacaagaaaagtgagcccctgcaggccactgtagtccaggaggcagggaggctcaggcaagtccttgggaagtggaggtaactatggtgcaggtgaaggatgttcctggcaggctctccacggagaggtgcatgtgaggagccacgcagccagagcagcggggccaggctgaagctctgcctttgcctgtgtgggtaggagaggctttatcccatgattaggacgtggaagctacttcggaggctgaggcaggaggatggcttgagcctgggaggttgaggctgcagtgagctatcactgtgccactgcactccagcctgagccagaccctgtctcaaaaaaaaaaaaaaaaaaaaagaaaagaaaaaaagaaaaaagaaaaaaaaggagataattggtaattataacaaaatgttgccattttttgttatgtagcatcaaaggaaaaagaaatcactgttcatttctggaatggcaaagctgctaaagtgcccctaggtggggtccagtcggtgtccctgaccatctggaagaaggctgtggagaggctgcacaagtctttcaccagggagcaccccaggccccttcactgggccccttgctgctctctgctagggccaatcactgggcgcatcactaatgagcttcctccggatgctccattcctgtgccctctctgccaccatcatgcctgctgccagctactgtgccagggctgcctctgtggctgcccgccatgtggcacgacttggtggcctctaaccaggacctcagaagtcatggccagagaacttccagagttggagcccacagcacagcttttgcccctggaaggtcctaaagaggagaaagtagcaatgcacgctcccctggctgtttcttcctcctcatcctcctcctgtgaacaagatggtgtggagaatgatctggagatgggccctccccagagactgatggtgaacagtgcagtcaacacagatcccatctttcttgagatgcctctgagacagagtggcctctgccagcctgagtggaggtattggaagagaaacgggcctgagccatgccctgggaagccaggtataccaggggagtgggcttgctttctaaggcaggggctggggccccgcctcccttccctcccacatgtcccttaggaatttgatgcacgtgtccactctgttgggactgcagtaatccttgggagtctggtcatgctgaagaggaggctgtggcaagagggaaatagcaggtttccatttcagctatgaggcccaaaggagcagaaggatgaactgatctttgtgctaaggttgcatccctatttaatacctgcctttttctttcttcactagtctctactgatagagcactgccattgtctgtttttagtctcctccttttttcttggaggccttggtttttctctagatgaacagtccaaatgcctccaggtgttgatcagagttgatgcactgaagcatagaaactggtcttgagcattggtcgtgaggccccactctcctgctggttccctcagtaagtgagcggggaggacccgggcactgcgatgtgcttcttatccctcatggccaacagggaagccgtgtcctgttgctgctggcagtctgcagccagccccacactgcatcgcctccagctgagaactgtgtggcgggccctgctaggttcggggagcccatcctatctaaattcccaacggagtctggaaagagcagaagcctgtcagagctgtgtgaaggaggtggcctggaaaagtctggcccttgacaagattctgggagtcctggggtcactgaacgtatctggggcagggaggctgtgaggtgaaggaacaccactgctaagggcttagatctctaggcactgcccacactgggacccactgggggtccctggttgaaaccatagccctatttctaggacagccactgagccagaaggactgctcagcccatgagggtttttgttgttgttgttgttgttgttgttttgagacagagtctcactctgttgcccaggctggagtgcagtggcatgattttggctcactgcaacctctgcctcccaggttcgagtgattctcatgcctcagcctccccagtagctgggattataggtgcatgccaccatgcctggctaactttttgtatttttagtggagatggggttttgccatgttggccaggcaggtctcgaacccctggcctaagtgatctgcctgcctcggcctcccaaagtgctgggattacaggcgtgaaccaccaagctggcaccaatgaagatttaaatcttgccccaagggtaaggattttattagtgttcagttccaggaagttgagaaattgtttgtaatgagcagctttcctggtgactcctctgaacccctgggctttgggaggggtggggaggagtgtgtctgctgcacttggattttatatgaggatttttcccctatctctcctaggcccagctgtgctcttcctccactctccaggaggaaactttgtattgaaaacataaaatggggaggtgggtcctgggcttctgtgaaatgggttactccaatcttgcaatggcaagccttggcagcagccactcagaaatggcgatttcgctgggcacagtggctcacccagcactttgggaggccggggggtgggggtggggggtggatcacttgaggtcaggggtttgagaccagcctgaccaacaaagtgaaaccccgtctctactaaaaatacaaaaattagccaggcattgtgatgcacgtctgtaatcccagctagttgggaggctgaggtatgagaatcagttgaagctgggaggcagggtaagccactacactccagcctgggcgacacagcgagactctgtctgcaaaaataaaaaaaaagaaaagaaagaaatgccggtttctttctccattcgaaagaaatgaagttatggagaatttagcatgaaaactctagagtttggcaccattttctttatattatcacttgtagagagggcataaagaagatggcaccgaactctagagttttcatgctaaattctccatagctcccaatgcctcttgctccagcacagcttggagaaagaagagctgtacctacccaacagagaggggtctgtggggagcaactgagacagtgccaagcccagcataggggagagggacaaccagaggggccatggaggccagacataccctagataccacgtctgtgttcccattgctgtgacttgctccatagcaaactctagaagggttccaaacctgattaagtccaaacaaatttcccctggccctaagtttacacagctcttactgctactgcccaaagccacttacacctacagtctctctccatcaccacatttaaagagatccactccaaagttattttctcccctgaaataaattctattaattgactataaagaagataactatagtatcttcaggtacttggccgggctttcctgttaaatactggatcttgtgttatgctctagggaaagttcctggggctgacccatgagcatcatcagtatgttcccaaatatatggagagcatgcccgagagggggtgtggagacatggccatcccccgccctcaccacatgtgtgggactacctgctcactagtgaagagaagcacagaaaaccagggtcagggctgaaacaaggcaaacaccagagctttgcttttctcccctccaggttttgtatcttttaaaggaaatgtgctgttttgcttctcctaaacatgcttgatgtttaatcagttcttgctatcaggacttgatatccgttctgtcgagtgctgatgcttgacactcaattttgagctttgcctctcacaaaagctcttgcataggtttctctgtcctccacactttcccttactttcagttacaggcagtgagaggttacaattagatcctaatagtcctagggaggccagattgtgagctgctggcagggaggtactttctgcctcctttgactgaaacaggattcaatctgtagttttaaaagaaacgtaaaaagcattccttcccttttagattggtctattcctcaggaagtcacatctcccattatttttgttttgccccaattttttttttatttttagagacagggtctcactatgtcacccaggctggtgggcagtggcacgatcatagctcactgcagcctcaaactcctgggctcaagcaatcctcccacctcagcctcccaaatagttgggactacaggtgtgcaccaatgcacccagttcaatttcttaatatttgttttctatcagcttgtaatctcttctttgtggtctgtgttatcagtgatcagtgaaggtgtcgaagctcctttaactggtggcagtcagttacctttgcttgccctactggcagtttagaagacacatccaataacttcttcacaactccaaatcttgggtatcaggtaatgtttcccaaaagcataaggtccagaaatgataacaatttttttctctaaaaatagaaaacattacatggacacattgcatgatggcaaaagaaaacaggccaggtgtagtggcttatacctgtaactgcaacactttgggaggctgaggctggaggatctcttgagcccaggagttcaagaccagcctgggcaacatagtgagaccgtttctacaaaaaactaaacaattagctgagcatggtggtgtgcgcctgtggtcccagctactgggggctgtagtgaagagcgggtggcaggtgggaggatgacttgagcccgggtggctgaggctgcagtgagctatgatcatgccactgcattccagcctgggtgataatagcaagaccctgtctcaaatacataataaatgaaaagaaaacaatgcttgagcttacagatacttcagtgatccttgttttagttctacttatgccatcaaaatggtggcatattcaacctaagtaattgacttttgggtttaggaacaagatattccaacatctgcaaagaagaaaaggatcacaaacagcagagagcacaaactgtagtagtggggactaccaaggagctggtctcgaaagcaacccacatgaagccaccgcagaccccgccaggggaagctgaacacagaaagcggagtcagagccttgcaatatgtcagtggaacaagaattcccgttagactaagagccctgaggatctaggtaaagcagaatggctggaaaggggcttcctaaggactcctcacatgggtcttagaccttttgggtcacatcccctttgagaacagtaaaacctatgaccccttgtcctagaaaaatgcacataccctcaattttgcatgtaatttcagaaggcttatggaacccatgaatttaatcacaggcttcttgggggtgcaaggatccccgtttaaatgaccctctgttctatggtattgggtaggggtctgctttattaggccctctgaatatggagtctattcctcactaagaatgataatatagccctacttaaactttatttccattatataaaatactggcacctttcccaaggaaaggtttgtgttcaaaatgagagaatcaccaggcaacgaaactgggagatgtcacagtactgctgtggcagcttcaagacatttgggacacagcaatgacttttttttctgagacaggatctcactctgtcactcaggctggaatgcagtggcataatcatggctcactacagccttgaactcctgggctcaagtgagccgcccacctgagcctcctgagtagctaggacctgagtagctaggcacatgccaccacacctgactaaattttttactttttgtagagatagggtctcactgtgttgaccaggctggtcttgattactaggctcaagtgatcttcctgccttggtttcccaaaatgttgggattacaggtatgagccaccgcactcggccacaatcaatgactttttaaaatcagtgacttttgattcttaaaattgcagtcagcataacaatgtatggaatttttcccccttttataggtaaagaataaacatggtaaatattcgaggagagttatacagagtggctgacaaggccttcttcaacggaaggaggcagaggacaggccacaggtaacagtcaaataaccaccagtatctccaccccacgaagacctccctgcagataagcagcaggaaggcacctgttgtgagggctataggaatgtgggatcctgccctggggctccctgccagggccctggtgaaactgctttaagatgcctcttccgtggaagagggggtcagcctgctttgggcaaatgtgtccacagccactctgccaccttcccataaagcctagttgtacatgagtgacattttgtttcacctcttaataaaaatgaattctcttcatttccaaatctctttattatcataattaacctttacttggaaagcaagcagtaaaacctgttcagacagcatcattatattactttcaggcaaacaagcgtggaggacctctacaccctcaagttaaaaaaggcactgaggccgggcgcggtggctcacgcctgtaatcccaacactttgggaggccaaggtgggtggatcacgaggtcaagagatcgagaccatcctggccaacatggtgaaaccccgtctctactaaaaatacaaaaaaaatagccgggcatggtggcgggtgcctgtagtgccagctactcgggaggctgaggcaggagaatggtgtgaacccgggaggcggaacttgcagtgagccgagatcacgccactgcactccagcctgggcaacagagtgagactgtctcaaaaaaaaaccaaccaaacaaacaaaaaagcactgaaagagacagactccagttcccggaaggctgacccagtcagcactaaaaacaggattaatgtatagctattaagagaatcatacagtggctttattcttactacttaaaaaaaggtgatgtgatggcagtgatggtcaacatcacacagggaagaccaggtccacgctttgtccagaatcaactgctaccacatgagtcttcttggttaagtcatttgagcccacagtgacagaataggtccctggatatacttctatgtagaggtccttagagatgttctcagcctagaaggaaaagaggatattagcagtttagagattttataccccagtgccaccatggccccccagcaggctacctgtccttgcagaggtgtgatggaatgaagcgctaatgtgggagacagaggtcctgctttcaaggctcagcctgctcacgtacaacactgtcattttggtaggtctcagcctttccttatttctagcactgtgataatacctcacaaataagcatgtgaaaacactctgtaaatgctaaagtgttatatgaacatgaaggattataaaaagaacactctacttggagttaggcagaaggaaaggctagaggccactgttttggggatcagaagtagacagtggcacttagcacagatgagcagtaatgacaaggtactcgggagtgatgagagccattcttttaaacggtgctttgctaagttcactatcaggaagatgacaggcatttcttttgtcctaaagctcagaacaatttgagtgaattccattttgtcactgaagcagcaattcagctggctgacaaaactctcccttggaggactggttctcccagagtacaaaacactggaagccagagttaatggaaagattttatttagagccgaactgagcacaatcagtcttccaagggtagacttcactcatggctggtagattacatcaggtgtgcaggcagaggatgggtctcagttcaaatggtaaaaggacaaagtcacaaatcagaagagagcctgtaattaagggccagagtgacacctgggatgccattacaagcttgcttaatgctgagaaggggccataggcagaagttgtcgattccactaccacacacaggaaaagccaaactactggccagcaaattgcactcagaggaataaatgatcatgtttacatttttatgaaatttcccctcttcctcctaccttgcagatggatttgaagccaattttttccaaagctgttttatgttgtattctttcatgcctgtccagttactgcgaaattggaagtctaccatcctttaactgacgtaaatgtgtatgacaatgtcattaactatttattggttgtcaaccatgtaaataaaagtcacttttagaaaatatggttatatcagaattgcagaaagccaaggatgcttcatttgcacacaaggaaacatagaggtaaggttggcatgtggctgtagaactccaacacggtggaacatcagcattaccaaaagtcagcaagtgttgagaggtgtctaagccttaacaacttatatttgtactagaagcagaatattcttaattgtcactaactctagtatactccaaatcctgactcgtagcaaaccgtatacaaacaaaaagtaaatgtattgcggcaccatgctgaatgaagttcctttcctcagaattctagcccttccaagttccaaaaaggatcccctggcttcatgacctaatgagtactttatcctaaaaatgaaaaactcattatatgtttttacagagaaacatttgtggaaaataagaacaaatgccttcaaatgttttggaacctgatctcaccaaatgtgtatgtttcggaatttcagcaatggttttcactttgttagcaggaggatcgtgcccctcctgctgcttgaacagatggtggaattccagcaggacccagtgccagcccagctgagctgtaggaactgagaggtgaatacttcacattctttccaaccacaactatgagttcaggcacaaagagtatccctgaagcttagagtgaaggaagaataccaagaaaacctaattttacactgaaccaaaatcttgtgtgcccttcttaagtgtaagaacatctcaacttaaaaatactatagactcaattcaaatagccctctaagaaccatgtcaactggttcatggagttgcaacggtggtgaaacccagtgcataagcagttccgtactcacaggctgggatgcctctggagcatgctctgatatttgatagctgcctccaggaccaagggatgtcttttttctgtcttttctctgaagagacaagtagaacactgatttgtgcccaagctttcacttttggattgtaaagagaagttctcttctaccttattaggagttagtaattgttctgtcagctttttctaagttgtcatctaagtcattaaggcatttttaagtgaattctgtgaggtatttttagtcaggtatttactataattttcatccttacatgggctttggaatcagccacgcctgagtttaagtcctatctctgctatttactaagacagattaacttctcttgaaccttggttttccagtctgtaacatggcactcttggattgcagggaaaatttaaagtgcaaaagtggcacttaggctctcaatacattctcttctgtgcttcttctaggagtgggggtggtcctagaagggaacaggctgactgataaagccaatttcccttagagggaacttacattttaaagggagagatgggaacgactcttccccacatgtacctaagtgcaccctttagggtcaggtgcgtttaggtaagagttcaggctaggccagaaaagggggctcaggactcaagctctggcaccactactcacctcccaggccaggggaggcatgtgggaggtgcttcgagtgtgcactcagcccttgctcatgtccctgtgcccactctcccatccttttcctaaacttcctccctctaacaccccaaaatggttgacagaccaaagaagtcaggaatccaacttagactctggaatagactctggacttcagtttgctatctttgagtacaagtagggtaggttaaaacaaaagcaaaaacctagtctcctcagaaaccaccaccaccacctcctcctttgaatcagttcaataagcagaatctttggcttccccagaatgacatgtggtaaaaggtaagtttgtagtgagaggcccgtaactgttattacctttacaaaaagtattttgttaaaagagacccccgtccccacacttcccttgtactttctttttaaaaattatgaaagacaggggccaggcatggtggctcacgcctgtaatctcagcactttgggaggctgaggcaggcagatcacctgaggtcaggagttcaagacctgcctggccaacacggtgaaactctgtctctattaaaaaatacaaaaatgggtcaggcgcggtgggttacacctgtaatcccagcactttgggaggccgaggcaggcggatcacgaggtcgggagatcgagaccatcctggctaacacagcgaaaccccgtctccactaaaaatacaaaaaattagccaggcgtggtggcaacgcctgtagtcccagctactcggggctgaggcagaagaatggcgtgaaccagggaggcagagcttgcagtgagctgagattgtgccactgcactccagcccgggcaacagagcaagactgtgtctccacaaaaaaaaaaaaaaaaaaaagaaagaaaaatacaaaaattagctgggctggtggtgtgtgcacgtagtcccagctacttgggaggctgaggcagaattgtctgaacctgggaggcagaagttgcagtgagccgcgatcgcaccactgcactccaccttgggtgacagagtgagactccctctcaaaaaaaaaaaaaaattaccaaagacatgacagttatcaccttatagtaaaaaatgtaattattaaaaatcttttcccccagcctgggcaacatagcaaaaccccatctctattaaaaacattaaaaattagctgggtgtggtggcatgtgcctgtagtcccagctacttgggaggttcaggtgggaggatcacctgcccaggaagtcaaggctgcagtaagccatgattgctccactgcactctagcctgggtgacagagtaagaccctgtctcaaaaaaaaaaaaaaaaaaaaaagaaaaaaaaatcctatccctagatgtagaagaggatatttagagctcttttaaaaaaaaattagagaaagggtctatgttgcccaggatagaatgcaggggatagtcacaggggcgatcattgcatacaccacattccaggcttggaagctcttttctttaaacctgctggagaatcccatggcccaggactgcaggttcaactaaagatcctacagtggcatcaatcttatatttttgacaacctcctatttcatgttcattgctgtaagttctctaaggctatgaatttacacatttctgttaagcactgtaatgccaagtcacacgggcatccagtgacacaaagtctagcaggggctcttgaatatagggtgtcatatcttggtagactgaaggcatggtgcaggacagttgagtacacttacctgaccattccctatgtccaagcacatgtgcagcttcgactcgcctctgtgataacgatagacatgggttgcccctccttcctctggcacagatgaataatatttctagagacgtaatgtcaaagatgttagctaaccaaattgtcttgtcaaattttcaaaaaaccctgatatttgggcaaagtgcagttaaggagggaggcaagagagcaaaggtgaattacctgccctcttgacaggcctctgaagtcatgcaacaaaccttagcccacccaaagtggctgcagagaaagaaatgcatttggcatccccgtgctgccacctgctgcctccatagggcaagaacgctggctaactaaaggtgggcaggaccatgctctctgccaggttaaacaaatttcacatctttgcccccatgtccaatgcacatatcctttcatttcctcccctaaaaaatgtggatgaacggttccatgtttattgtctaagtctcagaccaggacacgggaagagaggggtacattttcctgagatttagaaacacagcaggaaatgaaacaaacccaagagctgctctgcagcccttttctctgtgcttcctgcgcgtgggggagtggagggagaagtctctaatttaagaagaatcttccgaaagatcggaaaacagttacatttctcttgtctgcttccttcctccccctcaaagttagccttagacttgcccttgataatgactaatgacatcacagccctgcttgttttgaacagggtaggcacactgtctaaaaaacatgtgaccagaagaacgagaagctggggaaagcacttgaggacacagacctaaagatgtgttttagtggctgcttcaaactgtggagacaaacccagtacacaattcttaattctatctctagaaagccaagaggttctgaggctccatttcataacagagacttgaactgaagcatgaactgaaaacaaaaatgaagaacagcaatttgctaaacctcaaaccaaagacaaatattattccttttgctgaaccatgaaccaagggtttaatcactttacagtagagttgaggctattgatttttgtaaaaccactgaacaacacaaataagataaaaatattccctgaagtattcctctttggttggaatcctattcttggagtcagggattcttataaaagatgtagaaagattagagttttttgagatcttaacatatgaaactgaaaagcagggcagaaacaaggtattctcttccatctcctttgtggatcagcctccttaaaaccatgtaggactcaccaagtgttaagactgcatgaggccagagcctgctgtaattcctagaagacagtgccttccatgcaggtaatttccttgaatgttttctggcctgccctcaacattccctaagtatcgaaagatgacttggctgggtatggtggctcaagcctgtaatcccagcactttgggaggtcaagatgcgcggatccctcgaggtcaggcgttccagagcagcctggccaacatggtgaagccctgtctctactaaaaatacaaaaattagccaggcatggtggcatgtgcctgtagtcccagctactcgggaggctgaggcaggagaatcgcttgaaccaggaggccaggaggtaggggttgcagtgagccgagactgagccactgcacaccagcctgggtgatggagtgagactctgtctcaattaaaaaaaaaaaaaaaaggtcgggcacggtggctcacacctgtaatcccagcactttgggaggctgaggcgggcggatcacgaggtcaggagatggagaccatcctgggtaacacagtgaaaccccgtctctactaaaaatacaaaaaaaaaaattagctgggcgtggtggtgggcgcctgtagtcccagctactagggaggctgaggcaggagaatggtgtgaacccaggagggagagcttgcagtgagccgagatcgcaccactgcactccagcctgtgccacagagcaagcctctgtctcaaaaaaaaaaaaaaaaaaaaaaagttaaaaaaaacccctaatatttaacttatttgctatgaaattcggcaaataagctattttccccccactagactgaaagatcactgagggcagaagaccttttctgacttttcattgctatattgtcagctacagggttaggcattcaataaacatttattgggtgaattctaacttggatttaccccctggtttaagtccttgactgattacaatctgaccgtgaaggctgggcaggagaaacaggtagtgtccagattctccgtaaattccagaaagatccaaatgtggtccatcagcaggtgatggggcatagctttggttcacaccaacttaccccacactgacttgaagtatagtccatgaattcagccattgttctgaaggaagcactaagggttgggggtctctcttctctctatttgaataaatggcacgtcacaggttagctctaggattccctactggagaatgaagccattttggaaatagtctcctttttacttttggaaaggctctgcaagtttatgtcagaaagaacgatgttattgagaaagaattccaactctaaaagatagacatgcaatttatccaggatctaagagacaggcttgcaggctttcctctattatcagatgatagctgtaagattttttttttttttttttttgagacggaggtttcgctcttgttgcccaggctggagtgcaatggcgcgatctcggctcaccgcgacctccgcctcccgggttcaagcgatttcctgcctcagcctccctagtacctgggattacagacatgcgccaccacgcccggctaattttgtatttttagtagagacgggatttctccatgttggtcaggctgctttcgaactcccgacctcaggtgatccgcccgcctcggcctcccaaagtgctgggattgcaggcatgagccaccgcgcccggctaattttttttttttttttttaagtaaccaaccagggctgaacactaccgttattctacagctacccaacaagaatctgtcaaatgtaaagcgttttgaaaggacttttccattcattgttctgatcctttccagcttccgctaagggaaggtttcctcagctgcttctgcgctgcgcacccctggctcccagcgggctaccgcggcgcgaaggactggggcggcccccggcacagcgaccctcacctctcccgggagaacgcgctgcgggccggctgccggctgtttctctaggtggggcgcctcccgggcaaggacccccatgcagcctttgggacgctccagggcatgccagtccaccgccctcctcttggccctctccagcacttctagagccagctttgctgaacgctgcagggaacgtcggtccaccccattcagcgctgcggccgccaaacagttgtccatggctccctgagtgggcacacaacgtacaaacgccggcgggtcagctgggccgcggcgaccctgctccaaatccgggtgggagccccagcctcgacctccctggagaccaccgctcctggtccgcccccaacgcacactccagcgggagcccagccaggactaggcctagcgcgcccgccccttccattttcatctaccccttccgctacttagggagccccctcacccggctcactcgtcaaggcgcatgcgcgcaacgctatcctaggaagagggaccaggcctagcgctcccggcggcgccggcgcagctgggccattggcggaaggcgggagaggcgggagaggcgggagaagtgggggaggcggggcggctgggcggccaaacacgccttctgcgtcccagccttggcgtctgcgcgcgagttgcctggttaactgctgagcgctggaggcggggcgccaggcgctgggggccgggggtcgggggtcgggggccgggggtcgggggtcgggggtcgggggctgggggctgaggactgagtcgagccagcagcccagggcatctgtccacgctgtcagaggagcctctgggcgtggggctggcccttagagggctactgcgctgcttaacttggtgggtataaaggcaggtctcctgttgagctaaaaaattatggggtaccagctaggtaggcaacatagcgagaacccgtgtagacacacacacacacacacacacacacactagccaggagtggttatggggtaccagctaggtaggcaacatagcgacaacccgtgtccacacacacacacagtaggaggagtggtggcgcgcatctgtagtcccaggtactcgggagggtcgaggtgggaggatcgcttgaacccgggaagcggaggttgcagtgagacgagatcgcgccactgcactccagcctgggcgacagaggaagacttcgtctcaaaacaaaaacatcatggggaataaggcaagtgcctcccgcgcctctttctgcttggtctacattttggggtgtcgctactcttgtttgaggaggtgattaggccaaactgtgtggctgccaaggtggcctttggagaagggaacagctcgggattgaggcgagacggaggcggggctgtctgcagatgttcctggcccccggggcagggggcgcctgagaagttgtagggtctctcataatccctcagcgcagctctctctcccctccagtgggaagtacggattcacatatttttggagacctgttctcttggggtctgactccatcttttaggaagactgcaccatgtttaagtaaggaactgtgaatgcttacttaaaccatgtttaagtaaggacctgtcactccactccgctggttatttggtaggagatacagcccaggctctcactgctaattagtgactcagccgcaccacccagcgcaaagcaaagcgccgatgcttaggaaggtccactttgagggacacgctcagtgggggtcactttaaggaacacaaataaatcctcctttaagtctcctctgtggttcatgaaaaaggagagaaactccatcctcacctagtctcaacagatggcttgatgagcaattatcaggtaccaggtgagtagtagccgaccaatacgacctccttctatgctacttaacttttgcaaatttcctgctttccccttataaaaaagaataacagtgagtgaaaccctacattattcttgagatgatttttttttcattttattggtattccaaaacatttccttcaataagggtttatcaagtgcctcctttagaacatagtggttatacgtgcatggggtcctgtatatccactcgggagagctggtttgaattctggctctgccatctttttttttccatttcttctccttctccttctccttctccttcttcttcctcctcctcctccttcctcttcctcttcttcctcttcttccttcttccttcttcttcttttttgtttaataaagaaacgagggtatcaccctgtcagccaggctgaagtgcagtggcacgatctcggctcactgcagcctcgacctcctgggctcaagcgatcctcttcttcagccaccacgccctgcaaattttttaaatgtttcgtagagacagggtctccctatgttgcccaggctctctgccacttttttgctctgtggttctgggcaaacatattacttctttgagcctcacttttcctcatctctatatctggggattccaatagtactaacttctttagactgagcttcttgagggaagggactgtatctgtagtgtttagagtttaaggtgcatctagtatttactattttgtctgtcacagtaaggactaaaaatagcccttgaatgtgtgaattgggttgccattaggattctgtgagataattcctgtaaaatgcttagcacagtgcccggcaaagataagtgctccatagacttagctagcattagtatgtgccaggcactgccctaggagttgtggagaacagaatgtggatcagactaaaggagaataaaaaagaggaaagaatgcacataaaatctataataccaagaacaaaatattcggacatgccataagattgacacagataaaatgctatcaagcttaggagactatgttcagctgggaggatcaagaaaggttttgcagagaatgtagttttcaagctaggccttgaaggatggcctaggaatcagtgagagaagaggtagataagatacctgttaactgcttttacaataagtgtggttggagtgggacagaatttggtcctctttattttttatggatttcaaggttttagcacattcctcatagggttattgtgaatatcaagtaagttaatatctataaagtgcatttatagtacttggtacatagtaggtgctcaataaatattagctagtattattatcttaagcttcagcctggtctcccaaaatatgctctcacttacccagtatcatagccacacctcatctcatttgtctctcttccccattctattttagtcattccagttgaggcactactttctttttgtcaggtcagctctttgaaacttttcccagtggttcccagttgccacctctgttgccatagccttaaaaaaattttttgtgtgtacttttccaatctaatttaaattatgtgtagttatggtttcttctctcccaatagcctttcaattccttgaaggcagaaactgttccttatttgtccctaaacattccaggacctgttaagtagcgggtgttcagtagccatttgttgaaattactctgatttaatttttaagttaaatagacttctgttagcccacataaagaggtggctttgtggtggctcacacctgtaatcccagaagttcaggaggttgaggtggaaggattacttgaggccaggagtttgacagcagcctgggcaacatagtgagacccctgtctctattttttaaaaaattaaaaaactagcctggcatggtggctcatacctgtagtcctagctactcgggaggttgagatgggaggattgcttgagtccaggatgttgaggctgcagtgagctatgatcgtgccactgccctccagccggggcaacagagtaagaacctatcttaagaaaaaaaagagttggcttttctattaaaaaaacacctacctacatgaactttaatgaatgtaatgaatattcaattgtaactacattttctcagaatttaacatttagaaatttatgggaaagaagatgcttgaaatgaaactgaaaccaaaagactctaaattaaatctttgcatttgtttttatttttctatttgtaaatatatttgtaaatatatttttatatgtgcatatttataattttaaagattcatcctgtaaaccacagattgagagacttgagagattcctttttatcttttttaagattggctgggaataatgatagaacatgacctaccatcaggccccttgtggatcaaatatagcccacgccaaatgaaagccactggtgagaactgaaaatggaattgtaaatggagagagggcaactaattaggaatgtgcctggtcaacagggaaatagactgtcagtattgacagaaaaataaactattgatatgagtttttaatgacttctatcttcacaagggtaaattcactaatgagaacatatgaaagttagttgtcagggttctatgttttggaggagatgcgttggaagaggtctttaattgtgaaatggggaaagagactggtgctgtatttgggactttttgaggagaaaaacaagtccagtgaagagcaatgtaaattccttttctttatgtgaagagggccaaaaagggttaaaaacccaggatgcaaaagtgggtactgtgccagagttagacagtgatttatactgtacataccagaaactgtataaatcattttatttgacaaatggtattgttatttctccagcagacttaagagctttggaatcatcacagctttgtaaggtagtattacagactgagtcattagatcattcattttgcctgattacatcatctcactgggttattgggggaatgaaagaaactcattatcaaaattgtcatcttgatgatgtagattaaagaaaatgaatcaaacttctgagaattaactttcacaatctgtttaaaattgactgggagttaaaaaaattggttgcagagcaggaatgattgaaatcttgtcatttttaaaagtcagagatcaaaggaatagtatttggaagatatttaatataaacagttgaaatttatgtagagtttttttttttttttttttgaagacttcttggctgggcgcggtggctcacacctgtaatcccagcactttgggaggctgagatgggcagatcacgaggccaggagattgagaccatcctggctaacacggtgaaaccccatctctattaaaaatacaaaaaattagctgggcgtggtggcaggagcctgtagtcccaggggaggctgaggcaggagaacggcgtgaacctgagaggcagagcttgcagtgagccaaggtcgcgccactgcaccccagcctgggtgacagagcgagactccatctcaaaaaaaaaaaaaaaaagaaaaaaaagacttctttattgaggtataatgtacatatgataaaatttacctgtcttaagtgtatatttcagtattttttgtaaatttacagagttgtcaacatcaccaaagtgcagttttggaacactgtcattacctgagaaaaatccctagtgtataccatatgcagtcagttctcagctcctgcctctggtcctaggtgaccagtcttctgcttgctgtcttatgaatttgccttttctggacaattcatatagatggaatctgataatatgtgacctttttttgcctggcttcttttaattagcataatgtttttgaggctcacacatgtcgtagcatgtatcaatacttcattcttttttatgactgaatactatcccgttatatgaatatattacattttgtttatccatttactggttgatggtcatctgaaatgtttctggtttggggctattttgactgataatgcatagtaagactttgtgtggacacatgttttcatttctcttgggaatacagacttgagccgccgcacccacaccagatgtatgattcataagtattttctcccaggctgtgtcatgtatttcattttcttagtggtgtaatttgaagtactaacatttaaagttttgatgaactccaacttattaatttttttcctttataaattgtgcttttggtgttatatctaagaaatctttgcctaacctaaggtcatgaaaattttttttgaagattttttctatgtttcctcctaatagttgtatattttagtttttacatttaactctatgccattttgcattaatttttatgtgcattatgaggtaagggtctagattcatttcttttcatgcagatgttcaattttctcagtatcatttgtataaaagactatccttttctcattaaattcccttggcaactttgtcaaaaatcaattcaccataaatgtaagagttagcttttagactttaaattatgttctattgatctatatgtctgtccttatgccatattatactgtattgattattgtagttttgtagtaagtttggaaattgggaagtatatcaactatgttcttcattttcaaaattatttttatattctagtacagtcattatttccataaaatttaaattcagtttgtcaacttctgtgtaacaactgttgatgttttgatagagattatattgaattcacagattaattgaggaagaattgcaatcttaacaatattgggtttttgaatttatgaacatggaatgtctgtccatttatttcagttttctttattttttttactaatattgtgtagtgattagtgtacatattgcacttcttttaacaaatttattaagtatttttatgctgttgtgaatgaaattgttttctcaatttcattttcagatgaaattattactagtgtatagaaatatagttgactttttcatattgatattgtatcctgtaaccttgttaaactcatttacttgttctaagaatttttttgtggattctttaggattttctatatactggatcagatcttctgtgaataaagaaaggctaacttttttcttttcaatcaggacttctttttcttgcctaatcgcactggcttgaacctgtagtacaatgttgaatagaagtggcaaggggaacatctttgccttgttcccaattttagaggcagaacattcagccttttaccattaagtatgatatttgtttttttgtagatactctttattaggttaaggaagttctcatctatctttaaaaattatttttaattagcttcttcaggttgagaagaagtttccttctattcctggtttagtgaaagtttttatcatgaatgatttttgaagtttttcagacgttttttgtatgtccattgatgtgatcatgtggtttttattttttattctattaacatgtgttgaatgaattgatttttggatattaagccaatctttcgttgttgaatttggtttgctagtattttactgaggatttttctgtgtatattcatgagggatattgatctctagttttcttgtttctggtctttgtgtcttttggtattaggataatattggccttatagaatgatttaggaatgttctatttcttggaagagtgtgtagaattggtattattcttaagcatttgattaaaaccatctgggcctgggctttactttgtgggaagatttttaattactaattcaacttttttccttgttttaggtctacttatattttctattccttcttttttttttttttttttttttgagacaaggtctcactcctgttgccaaggctggagtgccgtggcataatcacagctcactacagcctcaactccctgggctcaggtgattctcccaccttagccactcgagtagctgggactacaggcatgcatcaccactaggcccacctaatttttttggtactttttgtagtagagatgtggttttgccatgttgcccaggctggtcttgaactcctgaactcaagtgatcttctattccatcttgagtcagtttcaatacttggtgtctaagaatttgcccagtcacttaagttgtctaatttgttgacaaaaagctattggtaatattccctcacaatcttttttatttctttaagatctgattatggtaatctgtgccttctctctcttgcttttttttttttttttttaacatcttggtcagtctagttaaagttttgtcaacttgtaatatcctttttttttcttttgagacagtctcactctgtcacccaggctggaatgcagtagtgcaatctcagctcactacaatctccgcctcccaggttcaagtgattgattcttctgcctaatccacccaagtaacagggattacaggtgcatgccaccacacccgactaatttttgtatatttagtagagacagggtttcaccatgttggcctatgctggagtgaaactctgtctcaaaaaataaataaataaataaaactttaaaaaatacagatggccaggtgtggtggctcatgcctgtaatcccagcactttgggaagccaaggtgggtggatcatgaggtcaagagatcgagaccatcctgtccaacatggtgaagccccatctctactaaaaatacaaaaattagctgggtgtggtggcgcacgcctgtagtctcagctactcaggaggctgaggcaggagaattgcttgaacctgggaggtggaggttgcagtgagccgagattgcaccactgtgatcaaatgtaaattcagccatctcgataataatgttaaatgtgaatggtctcaacagcccattctgtaagcagagattgtcagactggcttagatccaactgtctgtctacaagaaacacaacttatagtcaaacacacaaataagttgaaagttaaagaaaaagatataccatgtaaactataagcataatattgctggagtaaagaaacagaatcctgcagataccttgattgtagtccagtgaaaaccatttcagacatctgacttccagaaccttaagataataaacttgtgttgctttaagcgactccccttgccaaaaaaagattgctgaagtaaatgtattaacatcagacaaaatagacttgaagacaagaaatatcactagacaaagtggggcatatcagaatcacaaaaatgacaaatcattacatctggaagatatagcacttgcaaatgtacatgaccctaacaacacagcctcaaaataccaaagcaaaaactaacaaaattcaagcaagaaatagacaattcaacagtggtagttggggacttcaacacctcactctttttttttttttttgagatggagtctcactctgtcacctacactggagtgcagtggtgtgatctcagctcactgcagcctctgcctcctgggttcaagtgattctcctgcctcagcctcctgagtagctgggattacaggcgcgtgccaccacacccggctactttttgtatttttaatagagacagggtttcaccgtgttggtcaggctggtcttgaactcctgacctcatgattcgcccacctcagcctcccaaaatgctgggattacaggcatgagccaccgtgcccagcccaatcctcagtcttaataactgatagaacaaacagaaaatcagcaaagatatagaaggctaaacgatactgtcagccaccttgacacctataggaaactccatccaacaatagcacaatacacattcttgtcaaatactcccagaacattctccaaaacagaccattattaggtcataaaacaagtctcaatgaatttaaaaggactgaaatcataccaggtatgttctctacccacaatagaattaaattagaaatcaacaatagacaatttggggaatctacaaatatttgcaaattaaacaacgcataggtaaataatccatgggtcatagactaaatcacaagggaaactaggaaatgttttgaactgaaaggaaacaaagatgtgatatatcaaaatgtatgagaggcagctaaaactgtgattagagggaagtgccaagctttagatgtctatattagaaaagaatataggtcaaatcaataacctaagtttctaccttaagaaactaggagccgggcatgctggctcatgcttgtaatcccagcactttgggaggctgaggtgggcagatcagttgaggtcaggagttcaagaccagcctggccaacatggtgaaaccccgtctctactaaaaatacaaaaattagccagatgtggtggcatgcacctgtaatcccagctactcgggaggctgaggcaggagaatcacttgaacctgggaggtggaggttgcagtgagctgagattgcaccactgcactccagcctgggcaatagagcaagactccatctcaaaaaaaaaaaaagaaaagaaaagaaaagaaaagaaaagaaagaaaaagaaaaactaggaaaagaagaacaaactaaacccaaaggaagcaggaggaagggtataatgatgattaggtagaaatcaataaaatacaaagtagaaaaatagagaaaaatcaatgaaaccaacagttggttctttgaaaagatattaaaatttgggccaggtgtggtggctcacgcctgtaattccagcactttgggaggccaaggtgggcagatcagttaaggtcaggagttcaagaccaaggtttcactcttgttgcctaggctggagtgcaatggcatgatctcggctcactgcaacctctgcctcccagattcaagtgattctcctgcctcagctgctcaagtagctggggttacaggtgcccaccactatgcctggctaatttttttgtatttttagtagagagagggtttcaccatattggccatgctggtcttgaactcctgacctcaggtgatctacccacctcggcctcccaaagtgctgggattacaggcatgagccaccgcacccggcctttaaaaaaattttttagtgattgttctaggaattagaatatgcatctttatttgtcacgatctacttctttctttttttttttttgagacagggtcttgctctgccacccaggctggactgcaatggcgcaagtgtggctcactgttgcctccacctcctaggctcaagtgatccccccaactcaacctcctgagtagctgggaccacaggcacacgccaacacacctggctaatttttttttttttttttgagatggagtctcactctgtcgcccaggctggagtgcagtggcacgaccttgggcactgcaagctccacctcccgggttcatgtcattctcctgcctcagcctcctgagtagctgggactacaggcaccaccaccacacccagctaatttttttttttttttgtatttttagtagagacggggtttcaccgtgttagccaggacagtctcgaactcctgaccttgtgatctacccgcctcggcctcccaaagtgttgggattataggcgtgagccactgtgctgggccaatttttacattttttatagagatggtgtctcatcatgttgcccaggctggcctctaactcctgggctcaaacagtccacccatctcggcctcctaaagtgctgagattacaggtgtgagccaccatgcctggccacaatctactgattgatataaacttaatttaggtgaaatatagacacttctgtccaatataactccatatccccccttctcatgctgttatattacattcatatatgttacagatccaacaagacagtgttacaattattgctttatatgctcttatggcttttaaagaagttatgagaaaaagtgagaaacatatgtatagagtcctttatattaaccaatatatttactatttctgatgttctacattcctctctgtagatttgagtaactctaaaatcactttccatcagcctgaaaaacttccttcagtatttcttgtaaggcaagctggcaacaacaaattttttcagtctttgtttatcaactgtctttatttcaccttcacatttaaaggctataaggctatttttgctggatataaaatttttagttggcagattttttttttcctttaaacactttgatccctgctttcttagtctctgttgtttctgataaaaagtcatctgttaatttgattgtggtttctttgtaaatgatgatccacttttctctgctgcttacaagattttctctttgtgtttgcctttcaacagtttaaccttggtgtttctaggtatggacctctttgtgtttatggtacttggagttcttttgatcttcttggatgtgtagatttgtttttcctcaaatttataaagttttcagccatttttttctgtccctttctctttctcttctttttctgggactctccttatacatatgttagtatgtttggtggtatctctcaaatctctgaggcttgttcatttttcttcattctttttcttttcttttcttcaaattgtataatctctattgatctatctatcttccagtttactgattctttttctgtaatctgaaatttgctcttgagcccctctagtgaattttcatttcaattattttcttttcactccataatttgtttcgttttataatttatttttattgatattctatattgtcactgttgccatactttaatttttaaaattttgttttctttagttctttgaacatatttacaacagctgccttgaagtctgtctgctaagtctaacatttgggcccctacagaaaaagtttccattaactgcacctttttctatatatgggccccactttttgtttgtatgtcttgcaattttttgttgaaaactgaacattttagatcagaggtcaacaatttatttctataaatgactggatagaaaatattttaggctttgtagtcaatgtggtctctattgtaatgtgaaagtagccatagacaatatgtaaatgaatgaaagtagatgtcttccaataaacctttatttaaaaaacaagcagtaggccataattgggccatgagctgtagtttgctgatcgctgttttaaataatgtatgatggcaactccagattctgatttccatccctacctaaggatttttgatattgctgctgtttgttggtttatttgtttagtgagttaacggggttgattctgtagtctttctttcctgtagtgtgtagctactgacatcttttcttaattttttcctttctaattcttgtttttattttattttacttcattttattttattttttatgagatggggtctcactatgttgtgcaggctggactcgaatttctgcgctgaagcagttgtccctcctcagcctcttgagtagctgggactacagatgtgtgctgctgtgcccaatttggttttatttttaaatctctttcctaggaattgcccctgggtcaacatagctagtggtcagctaataactgggaagagattgtacttaaacatcttgagcctagtaaggctctactgtttgctaattaatctgtgtatagtttggggaacacctttaaagttcagtcaaggccatgtggctatggcttatgcctataatcccagtgctttaggaggccatgacaggaagactgcatgataccaacagcttgaggccagcccaggtaacacagcaaggccctgtcttcgcaagaaatttttaaaaaattagctgggcatggtggtgcatgcctgtggtcctaactgtgggaggattgctggagcctaggagttcaaggttatagtgagctgtaattgtgccactgtgctccagcctgagcaaccatgtgagaccctacctctaaaaaaacaagaacaaagaaatagagttcagtcaagtctgccccaattttatttctatgtatgcaaggcttcacattcagccattgaaatctgtagcccactgtggtctctcctgggcatgtgcataaccgtgcccttgtacacagccttccagaccaccaagggtatcaggttccactatggctgtctttttccctagatctgcctattaaatttctggctggtctgttacttttcccaaccaaaactacagtttcagccagcaatgatattgactttccctgatcatttactaccaagatcacatgtttctgacaatgtcctatgcaccaaattacattgcagagctgctgattttcatggattttactgtcctgatagaactactatgttggagctgggggtagggagtgtagggattgcaaaaactcaaaataccatagattcatatttttcttaccaaggttcaatagtttgatttttttcctttataaatgctttttaatttgtcatgtgcctctggttagttagttagtttgtttgtttgagatggtgtcgtgctctgttgcccaggctggagtgcagtggcgcaatctctgcttactgtaacctctgcctcccgggttcaagtgattctcctgcctcagcctccagagtagctgggattacaggcatgcaccaccacacctggctagtttttaaaaaaaaaaaattttttttgtattttttgtagagatgggcttcgccatgttggccaggctggtcttgaactgctgacctcaggtgatccacccgccttggcctcccaaagtgctgggattacaaggcatgagccaccgagcccagtctcagttttcaaaatcctgaaatgattgttttaacagttttgtacagatgttctttgacctaggaaggagttatatcctgataaactcattttaagttgaaaatattgtaagtcaaaaatgcatttaatacacctatctgaaaacatcgtatcttagcatagcctaccttaaacatgttcagaacactcacattagcctaaagttgggcaaaatcatctaacacaaagcctattttataataaagtgttgaatatctcatgtaatttattgaatgctgtactgaaagtgaaaaacagaatggttgtgtgggtattcaacatatggtttccactgaatgtatatagctttcgcaccatcataaagttgaaaaaaccgaagtcaaatctttataagtcagagactacctgtacagttttattgcggctttatgttaaacgatttgccagcctcctcactatgccattctggaagtgttccttgtgtagagttttagtgacctaaaaaaggtcacagtatttcccgacagatccagcagttttcaaaaattaatatattccaattcctgttcccttccaattttatattcctcctaaccttttttgtgatataattctggactctcttaaggcttacttttatatattcttttaggataaagcttatatttattccttccatcaatatttatttatttgttccatggacatttattaaacctcttctgtgcattgatactggaatgtatttccactccaggaagctctaacaagtagagtaggtagccagatctccagggttagtattataccagttctagagaaaattttatatctcctagcttatactaagtttacctaattataattatgggtatactctatttaataaatgtaagttatactgtgattatattactgtttgcattcaagtatttatatccctcagttttgtgacttctttttccagtcatataccataccctccacattttttttccaatttctaaaattgtggtaaaatacacataaaataggccggtcatggtggttcatacctgtaattcgagcaccttgggagccagagatgggaggatctcttgaggccagaagttcaagaccagcctggtcaacatagcggaacccccatctctaaaagaataaacctttctttaacaaaaaataaaaataaaaaataaaaaaacacacaaaataaaatatagttttctaagcatttttaagtgtatacttcagtggtattaaatatattcaaaatgtgcaactatcaccaccatccatctctatacttcttttcatcttgtaaaactgaaactctgtattcgttaaacaataattgtctattcttccctactcccagcccctggaagccaccaatctgtcttctgtctctattattttgactactgtaagtacctcatataagtggactcatacagtatttttcttctcgtgactggcttatttcatttagtataatgtcgtaaagtttcatccatgttgtagtatattgcggaatgtccatccatttttttaaaaattttttttatactttaagttctagggtacatgtgcacaacgtgcaggtttgttacatatgtatacatgtgccatgttggtgtgctgcacccattaactcgtcatttacattaggtatatctcctaatgctatccctcccacccccctaccccacaacaggccctggtgtgtgatgttccccttcctgtgtccaagtgttctcattgttcacttcccacctatgagtgagaacatgcggtgtttggttttttgtctttgtgatagtttgctgagaatgatggtttccagcttcatccgtgtccctacaaaggacatgaactcatccttttttatggctgcatagtattccatggtatatatgtgccacattttcttaatccagtctatcattgatggacatttgggttggttccaagtctttgctattgtgaatagtgccgcaataaacatacgtgtgcatgtgtctttatagcagcatgatttataatcctttgggtatatacccagaaatgggatcactgggtcaaatggtatttctagttctagatccttgaggaattgccacactctcttccacaatgtttgaactagtttacagtcccaccaacagtgtaaaagtgttcctatttctccacatcctctccagcacctgttgtttcctgactttttaatgaccgccattctaattggtgtgagatggtatctcattgtggttttgatttgcatttctctgatggccagtgatggtgagcattttttgatgtgtctgttggctgcataaatgtcttcttttgagaagtgtctgttcatatcctttgcccactttttgatggggttgtttgtttttttcttgtaaatttgttggagttcattgtagattctggatattagccctttgtcagatgagtaggttgcaaaaattttctcccattttgtaggttgcctgttcactctgatggtagtttcttttgctgtgcagaagctctttagtttaattagatcccatttgtcaatttttgcttttgttgccattgcttttggtgttttagatatgaagtccttgcctatgcctatgtcctgaatggtattgcctaagttttcttctagggtttttatggttttaggtcgaacatttaagtctttaatccatcttgaattaatttttgtataaggtgtaaggaagggatccagtttcagttttctacatatggctagcaagttttcccagcaccatttattaaatagggaatcctttccccatttcttgtttttgtcaggttcgtcaaagatcagatggttgtagatgtctggtattatttctgagggctctgttctgttccattggtctagatctctgttttggtaccagtaccatgctgttttggttactgtagccttgtagtatagtttgaagtcaggtagcatgatgcctccagctttgttcttttggcttaggattgacttggcaatgtgggctcttttttggttccatatgaactttaaagtagttttttccaattctgtgaagaaagtcgttggtagcttcatggggatggcattgaatctataaattaccttgggcagtatggccattttcacaatattgattcttcctatccatgagcatggaatgttcttccatttgtttgtgtcctcttttgtttcgttgagcaacggtttgtagttctccttgaagaggtccttcacatcccttgtaagttggattactaggtattttattctctttgaagcagttgtgaatgggagttcactcatgatttggctctctgtttgtctgttattggtgtataagaatgctgtgatttttgcacattgattttgtatcctgagactttgctgaagttgcttatcagcttaaggagattttgggctgagacgatggggttttctaaacatacaatcatgtcatctgcaaacagggacaatttgacttcttcttttcctaattgaataccatttatttctttctcctgcctgattgccctggccagaactttcaacactatgttgaataggagtggtgagagagggcatccctgtcttgtgccggttttcaaagggaatgcttccagtttttgcccattcagtatgatattggctgtgggtttgtcataagtagctcttattattttgagatacgtcccatcaatacctaatttattgagagtttttagcatgaaaggctgttgaattttgtcaaaggccttttctgcatctattgagatagtcatgtggtttttgtctttggttctgtttatatgctggattatgtttattgatttgcgtatgttgaaccagccttgcatccgagggatgaagcccacttgatcatggtggataagcttttcgatgtgctgctggattcggtttgccagtattttactgaggatttttgcattgatgttcactagggatattggtctaaaattctctttttttgttgtgtctctgccaggctttggtatcagaatgatgctggcctcataaaatgggttagggaggattccctctttttctattgattggaatagtttcagaaggaatggtaccagctcctccttgtacctctggtagaattcgactgtgaatccatttggtcctggactttttttggttggtaagctattaattattgcctcaatttcagagcctgttattggtctattcagggattcaacttcttcctagtttagtcttgggagggtgtatgtgtccagaaatttatccatttcttctcgattttctagtttatttgcgtagaggtgtttatagtattctctgatggtagtttgtatttctgtgggatcggtggtgatatcccctttatcattttttattgtgtctatttgattcttctctcttgtcttctttattagtcttgctagtggtctatcaattttgttgatcttttcaaaaaaccagctcctggattcattgattttttgaaggtttttttgtgtctctgtcgccttcagttctgctctgatcttagttatttcttgccttctgctagcttttgaatgtgtttgctcttgcttttctagttcttttaattgtgatgttagggttttagatcaattttagatatttcctgctttctcttgtgggcatttagtgctataagtttccctctgcacactgctttaaatgtgtcccagagactctggtatgttgtgtctttgttctcattggtttcaaacaacatctttatttctgccttcatttcattatgtacccagtagtccttcaggagcaggttgttcagtttccatgtagttgaacggttttgagtgagtttcttaatcctgagttgtagtttgattgctctgtcgtctgagagacagtttgttacaatttctgttcttttacatttgctgaggagtgctttacttccaactatgtggtcaattttcgaataagtgcggtgtggtgctgagaagaaagtatattctgttgatttggggtggagagttctgtagatgtctattaggtccgcttggtgcagagctgagttcaattcctggatatccttgttaactttctgtcccgttgatctgtctaatgttgatagtggggtgttaaagtctcccattattattgtgtgggagtctaaatttctttgtaggtctctaaggacttgttttatgaatctgggtgcttctgtattgggtgcatatatatttaggatagttagctcttcttgttgaattcatccctttaccattatgtaatggccttctttgtctcttttgatctttgttggtttaaagtctgttttatcagagactaggattgcaacccctgcctttttttgttctccatttgcttggtagatcttcctctatccctttatgttgagcctatgtgagtctctgcatgtgagatgggtctcctgaatacagcacactgatgggtcttgactctttatccaatttactagtctgtgtcttttaattggcacatttagcccatttacatttaaagttaatattgttatgtgtgaatttgatcctgccattatgatgttagctggttattttgcctgttagttgatgcagtttcctcgtagcattgatggtctttacaatttggcatgtttttgcagtggctggtaccggttgttcctttccatgtttattgcttccttcaggagctcttgtagggcaggcctggtggtgacaaaatgtcttagcatttgcttgtctgtaaagaattttatttctccttcacttatgaagcttagttggctggatatgaaattctgggttgaaaattcttttctttaagaatgttgaatattggcccccactcttttctggcttgtatagtttctaccaagagatccactgttagtctgatgggcttcactttgagggtaacctgacctttctttctggctgcccttaacattttttccttcatttcaactttggtgaatctgacaattatgtgtcttggagttgctcttctcgaggagtatctttgtggtgttctctgtatttcctgaatttgaatgttggcctgccttgctaggttggggaagttctcctggataatatcctgcagagtgttttccaacttggttccattctccctgtcactttcaggtacaccactcagatgtagatttggtcttttcatgtagtcttatatttcttgaaggctttgttcatttctttttactcttttttctctaaacttctcttctcacttcatttcattaatttgatcttcaatcactgataccctttcttccagttgactgaattggctactgaagcttgtgcattcatcacgtagttctcatgccatggttttcagctccatcaggtcatttaaggacttctctacactggttattctagttagccattcgtctaatcttttttcaaggtttttagcttcttctcgatgggttcaaacttcctcctttagctcagagaagtttgatcatctgaagccttcttctctcaacttgtcaaagtcattctccatccagcttgttctgttgctggcgaggagcttcgttcctttggagggggagatgtgctctgatttttagaattttcagcttttctgctctgttttttccccatctttgtggttttatctacctttggtctttgatgatggtgacgtacatatggggttttggtgtggatgtcctttctgtttgttagttttccttctaacagtcaggaccctcagctgcaggtctgttggagtttgctggaggtccactccagaccctgtttgcctgggtatcagcagtggaggctgcagaacagtgaatattgctgaacagcaaatgttgctgcctgatcgttcccctggaagttttgtctcagaggagtacccagccgtgtgaggtgtcagtccgcccctactggggggtgcctcccagttaggctactcgggggtcagggatccacttgaggaggcagtctgtccattgtcagatctcaaattccgtgcttggagaaccactactctcttcaaagctgccagacagggacatttaagtctgcagaggtttctgctgccttttgtttggctatgccttgcccccagaggtggagtctacagaggcaggcaggcctccttgagctgcggtggactccacccagtttgagcttcctggccgctttgtttacctactcaagcctcagcaatggcaggtgcccctccctgagcctcgctgccaccttgcagtttgatctcagactgctgtgctagcaatgagccaggctccatggacatgggaccctccgagccatgtgcgggatataatctcctgttgtgccgtttgctaagaccattggaaaagtgcagtattagggtgggagtgactgattttccaggtgctgtctgtcacagcttcccttggctaggaaagggaattccctgacccttgcgtttcccgggtgaggcgatgcctcgccctgctttggctcatgttcattgggctgcacccactgtactgcacccactgtctgacaagccccattgagatgaacccggtacctcagttggaaatgcagaaatcacccgtcttctgtgtcgctcatgctgggagctgtagactggagctgttcctattcggccatcttggaaccacctgtccatcctttttaaggctgaataatattctgttgtatgcacataccacatttgcttatccattcatccattgatggacatttttgttgcttccacattttagctattgcaaataatgctgctatgaacatgggtttataaatatctctttgagaccctggtttcaattttttgggtatatacccatggttgaattgctggaacatatggtaattctatttataactttttgcagaatcaccatactgttttccacaatgactataccactttatattcccaccaagagtgtacaagtgttccagtttctccatatcctcaccaacatttgttacttttattttgcctttgttttccttaatggtagccatcctaataggtatgaggtggcatctcattgtagctttgatttgcatttccgtaatgattagtgatgttgagcatcttttcatattgttattggctgtttttgtatcttattttgagaaatgtctattcaagttctctgcccattttcgaattatgttgttttttgttgtcgagttttaggagttctctacatattctggatgttaatcccttatcagatatatgatttggaaatatctctcattctgtgggttgcatttttactctgttgacagtttcctttggtgcccccaaatttttaattttaatgcagtgcaatatatcaattttttcttttgctgcctgtgcctttgtgtcatatcccagaaatgattgccaattcaacgttttgaagctttggccttatgttttcttctaagaattttattgttttaggtcttgcatttaagtctttgattcattttgagttaatttttgtataggcgttaggtaagggtccaagttcattcttgcaacaatggccaccagcctctttctctgcacatctatgatcagaagcagcaatcagcagacagagcacagatcactgacatttgaaggacaagatcctttttgcccatcgtggctccagcaagctgtttcaggaaatgtgtacagctgcctgccatgggggtggtcatgggtagcgtccactacactaagagccgaaattgaccaaaattaaccacaatttaggtccaagccttttcctggaagtcacaaaccttcaatagactctagagttccaaaataattacatcagacagatgctgctgtgcaaatgttgtctagctggggagagacattccagcagcttcctactccaccagaatgctgtctccttctccacattttgtgcagagaacataactggcctccacacaaagtttatttttttctccccatccccagtagtaacgaaggctaagatgttccatttgggagggaggggcagattgggtgtatactggaagtcacagatggtggttgtggatcatggggagggacctcagggttgaggtggctcaaattgttatctgaggtgccttggctaaaggatattatagcaggtagagaggtatgtcaccttttatattactttattcctttgattagggaagttttgctcccctttgtgaccaggcaagactgggcataaggtatgtggggcagaggatccttctagtatgagaaagaagaaagagaagatgtgtggttaggattggagctgaatagaacatgtggctggtggagagagaaaaggtatggaagggctgagtagactttatgcaagacagatttatttggttgacagtagatattatcagttaacacatatattatcatcctttttgcagttaagtaaagtaaaataaggtgaggtaggaggattattttagtaaagatagtagagggattttcaaatccattttctgttatacagtggggagagagggaaaatactagcaaatgtttcaggcaaattgattctaaacctggttctctgactaacttaatctttgactacaaccaaattgtttaacctgcctaagcattattgctagcacttgtgaaatgagatgttagaaaaaaatgaagataatgcaaaatattttgaaaaattatttgctatataaatgtaagaaagctttatcattctataatgccaaaatattaagagctgctgcaaaatgaaaatttattgtaagataaatcttcacaggccgggcgtggtggctcaccgtgctgtaatcccagcactttgggaggccgaggtagatggatcacctgaggttgggagttcaaaaccagcctgaccaacatggagaaaccccatctctactaaaaatacaaaattagccgggtgtggtggcacatgcctgtagtcccagctacttgggaggctgaggcaggagaatcgcttgaacccggtaggtggaggttgcagtgagccaagattgcaccattgcactccagcctgggcaacaagagtgaaactctgtctacactcctgccaaaaaaaaagataaatcttcaccaaaatcatgatgaaaattaatggaacggtaagatttaatttactgcaaaaatccaacagacatgtattgagtacatgtttgttgagccgtgatgttcatgtatgttaaaagtgacggacagaccactgatttaattgtcataaatcctacaggtactatcatctaaaatttctcggtgcccttttctgcttgttgtgtctatgatgctagtttaactcagtacatttgctttataaaaagccagagaaagatgatagtctgtttatctaggttctccaaagcatttcctgccaggcagttgacatgtagccttggcacaatttcaggaaactgtttgcttctgtttaccctttccagatacagcatctcctaagaattgaggtgaggaatctcctttaacttttttacattttagaagtatactttattctaacactttagaatgctcttcatgtaagagcaatgaaaatctttgtgtctttaaattaaaaaggatatgttttagtgcttcactagtagaaaaggcaaagccttaaagcaagttaacctaataagatgtactcagaagaatatttctaggctgggcgtggtggctcacgcctgtaatcccagcactttgggaggctgaggtgggaggattgcttgaccccaggagtttgacaccagcctggacaacatggtgagaccttgtctctacaaaaaaattttaaaaattagcctgatgtggacctgtagtcttagctacatgggaggctgaggcaggaggatcacttgaacctgggaggtcgaggctgcaatgaaccatgattgtaccactgcactccagcctgggtgacagagctgaaactctgttctccccccgaaaaaagttagaaaaaaaaagaatattcctttcctggaatattgttcacattagtctctctttcagaaaattcaatgtaattatagctgaacatacaaaacttattaattatgggatagttgtcaccatttccaaaatccttctttactatgaaaaagaacccaccactgaatttcttcagaatggtatgcttttcttgattcaattataatatttttctttttatataacatttcagaaatattcagttaagtggcatagacattatatttgaaaaataagttactcaacatttttattccttattgggagccaatttgtttctaaatgttttaaatactcattatgtagttagaaatgcaggaatgtattatagctttattgcactcccagagtacatgttaattaagtatgcataaatatatctttgagagaatgtggtggcaaatgtattaatttagagattgaaagcttgaggtgtggaaagatataataacaatgcacatactacagttaattgtgagcaaatttatatcctttctgcatattgttgtcacataaactaatcatctcttaattactttgtccttccagaatgaattaaaaaagattctataattttagccagcactagacctataggcagccgtgggtggggaagcaggataagaaactgtgatgagactgatatgcatggcatgggacaggtggcaagagaataatttagtttgtgatcaggcctaggcctggggtcaggaaccagataagcatttcagattggtagcatatctgtgacccaagattacaacaaggccatggatcagagccaaatggcctctgaatggcaaggatcatggcaaggaacaggtcagagacaaagcggaggaggttgtcacacaggtaccaatgggattggtagatggggaagaatgagcaaatatccagagttgggagtctcaaagttaagttctgccgttagaaaatggccccttagtacttctggacaacatagatctcttcccatcttcctttcctctctttacaaggtttcagacttagttggaagacatgactctggctttaacacactgatattgaagacttatgggctgagatgaatggctccctgtttaagagaatcagaagtcaacatagcttgcagagtaggtctagagagttctgccttaaagggtggagtaataaagccaaaggattcagcaaaccaagggtcatcattggtaccatgcatgaagagttatcttcatcttgtgaaattggtgactttgctccattctgtgacttatctctgttttgaaaccatattaactcctaggctgcctggtcctgtaaccatcgatcactgaatgactgccttaacccaatcctgtaaacctaccacaacttaattcttagaatttctagctgaatatactagaggaaataaagaataggaaatctaaatcagatgtggtggctcgtgcctacactctcagctacttgggaggcagaggtgggaagattgcttgagcccaggagtttgaggctgcagtgagctatgcttgcaccactgaactccagcttggatgacagatcctgtctcaaaaaaacaaaaaacaacaacaacaacaaaaaaacaaaggaagtccgaagaggattttttttttttttctgttagtagactagtattagtatccttttagggactgaccccatccccaccttcactgaattgcctgtcatggagaaagcccttaataaatgttggttgaatcgtgaattagagggtcttcaagtgatcaaagtaactgaatgaaaggagtgagagagcaacttctgacacaggcatagagcctgaatgcattttgaagatgtgagagagatggaactgtatctctatagaggaaaatctaagaagtcaactaagatacaaagaaattactgacctagccaaggctatagaaccattgagggcagtactggaaagaatggggtgtcttcatttctagatttcatgctgtgcacactaaacaaatggtttgtaaagattcaaaacatcgcttaagtcagccaaaaatgtttttctattaatctaaagtttgagtaagtgaaattttgaagacgatggtatctaattgataacttccttactccttaacctgtagataatctccctttttaaagtgctcattacagtagtgattatgtagagaaaaagcttctgatgaaaatgtggtataaaattgtattctttgttcagcaagttaaaacaagctggtctgtaagcaattattatcttcatcaaatttcctagctctaatgttttggcttcataggcccagcacgtatgccttctcaaacaattggatggttttaaaacacttatgagatgtttgtgcttatatcttaacatagcatcagttcaacaagaaaaagaaaaagaaaatgtaagatttggcattagggcttagtttgaaaaagaaaatcaaaccaaactaaagaaaacaaaaagcccctaatgacacttaatccctgcataggaatgaacattcttcattcagcttcataatgcccttagtagcagtgctctagttaagagttcagaagtgtctttcttttcttcactctttaatcacttgacatttttggaaaagaaatttatcagaatgcttgttggctaaccactattaatatttttatatgggtcatatattctaaagagatctctttttgccttttctttggttttatttgtagttatcccaaatgaaaacaacaacaaaatgtgttctgtattctaagagctgttcaggtacccatctgggtgagcagatgatttaaaactgaattagctttttgaattctgtgcaagtaactctgtgcaagttactatgaagaatgcgcctttgtataagcttgggaatgtttattttaaaaataatatttaaaaattatttgattgattgagacagactctcactctgtcgtccaggctggagtgcagtggtgcaatcacagcttactacagtctcaaccttctaggctcaagagatccttccacctcagcctcccaagtagctgggatcacaggcatgcaccactattcctggctaatttttgtattttttctagagacagggccctgctgtgttgcctaggctgatctccaactgctgggctcaagcagtccactcaccttggcctcccaaagtgctgggatcacaggcatgaaccacagtgcccaaccaaaaaatgataatcttttaaaattaaaaataaccatagatgcattttgaaacttacataatatttttctagtgggttaggtttctggttacattctatgattaattaattattacatagtcaaatatttatactgtatgttcacctgaaattattgtaattcaacagctatttattgagtaacagccatttgctagaggttaaagatggaacttatactgatagataaataacccatgctttcaagaggctcacaatctggcagtcagcagattggctcatggtgagcaatacttatgaacaatggttatgggctatgaagtgagccttgggtgccaagggagagagtaatccattctcccaaggagtaggaagaagtcggagaaggctttattaaaaaggtgacatttgagttgggcctatcagagatgttacctttcataatattttctgggaaataacaagttgtttatgagattggagcataggatgccagaagccagcaatgtaatgtaaagtttgaggtgtctggaacatctaggtgcagatatccacaaggtagttggaagttcaggtctagaaattaaaagagagaagtcggagctagagataatagtttggcaatatcagctaaattgaattgaaaccatgcaagtagataagatgtccaggatgggctgtgtagaagagagccaagaaaaaaaaatccaattaaagagtatacagagaaggagatagtaaatgaaggccagtgaaaaagagtggtcatagagacaggagttgatagagatattaagagaatagagaagttaagtaagaagctcaagatgctctagagaaaaggaacaacaagaacaagactggccgggcatgctggctcacgcctgtaatcccagcgctttgggaggctgaggtgggtggatcggtcacttgaggtcagaagtgcaagaccagcctggccaacgtggtgaaatcctgtctctactaaaaatacaaaaagtagccagccaactgtgatggcaggcgcttgttaatcccagctactcaggaggctgaggcacaagaatcacttgaacccaggaggcagaggttgcagtgggccgagatcatgccactacactccagcctgggtgacagagtgagactgtctcaaaaacaaacaaacaaaaagaacaagacagagcatttggaaattaaaaaatcatagttgaaattttaaaaattgatagaagaatcagaagaaaaaatttacaaaatttcccatacagtagaacaaaaagacagtaagatggacaattaggagatcaaccaaagaggtccaacatagaagtcacaggagttgtagaaagagaaatttgagaaaatatatgggatgaaattattaaaggaacagtacaggaacatttactggaactatagaacatgagcctccagattaaaaaggcccacaagtgccttagaacgatgtttgaaaaagtacccatactaaggcacatcactatgaattttcaggaaaatatcctacaagcttccaaagacataaaaatatatacattatatttcccagctggtaaaaaaaaatttacctcctctgcagcctttcacagaaaaccactggaggagatactcacaaaaatgaaggggaagaacaggaaacaggaagacatgagatgaaggaaacaggagattcaacatgggtaagggtcgttcttcaaaataagtagagtaagcatgcttctgagacaggagatgggggaatgaagatacatttggacatggtaagggaaagttgagggaatttacatttctcctttctcagtggtgaaggcaaggttacctcctgagagtgagtagttggaagttttgggaagagacaggcttgggacagttgctgtggggaacaagaagaggatcgaaatcactaggaataaaaggattgttgagcagtattcagtattaggaggaggtttgtagtgaagcctgtcagttttatttattattttttagagacgaagtcttgctacctctaggagataacacgcgtgaccatagccactgtgacctcgaactcctagcttcaagctatcctcctgcttcaaggcttgtcaattttagaaatgaagatagtttttctgtcaggcagctttagtgctgtttattggagatcactttatcttgagatgctctgaagatgcattttgcaacacaaactgaattattgtcagaaaatgatttatttcttcacagtattgaaatctctattctggaaagctgaggctcttagcaattacatataataaatcacatttggtagtaaaaactacacacacacacacacacacacacacacacacccagttcaaagtgacagcttccagtgcatctgtaacctaggctttttgagctcttaaatattttggctcttcaagtcttgattagttgaaagttgactgatgagtacctaggaggaaggaattaagaagagcatagaatgccaattatcctaaaagaaaaggaaaaaggaagcaaagaaggaaaggagatgtaagagtttgaccttctaggagactgaagatggctctgtcctttgtctgtggtatgtcaaccatgttccccagcataatggaaatgttggggtaggctgctgcttagttagcaatagagtagatgcatgaaaactaccaccaccattctattggtacctaaatgttcaaagtaataactctgactgtacaaaagttaatgtgactaaccttttcataacttactatttcaatcgaaactccctaagcatttatcgttccattattttattagaatgcttatttgaattcactaagcatgtgaatttggtcatctctgactgaagttggtatctcctccttgcctctaacctctagtctagaatttcccataatttttttttcaatcatatgtacctagcatagagactctgattcaggatatctggagatgtcttggaccagagcattgcattttgaaaagcttctcgggtgatttttttttctccagaggacaaatattttattctttaaagaatttataaaggaattggaagatgactacagttctctttgggtgatttttgacatgcaccaaaggttaagagctacttttgtttctagagttattttcctcaaatgcacatcatgtcactcttctcaaaaatattgtctctccacatccttcagaatcaaattcaaattccttcatattgccttcatatccttcctagatctgatcctgtatcagtcaggaggagctaagcttatgctgcaataacagcttctcacatttcagtggcttaagacaatgaggatatttcatacatatccagcatggccagcatggatcagtagggaggtattggtttattcagggatccggtccgctacagtctcacatggctttgggtttatgtggcagagaagagaggcatggacatctcttaccccttcttcaatgctttggcctggaagtgacatgtgtcacttctgctcacagcctgttggctagacaagggttggacagtcacatggccctgcctaactgcacagtgactggaacggtagacttctgtggactgggaagtataacagtgagcattagtgagtctacctttttaaaaaatgtttgaggtgaaatttacacaacataaaaaccattttaaagtgtataattcagtgacattaattatagtcacaatattgtgcaatcatcacttctagttccaaaacattttcaccactctcaaggagctcccatacccactaagcagttacctcccatttctttctcccccggagccctggcaaccatttatcttctgtctctgtggattgatggaatcatacaatatgtgactttctgtgtctggcttctttcacttagcataatgttttcaagtctcactcacattgcatgtatcagaatgttattcctttttatggtcaaataatattccactgtatagatacaccacatttaaaaaatccattcatggctgggcacggtggctcacacctgtaatcccagcactttgggaggctgaggccacctgaggtcaggatttcaagaccagcttggccaacatggtgaaaccccatctctacaaaaatacaaaaattagttggtcatgatggcaggtgcctataatcccagctatttgggaggctgagacaggagaactgcttgaacccaggaggtggaggttgcagtgagctgagatcacgccattgcactccagcctggacgactgagcgagactctgtctccaaaaaaaaaaaaaaaattcattcaattgttgatggacatgattatttctaccttttggtcctgtatatagtgctgctatgaacttttgtgtacaagtagttgaacaattgttttcagttcttttgggtatatacccaggagtggaattgctggtcacatggtaattctatgtttaactttttgaggaaccaccaaactgattcccacttaatttacctttttaacttcctacttcagtcaaatgaggaccagtcactgttcttacagctggtttctcattttcatagcttaggcaattcctttggcttaaaattttctccccttcttttctaatgactgaaatagaaattctgacaatcattgaaggttcagttccaaccctctttctctaaattctagtaagaatctctactagttctgcaaattcccatatttcctcctctttatctcttgtatgctattatttttgagtagttgtttattaatgcctttatcactagattttaaatttgcttacacaacttattacttttattccccccagtgtcaaaaacagttttgtgatgtttaataaatgcttattgaatgaataaacaaatgaataaggagctacagatacaatcgtgatttttttgggggggaactatggatttctgttttgccagtaagatggagaatgacaaaatgatattaaatttcacaagtctggtttcagggatgcatgttgggtaaaattcagtgaattcagtgacaaatatagatcattattttatctggagataattcattaaatctaagactgataccattagaacaaagattggtaactagtgtttcaaatgagtaaatttttagactttaatttcttccaataaaaaattatcttcaggctggttcaagtgcagtgatgtttacaactaattgatgacaaccagttacagatttctttgttccttctctgctcccactgcttcatttgactagtgtttaaaaaaaaaaaaaggccgggcacgatggctcacgcctgtaatcccagcactttgggaggccaaggcgggtggatcacaaggtcaggagattgagaccatcctggctaacatggtgaaaccctgtttctactaaaaatacaaaaaaaattagctgggcatggtggtgggcacctgtagtcccagctactcgggaggctaaggcaggagaatggcatgaacccgggaggtggagcttgcagtgagccgagatcgcaccactgcactccagcctgggcaacagagtgagagtccgtctcaaaaaaaaaaaaaaaaaaaaaagtatcttcaagcccatgagagaaggaagaaggatgacttagcaagacagaggagtgaggggaccatccaggttggatgagcctttctgagcttgtctcctgtccgtctaaaggccacctgacatctctcatttactctcagatccagcctgcccagcatcagcagtcaagctgccttattactttcttttcttttctttctttcttttttttttttttgagacggaatcttgctctgtcgcccaggctgatgtgcagtggcacaatcttggctcactgcaacctctgcctccggagttcaagcaattctccctgtcttagcttcccaagtagctgggattacaggtgctcgctaccatgcttggctaatttttgtattttttagaagagacggggtttcaccatgttggccaggctggtcttgaactcctgacctcaggtgataggcccaccttggcctcccaaagtgctgggattacaggcatgagcccctgtactttatctaaatgagtattagacagcttgctatctggaacaaaaccccaaacaacatagcaggataaaatcaaataaatggattggagtgaacctttttgtgagctgatatagaaagagaactttgattggatgtatcctgtcttctgtacacttagtagggagggaacaaaaggcactgcatggtatccaaggcaggaaatataatctactataaaaaagacataagtaacacaattcagtttacttattccttatatattttaagaaaatgaataatttatttttaattttatattaaaacctcagtaatacttgaaatccaaatgagatttaccagcttgacaagattaaagtatatatatgtactttagtataatatagagatggggtcttgctatgttgcccaggctggtcttgaactcttgggctcaaacgatcctcctgtctcagcctatcaaagtgctaggattacaggtatgagccaccatgcccggcctatagtatatcttaattcttctcttaagatcttgattaataaccctgtaacttatgttaatgatattaaccaggagtactacatttatttttctcctttaattctgtgtagatctaactaaaataataaagtgttgaatatctcatgtaatttattgaatactgtaccgaaactgaaaaacagaatgctgtatggggactcaacgtatgctttctactgaaggaatattggttttgcaccatggtaaagtcaaaagattgtaagttgaaccaccatatattggggatcatttatatatttttaaactgtttctgaagtttttacctggtgtatatcttacctacatataaaaaattttttttaggtcaaaatgtcagctaggtgtggtggcttatgtctataatcccagcactttgggaggctgaagtgggaggatcacttgaagccaggagtttgagaccagcctgggcaacacagtgagactcctatctctatagaatagagatttttaaaaatctctattttaaaagattagccatgtgttgtggtatgtgcttgtagtcccagccactggggaggctaaggtgggaggctgcagtgagctctgattgtgccactgcactccagcctgggcaacagagactctttctcaaaaaaaataagaatagtaaaattaaaaaaaaaaatcacagtgtcaaaaatttttgcatgcaaattttggtttctgggcttcctactcagtgcaatttagaaaatttagtagttttttttttttttctttgagactgagtctcactctgtagcccaggctggagtgcagtggcgcgatctgggctcactgcaagctctgcctcctggattcacgccattctcctgcctcagcctcccaagtagctgggactacaggtgcccaccaccacgcccggctaattttttgtatctttagtagagacgaggtttcaccgtcttagccaggatggtctccatctcctgaccttgtgatctgccctcctcggcctcccaaagtgctgggattactggcatgagccacggcgcccggcctagaacacttaaagtcatctaggctaaccacctttcccagttgtctgctttagagaaaactggttgtttggatcatgaagcataaataaggccccacagccccaataccttttctttgagacagggtctcactttgccgcccaggctgaagtgcagtggtgcaatcataattcactggagccaggacctcctgggctcaagcaatcctcccacctcaatgtcttgagtagctgggactagaggtgtacataaaccaccatgctcagctaatttttttttttttttaaagactggggtctcactatgttgctcaggctggtctcaaactcgtgagctcaagaggtcctcctgccttgacttcccaaaataatggcattataggaatgagccactgaacccaaccctcactgcccctttaatgaatacatataatattacaggcagagtacctaggaagaaatcattgtttcgtgagtgctagacctgcaaacctgaaaatcttcctagaaaatcttaacccttctgtccttcaaaggaaaaaacaaaacatgccaaagcaaaatccatgaaccagaaaacccagacaactcaccatgcttaagtgcaggatttaaaatagcaaaaggaagtaaagctcatctttgtgatgtcaagttctattttggtatataacaaagtagttgaattataaggctctcaaggttaaaatattaaacagacccttagctacaagatgtgttgccaggcatctgtatggaatataaccatgtaatcagggcatattgtacttctctgcacaaagagaaccaaagctactgcttctaaagattaggaaactttcattagactgacagaagaccgtacagaggaaatggcttgcgggtggaggagacgtatgagagaggatgaaaggaacagtattcataactatccaaattagagccaggatgtttatgctcaaatcttgtcttggctctgtgttgatgggactgaataatggaacatgggaaagtatatctcagacccctaaattaggcagtaaatttaccaaattcctcctacaagcgcttcctattttcagcagtctctgcacatttctcaatatatgctgtgattaaagtccaaagctggctaatgctaatgatcccttcctcttttttgttgctagtatccttccatggcgatttcattctgttgtttataagtcacatgtctctacaacaggattgtaaccttatgaggagtgtttttatttatctttcatttattcagacagcatatatttactgtgcgcttatttcatgctgggcactgtgctaggcagataggatgtaattattagcaagacaggctaggttgctgtcctcaaagagcttgccatctcttatacatagtcgaccttgtttgtcaagtgatgtgaacattacgttaacgcaaattactaaattactactatttaaaatatagcattaacaccatttctgatgtcagtgtctctaataaatatttggccagtattaagatgaactaatagtcacatatatgaagtttagactcaaggctatatttagactatatttagacaatttaagggatgttaacttttctttctgagagagcagatctaatgaagtttttttcctaagaattaaaacagttccatgcataacttacaatggaattggccaacaaaaagaacaagtatttatatctaattattgccctcttacattgcttcagcacatataagaggcagcagcagcagctgccaatgatgaaaataattattgtcctgggtctgattagagaaaatcttgatgctgtctgttgagttgtctttccttagagatgttacaagaaaaacgggactttagtagtagaggttctaatagttttgaaagtgggagacttaagaacctccttacagagctcagagagctgcaggtagaatttacctggaggctggctaaattctgtggcttgcctttacattcatgagttctcttgttccacgtttggggcagaaccatcctaatttgagattggagagattggaaaagactggagagggctaagttcatccaaatatggcccaggtctcctgaggtgttcaagcacttcagtgaactagagtagaaactcacttagattgtgagtttggagaaaaacttgttctgattaaagtaaaactgttctgatttttggagtaaaacctgtgctgatttttggcctttgtgttttcaatgtgcctcaacaacagctgaaatcttgggctttcctaatgtagaagcaactcaacgaggaattgatttatttttcatgcgcagactgcatcacaccgcatataaggccttctgctagaaaggccaaactgtcctttggcctcagtattttggagacaaagagttaatactagtaattcctgtgtaatatccttttttggcaaaggaacagtagactttatcagtttggttcttgccattacttgtgttcgatcttgaccaagttaaattatttccaggatgtatctttttttttcttttttttttttttttttagacggagtctcactctgttgcccaggctggaatgcagtggtgcgatcttggcttactgcaatctctgcctcctgggttcaagggattctcctgcctcaaggctccctagtagctgagattacaggcgcctgccaccactcctgctaactttcgtatttttagtagagatggggtttcaccatgttggccaggctggtcttgaactcttgacctgaagtgatccgcccaccttggcctccaaagtgctgggattacaggcctgagccaccgcgcccggcctcaggatgtatcttaaactcattatttttgatgcttgccctgcagctgagtaaatacctctttaggatatgtgacaattgaactggcttggattttggaacatgtcctggccttggagcctgcttatgttcatacacactggttccttagaaatgtaaatttgtaaagtcaatgtaaaactgaaacttcaaaagtcaattttcattgctgctgttgtgcatttctattatcaaattttatttacagtgatttacgtgagtaaaaaatggattacacgatttcctaacatctcactaagtatgggtttggatcttaagtaatttacatttttcttttccaagttgattgttatactgggctaatgatttccttcaaattccactaataaatcacagattctcagtgctgttattccattgctttattattaaatggcacccttttctagtttttggttttgcaaaccagtggagtatttaaagtaaaatttcagaatcccttttggagctttcggttgagaccaggctccttggaaccctagtgctttgggagttctgctactgctgcagtaccaaaagtagcttctttgaatttcatttgggttttgtagggctcccccgaggcccgagaactgggagaagggaaagagctcatcggtttgtttgaaggccggcgggcggtgcaggcagcttttcccagactctcccagctccggcttttcacgcataccagaagagccgcttttttcctccagtgattgaaaccatctggactccaggggggtcacgtgtgtatgagaaaatgacataaagtttcagaccccgttgtgctttgctccagacccagacaactcttggtcggatggtgaggaggtgagggccgtccagtttgggggccaacttctcctccctgctgcccccggcccccgcctccctcacccctgtcccccaccctccctcgcacactctcggcgcggctttctcgctgcctccggcgcctccgagcgctcccctccgccgggctccagcagcccaccctctctgtcttgggtggaggcgcacatcctccacgccccctccactcaaatctgcgctccctcccctctctctccctgcagcccggccgcagcccggggcgcggatgcctgcccgccgcccgccctctctgcaggagcggctcctcctccgggccgcgcggctcccggcgagaccccatccaggcgccgcgcccggcccggctggggaacgcagaggtaagcgcctccgggccgggtggccccggttcccgcgtgcgcgcccggtcccgcccctgccctcccagcccttttccctctgctcccgactcccggccccggcagcggtgtccagctccgtgagtacgcgcgtgggggccgccgcaggcgcagaggagcggggctggtggggtccgccctcccgggcggtcagtagccgccggctctgctttccggcccggcgggggccgcgcggttgggggtggggaacctcgcggccagagtccggcggtgaagagctgcctggtgccgagcggagacccgatctcgggacgtcctgggagctggctctgcgcaccgccttgcctctcggtggcggcattcgagctcctacctggagctgttgcagcttgtatgcaggctccttgaagaacgcgcgcgcgcgcgcgcacacacacacacacatacacacgcacaacacacacagacacacggaactcaaacaaaggaaaattaactttgcatgctattactgcaacaagttaaactatgtttatttgtggatggttcactttttgcccttgtgcagacacgcactaagtattaaagggtccacactctagtcaacgtttatggcacgttatccaataatttagtaactgagtagagttcaagagacaatgttttcaagtgtttctaaagagggcttattgcattttcctgggatctttatatgaaagtagttgatgattaatatgaataaaataacttcttcattaagtgagaaaatttgccttagtacagccttagtccagctcttgcttttattaccaaccaggtgtttctgctgtttggatagcagggtcttgggaatggcaaagaggtcattatcccatctgcaagactgttttcagctacctcttagctgcacacactgcaactggccattttgggatggggccacagggttaaaacccaaagggctgcattgttttgttttaatatttttcagaaggtgaatcccttaattgattttttttttgccagaattaggggtttctaaaaggttagacgtaatctggggtccagaaagctaatccaagatagagactgaattgttcacagcctatctcccttgctgaattaaggaccgcacaaggccagaactcaagaagagcctgttgaatgcatgaagtgaaggcttcttaaattctgctggtctggcagagagttcctaggtgactaacatagatgtaaccctcctttttatttatctggcatatattttttatttaaaaaatttttttctttttttttttcgagacggagtctctctctgtccctggagtgcagtggcgcaatctcggctcactgcaacccccgcctcctgggttcaagcaattctcctgcctcagcctcccgagtagctgggattataggcgcctgccactacgtctggctaatttttgtatttttagtagagatggggttccccatgttggccaggctggtctcaaagtcctgatttgaggtgatccacccgcctgggcctcccaaagtgctggaattacaggcgtgagccactgggcccaggctatctggcaaatattacctttggaaaaactccccaagatagggggaagaaaaattgttcaagtgtatgtatgggaaatgttatcccctaattgggccagaagggcacccattttggtagacaactccaaggcaactcttaccttaaaagtatttttttactgaacgcttagattggattggcttggtaattagggaaatccttggtcttgagtttgtggactccttggggaaagagaagtgacatttgagtgaaggataatttcagatcaattggcttagaacaggaatgtccaatcttttggcttcccggggtcacactggaagaagaatcgtctggggccgcatgtaaaatacactaactctaaggatagctgatgagcttaaaataaatcgcataaaaaatcataatatttttaaaagtttacgaatttgtgttgggccacactcagagccgtcctgggcggcccatgggccgcaggttggacaaacttggcttagaatctaagaattataaagctcaaggagaaaatgattctgaggcagggcggtttcatagaagaggggagagccttgaagcaaagtatgcttctgaaactggtggagagttgctggggaaagctttcaagagaatggagagcagaccatttggactggacctagagagaaaagtaatagcatctgctctatgccacctgccagctctctccttcatccttcagtgttgtgacataggtattgttgctcttgttttaaagatgagggaattcttgtttttaaaaagacaagatcaaaaagatacgtaactggcttgggatgacacaagtggtaaagtggcagagctggaattccaatgcctggctctcagactaacatgggtgctttcacagctgccttctccaaagagcagtgggaggtccagtggaagccgaactgtggtcaggttgaattctggctcaagggctggaactttatcctgtagacattgtttaggttttaaagatttttgagaaaaggagctatgggtaaagcagtgattttagaagattaaggtgacatctatgtacaggaatgtgacatgctcatcacaagtcatgtgcaagtcataatttctaatgaggaggttcaaaaaggaaatgtagccaggatatctgggtgtttcaattcctgtctcacttactgtaccctgcagcgagtagcttggttcactgggtaaagagctagttggagtgaccacggggctgctctggatcagaaaagagctgaatcttaccaggcatatgctgaaatggaatgtgtgtgtggatcaatgccactgctggtttgtcctttatgttcccccatgtttcgcaatgctttggtttttttctttcatgactaccctgagaggtagatcaatgttgtaatttgtttaaaagcttttcctcgccctaaacatcttaggtaagttgatgtgccttttcctctcatattctcttatttcttaaaaatgctgaattttggccaggtgctgtggctcacacctgtaatcccagcattttgggaggcagaggcaggcagattgcttgagctcaggagttggagaccagcctgggcaacatggtgaaaccctgtctctacaaaaaatacaaaaattaatcatgcatggtggcatgtgcctgtggtcccaactattcaggaggctaaggtgggaggatcgatcacttgagcccaggaggttgaggctgcagtaagccatgatcatgccactgcactgcagcctgagtgacagagtgagaccctgtctcaaaaaaaaaaaaaaaaaaaaaaaaagctgaattttaaaacttggtactagtaaggtaaaagtgaatttagattacctttcttaattatgagaaagattaacataaaatatacatttatttcactttgtgttatggaggaaaaacaggaggcctttgtagagttcctgcgtggggatttagaagggataggaaagccaggatttagagatgtgcaaaggtcttcctacccctccacatttcttaccagttaatcgtattgttcatgtatacagcttatggagcttataaggacattggacacccacatttatagccaggccctttgattctcggcagataatgggctcaggaagggcagcagtgggtggagacattttactagaattagtctgccgctttgaatacaatctggatttcttgctatttcttgtgcaacctgtacgccgtttcctctgaacttgctagtgctctggagacttggttgtttggccaaggaatatcccctagcaggagggctcactaaggaggggcagcttgacaggcagaaaagtgatgtttgtcaactaaagaagttttcttttaattaatgttagagtcacccatggttttttgtcaaataaaaaatgcgaaatcaaaatatgatctcggttctccacacccatttttacctttaagagcctctcacaccttggagagcttgccttactgaatggggttttgataggtgaaattatcaccaggacctctacatgggtcaggatatgactcagtttgggttttggacctctgaggaatgtgacccctcttagtgtaggggatttggagtacaaaaacctgggttaaagttccagctttgccatttattcagaagttcctggaatttgatgtttgagagatctctgagctcagttttcctagttcttctagatcagggtaatcccttagggccagatagaggtggtcacaccctgattagcaccttggttccttctcccagtttgtattttgtgtcacctgaaagtcattttattttctctgtagcctctggttataggttatgtggtcattcctccagagaatggcaaagctcattgttggttggggatcatttggtatgtcttcccgggagaatgctcttgaacctagttttgagagttggggcctcaagaagagactttggcaatgcccttatttaaatgtcagaaatgtttggttgcatttttgatgcattgcttacatagttaatgtttttgtatttggtacttgtcattttaataatttattaaacaggtgatttaggttttctaagatagctaagagcttagaaaaataggactgcaggtcgggtgcggtggctcacgcctgtaatcccagcactttgggaggccgaggcaggcggatcacaaggtcaggaggtcgagaccatcctggctaacacggtgaaaccccgtctctactaaaaatacaaaaaattagctgggcgtggtggcgggcacctgtagtcccagctgctggggaggctgaggcaggagaatggcgtgaacccgggaggcggaggttgcagtgagccgagatcgcgccactgcactccagcctgggcgacagagcgagactccgtctcaaaataaaagaaaaaaaaagaaaaagaaaaatagggctgcaatatcctctttaaaaatagtctaaattattttttagtggggatggcatttggacaattccccaggactggaatatccctttgatactcagatgtaatctcctagtatggtagaactttgactattttgacctcctccacctccaaatatccttaaatctttctgaagagatttaatctctctttttttttttttttttttttttttgagacagagtctcgctctgtcgcccaggctggagtgcagtggcacaatctcggctcactgcaagctccgcttcccaggttcacgccattctcctgcctcagcctcccgagtagctgggactacaggcgcccgccaccgcgcccggctaattttttgtatttttagtagagacggggtttcaccttgttagccaggatggtctcgatctcctgacctcatgatccacccgcctcggcctcccaaagtgctgggattacaggcgtgagccaccgcgcccggccgagatttaatctctcttaaagagatctcacaatttccctgggaaacactttctaaggaaggtttccagattgatgatcacagattatctccttgtagttagcttttcttttaatgtttcctacttttactgttttcctgtccctcttcaatgcacacatgttcacagagtgaacaaattgtctttcctggactccaaaggcagctaccaaatgtacagactgtcccatctgtacccatcctttccttcccttcctctggctaaacaagctgagctttctctgttttccttaacaagtctctctttttagacctatgattatacttgttgctttgtgttttgttttatgcaggaagttcatatcagatatgttggcaattagagctttcaaactggaaggagccttttggagtaaaatatatatatttttttctatcagcataagtaattgtggaatatatgtaaactctggagatgatcttttaaaaaaattaccatcaaaagaattttactcaagtcctttaagggcttaagaagaatccagcctttgcgagattgcactaaaagtaacagattagcccaattaaggcctatctagaagtctgggaatcatttgtttaaactggaatttaggatctccatgcaaatataatatgatagaaataatctgcttaaccctttgttagtagcattagaaataagcccctttttatgggactcttaatgataaaaggtcatagtaattagaatatgctgggaatttgtccctgtttgttaatgttttggaaactcctttgagtaggcaggggtcactttgggtggcttttttctttctttgatgtgaagttgggatcttggatgtaaatttagccaagggcaagtttgaatttagattttttaaattttttccgtcttgttccattcttccttttggaggcggctaactagagtggggtaaaaagtgcctttaatcagagtcagtgtcctgagactgtcagacactggtctctgggaagtgctctgtatcactatcatttatatacttttcctttcttgtgtcctacagtttttgaatatctcctgcggaaaaagcactggggtgtgtacgggcatctgtttattctcttattacctttcttcagtgaatatgcttaatgttaggggtttgatgaatcaatgagtggatgaagttaagaaattagatggaggccaggcctggtggctaacacctgtaatcccagcactttgggaggccaaattgggaggattgcttgaagccaggagtttgagacctgcctgggcaacacagtgagactctgtccttatgaaaaaaatacaaaaattagccgagcgtggcggtgcgtgtctgtggtcccagctaaacggtgggctgagatgggaggattgcttgatcctgggaggtcaaggctgcagggagccgagattgtgtcactacactccagcctgagcaacagagtgagcccctgagtgaaaataacaacaacaacaaaagaaattggatgggaaattagttttggatatgagtgttgggtacctcctgatccaaatattgctgttgggaagcaactgtttttacaacactctggtctctggaagctgagatgacctctgttaaggctcatcatgtggggatatattttctagtgagtaaacagggcctagtcagttattttttctattagtcatgttggattacatttactgttgccgggaactctagttagcataatatccccttgaattaggaagtgccactcaatagctgtctttctccaggactgcctggagaagcttttcttgaaagtctggtcttgcctcttgagccagggatgagtgcattctaagtacttagacccaaaaggcttcttctactgggtccaagtcccaggggaatggaaattctcttgaaaatagtataattgtatgggaggggaatcaaagctttgtacttttcagtagtcactcgaatctgtacatagatacctggagataaagaaaacccaacttgcaaatgagtatttggtgctgtgggttaacatggaaaaatggcacttaaggtcaaagtatattaattgaatccttcttgtccagttaatcagcaatatcagttgtgaggattccgttttgctatttttcccccatttgtatattgacaggtcactcttttgaattagaatagcactcaggaccacagtgtttgcataggaagtggcgtaagaggcaggccgggcgcagtggctgacgcctgtaatcccagcactttaggaggccgaggcgaacggatctcaaggtcaggagatagagaccatcctggctaatatggtgaaaccccttctctactaaaaatacaaaaaaattagccaggcgtggcagcgtgtgcctgtagtcccagctgctggggaggctgaggcaggagaatggtgtgaacctgggaggtggagcttgcagtgagccgagatcgtgccactgcactccagcctgggtgacagagcaagactcggtctcaaaaaaaaaaaaaaaaagaaagtggcgttaagagtcatggggcgtgggtagaggccactttatatcttgtttcagagggccatttaaaattttttttaattaattaatttacttacttatttttagagacggggtccccctatgttgcccagacaggtctcgaactcccaggctcaagcaatcctcccacttttgcctcccaaaatggtaggtttaaagatggaccatttttaaaacctccatgagtagctcagtgatcagaattagctagaaatagctctgccaaaaggtattggcaaaataacatctagcagcctttgtctatttcaggttaggtttgttcaagaaagccaatttgggagcagtatgatgtgcccagctctgtctacatttgagtcgcctacatagttcccatgtatttgtcactatttctggtccctggagggctggggtagatctcaggatatgaggctcagacttggttgaagccacatcaagagctgtggtcctggtcggtcagcgttattttctgcggcttatcacccaggctaggcgtgtgggagcatgggtgggtaggacagggaagaaaaacagaagaccagatagttctgtggaaactgaataaataagtgaaaaagttggccaggcactgtggcactcgcctgtaatcccagcactctgggagcccatggcaggtggatctcttgagctcaggagtttgagaccagcctgggcaacatggtaaacccctatctctacaaaaattagaaaaattagccaggcacagtggcacacacctgtggtcctagctactcaggaggctgagatgggaggatcacctgaggtgatcacctgaggttgagattgcagtgagtcgagactgtggcactgacctccagcctggatgacagagtgagaccctgtctcaaaaaaaaaaaaaaaaaaaaagagtgaaaaagttaatctttttcccctcactgacttggacctttgttctgttggaaacccttatcacttgaggtcattttatttatgtatttatttttaaatgtttcattattattatattttaaaaatatgtattttttatttcaatagcttttgtggtacaagtggtttttgattatatggatgaattgtgtctgaaattttagtgtgccagtcacctgagtagtgtacatggtacccaatatgtagtctttgtaacccttcatctcccctccctccctcccttcctcccccttctgtgtctccataatccattataccactcgatatgcctttgcatacccatagcttagctcccacctataagtgagaacatacagtatttggttttgcattcctgtgttacttcacttagaataatggcctccagctccatccaagttgctgcaaaagacattatttcattctttttttatggctgagtagtattccatggtgtatacataccacattttttaatcactcattggttgatgggcacttaggttggttccgtatctttactgttgtgaattgtgctgcgataaacatatttgtgcaagtatctttttgatataatgactcatcctttgagtagatacccagtagtgcaattgctggattgaatggtagatctatttttagttatttgagaaatctccatactgttttccatagaggttgtactaatttatattcccaccagcagtgtataagcgtttgcttttcaccacatccatgtcaagatctattgttttttgactttttagtaatggctagtctggctggagtaaggtagagtatttcattgtggttttaatttgcatctccctgatgatttgttatgttgagcatttttttcatatatttcgtggctatttgtatatcttcttttcagaaatgtttattcatatcatttgctcggtttttgatgggattgtttttttcttgctgaattatttgagttccttgcagattctaggtatttgttgtttgtcagatgcataatttgcaaatattttctcccattctgcgggttgtctgtttaatggttatttcttttgctgtgcagaagccttttagtttaattagttcccatttatttatttatttttgttgttacattcgcttttggggtcttagtcataaattctttgtctcacccaatgtccagaagagtttttcctaagttttcttttagaatttttatggtttcatgtcttagatctaaatctttgatccgagttaatttttgtatatggtgagtgatagggatccagtttcattcttctgcgtgtggctagccagttttcccagcaccatttattgaatagggtatcttttcccagtttatgtttttgtttgctttgttgaaggttagttggttgtaagtatttggcttatttctgggttctctattctgtttcactggtctgtgtatctacatttataccagtaccattgctgttttgttactatagccttgcagtataagtcaggtaacgtgatgtctacagatttcttctttttgctcaggattgctttggctatttgggctcctttttggttccatatgaaatttagaattgttttttctaatattttcgaaaatgatgttagtatttggataggaattgcattgaatctgtagattgctttgggtagtatgctcattttcatgatattgattctttgatttcatgagcatggggtgtatttctatttgtttgtgtcacctgtggtttctttcagcagcgttttgtagttctccttgtagtgctctttcaccttcttagttaagtatattactaggtattttatttgtttttgaaggtattaaaaaggattgagttattgatttgattctcatcttggtggttgttggtatatagcagtgctactgatttgtgtacgttgattttgtaacctgagactttactgaattcatttatcaaatctaggagtcttttggaggatctaggcatcttttagggttttctaagtgtacaatcatatcattagcaaacagagatagtttgacttcctgttttccaatttggatgccctttatttctttctcttgcttgattgttctggctaggacttcctaaggtcattttataaatattcatagtaactagttgaaggcactgagattcctgtaccttggcgggaagaaccctgctggatgattctctaggtgtttatttgggttatgcccattttctttccctcttttcttcctaagttttgatgctcctgtttttctgggaatattttggcttcattgtttaggcttttttaagggccatggggaattctggggacaggggcaggtgtgacatgttgctaggtatgggaggtttttacagcttgagaaatttccaggaaagaagagacagaaaactttgttcacaaagcatgtggacaggaagtcaggtgggaaaatggcatggcagatggtgtaacttctttggtcagcatgcctgtctctgccaagatgggactgatagggtagtgggggtagtggggcagtgctgaggatataacttataattcacattattccttgaagagaagatggttctttgttttaaaaggaagtatagtgccttacattgatttctttgaaatatacatgatataatccatgaatgagtatttgcaaaacacgtggccgggcgcggtggctcacgcctgtaatcccagcactttgggaggccgaggcgggtggatcacgaggtcaggagattgagaccatcctggctaacatggtgaaaccccgtctctactaaaaaatacaaaaaattagccgggcgcgatggcgggcgcctgtagtcccagctactcgggaggctgaggcaggagaatggcgtgaacccgggaggcggagcttgcagtgagccgagatcgcgccactgcactccagcctgggcgagagagggagactctgtctcaaaaaaacaaacaaacaaacaaacaaaaaaacacgttagtgtttatctaaccctatgccaagcctggtagtagatatacaatacaactgagggaaagtgataacctgaacttagaacatataattgttacctaaagaatgatataaagcagtacatcatcaagctctaaattttgagttattgatacatacagggggtttggagccccagacaaggtttaggacgtgcaggcttatggcaaatcttgggccaaatggaggcctttggagcttttggagcgcccaagggctcagtcttcagcctgtttcttgtctctgtcttcacttttcttaggtgattccctggctttgaagtactagcatttatggaatgtttactggctgccagaggctgttgtaagggttttatgtgcactaatctagccttccagacaaccttataatataggtatttttattatccttgcttaaaggtgtagaaactgagacaagagatggactttcttgagctcacacagcttataagctggagagccaggaaatgacctagtttgggtgaccagccaagccctcgactggttcagaatagccatcctcagctggtcctggctcctctgctcctgtctttgcagtctcttctccacatagcaatgagaatatatatattttttaccctcatatggaatgctatcacacttagaagtacaatgcacatttactaccaagttcttgtgtggtctaagccccagctctcccatctgctcctgccttcctcccatctcttctgtctcatggcctttgcctgctcctaggatgctcttctccttgaatattgctggtttgtcacccagttcatttgagtgtgggctcgagtgtgccacctcagggaggccttctctgcccatcctatgtaaaactgctccgagtcactctttaatcccctcctttctttttcttcctaaaattatattacatatttctgtgtttttcctgtctgctttcccaaataaataaactccatgaagttagggacttgatccatttgtttactgatatctttactttttagaataggacatggaaggttttctttaaatatttgttaaataaatgactaaatggtatcttttgcattcatttgctgttcatgacttcacttgggtaaaaatagtggagaggaaagggaggtacaggtgataactacaggctgggtcctaactggttttatgtttattaccaaggctttgctatcataacatggccaagaaaatgctcagaaatcttggttgaatgaatgcactgtgtaatttgttctggattccacacagaggggacagaatagtgtgggctgaagtgctcagagaaatttcttggaggacctgcagactttgaaggagagattggatttggtcgagcatataggaatcgaagaatacttttttttaaaggtggaagggctatagggtgaactagtccaatctttctgtttatagacaggaaactgagcccagagaggtgtaggacctgcccaaaggcacacaaccagttgatgtcagaaccacgtctggcatccaggtgttttgactcctaatttagttccctttcttctacacagtgctgccttcagaatccaggaggactctgggggttggggagtaaccaggggcagcatgagcaaaggcccagaggcagaaaagatgttggcttgtatgggctggaaataggtggtctattggaatcagcaggtttataaaggagcccatcagagacagaccaggctgaatcagatcctctgggatcttgaatgtcatcttgaagactttgagtttggaatgagtgggaggcatgtgaaaatgctttgactattgttctgtctttctctacagggatggtgacagaatggatagtgtagaaaatggattggaattgaggaggaaactagaagctaagaggagttaggaggcccttgtaataatccaggtattattgctaagggcctagtatcattttagttatttctgtttctgtttttagagatttgtggtggtttttggagaagatgacataaaattatcaggcaatatgtgtatactcagctttctaatagagtttggggataagaaggaggagacctggtattttgccttaattctgtatgcggctataaatgacattttagtatccagatgataattcttctaagaaacctgggccaggttaggacaggagggatacaagataacattatactgatgtgaaaatagtgatggggctaagtgcagtggctcatacctgtaatcccagtgctttggcagactgaggcaggagaattgcttgagcccaggagttctagaccagcctgggtgacatggtgagaccctgtctctgcaaaaagtaaaaaattagctgggcatggtggcacacatctgtagtcctagctactcgggaggctgaggtgggaggattgcttgaggccaggagttcaaggctgcagggagccattattgcaccactgcactctagcctgggtgacagtcaagacctgtctgaagaaagaaaaaaaaaaaaaagaaaatagtgatagagtgaggagagactgaaggaacagacggaaatgaatgggagcagctgcccagagagggcctgggcctgcctttccatcaggggagctgcccaatatagtggttggggagtcaggcatccagggacttccaaccaaccttgcacatttttttttggacacgtgtgaccagtggaagtaaaacctgtctcctgggcccacaaatgctttggacggataagttgtgctcaagcctaggcccattcaggtagtccacatatgttttcaaccagagctgatgagaacagattgatacagcctgtaccaggccagtgaattggcagtgtatgatactttaaaaatttttccatacccagaaatctttttccatctctaacaaaacactttgaaagtcagcataaaagtgagaacacagacttttaaataatatcttctactggatctgaaagttttggatgcaagaaaaaaatcctggatcatttaacattcaatggatatttattgaggagcacttcttaaacaccagatactgtgctgggtactagagcttcagtcttttgatcatattgcatcaaatgttattaatggaacattaacatttgattctatttcatgttaagctcttttagccccaaacgttatacagcttggtccataaaccttcagttggttcagcctgttcacttatgtttgtgttcagttgttgaatgtttatgtgtaacaggcaacatatgttgggtgctcagacagttttgaagatgaacaagaattggagagagttctccaattctctagctggttgactggaatttaccaggtagatctggcagctgtctagtttgctgggattcctcccagaggagagtatagtcagcagcaatgtatcccctttccttattctgtttggattgggcccttccctttgccctttacaccttctccctaatccctgtctttaaatttgagacaaatgaaaattagctcctttgtattaagtttgggcagctccatcaggacagcacttccctgatgatgccctaaagttagaaacccttccaggagaatctctgttgccatgtaatcccaaagaagagccttctcggcgtgctgtttcctccttcctatgaaagttgcttttgcctactgtgtggatacagggtgcacagcacttggtatttctcgggctctttgcatctgcctgctccgttggctcactgtggggatgctggcaggggcatggtgtcttgttttcttagaatgaatgatgcagatgagcagcctctctagatgatgggaaaatttagcatgatccatcatgatccatcaggctaaattttcccgtcatctagagaggctgctgctcagaataaaagagaggaacataagatgggcgcccaagaggagtgctttattgagcctttagattgccagcctgaacgagatagtcttcccctccttgcttggcatctggagccagcttgtacactacacgtttgaggtttgctgttctcttcttttcttttctctcttctctactcttccctccccctcccttcccttttcttttctttctttttcttcttttgagacagagtctccctctgttgcccaggctggaatgcagtggtgtgaacacagctcactgtagccttgaccttctgggctcaagtgatctttccacctcagcctcttgaatagctaggaccactatgtgggccactatgcctggctaattttttcaaaaaaatttttttgtagagaagccgaggcaggcggatcacttgaggccaggagtttgagactagtctgaccaacatggcaaaacccatctctactaaaaatacaaaaattagctgggcgtggtggcacaggcctgtaatcccagctacccaggaggctaaggcatgagaatcggttgaacctgggtggaagaggttgcagtgagtcgagatcatgcctttgcactccagcctgggtggcagagtgagactctgtctggaaaaagaaaaataatttatagagatagagtcttgtcatgttacccaggctggtcttgaactcctgggctcaagtgatcctcccaccttgccctctcaaagtgttggaattacaggcatgagccatcatacccagtggctgctgctttttttgtgtctgtgagctcctttaatagaaaactacagaatagaaattatttccaactttcaactttaaattggttcttttaggccaggcactgtggctcacgtctgtaatctcaacactttgggaggccgacgcaggtggatcacttgaggtcaggagtttgagatcagcctggccaacatggtgaaaccctgtctctagtgaaaatacaaaaattagctggtcgtggtggtgcacgcctgtaatctcagctacttgggaggctgaggcaggagaattgcttgaacccaggaggtggaggttgcagtgagctgagattgtgctgttgcactctagcctgggtaacagagcaagaccctgtctcaaataaataaatacatacataaataaataggttcttttaaaaatgtaatatatggccagacatggtggttcacacctgtaatcccagcactttgggaggccaaggcaggaggattgcttgaggccaggacttcaataccagcctaggcaacaaagtgagatc

SEQ ID NO: 60911 - DNA, 713 bp, Homo Sapiens
  misc_feature (584)..(584): n is a, c, g, or t
acatgttagctgaaaaacttccaaatctcacacatctaaacttaagtggaaataaactgaaagatatcagcaccttggaacctttgaaaaagttagaatgtctgaaaagcctggacctctttaactgtgaggttaccaacctgaatgactaccgagagagtgtcttcaagctcctgccccagcttacctacttggatggctatgaccgagaggaccaggaagcacctgactcagatgccgaggtggatggtgtggatgaagaggaggaggacgaagaaggagaagatgaggaagacgaggacgatgaggatggtgaagaagaggagtttgatgaagaagatgatgaagatgaagatgtagaaggggatgaggacgacgatgaagtcagtgaggaggaagaagaatttggacttgatgaagaagatgaagatgaggatgaggatgaagaggaggaagaaggtgggaaaggtgaaaagaggaagagagaaacagatgatgaaggagaggatgattaagaccccagatgacctgcacaaacagaactgtatatttttgtttgaactgctcatgcattttgtagctgnttaaaaaagaatgatctcaatgtaatgcttcatgtcgcgcgcttctaccacagtgactttagactaaagcattctattcatgcggccgtaattcaaagttacttgcccattcgcctaaagtaagcatgt

SEQ ID NO: 60912 - DNA, 668 bp, Homo Sapiens
  misc_feature (18)..(18): n is a, c, g, or t
  misc_feature (369)..(369): n is a, c, g, or t
  misc_feature (394)..(394): n is a, c, g, or t
  misc_feature (510)..(510): n is a, c, g, or t
  misc_feature (535)..(535): n is a, c, g, or t
  misc_feature (551)..(551): n is a, c, g, or t
  misc_feature (557)..(557): n is a, c, g, or t
  misc_feature (608)..(608): n is a, c, g, or t
  misc_feature (634)..(634): n is a, c, g, or t
gtaaacatacacattacngaaatgacagcaacccacattgcagaggagaaaagtctattagctgtacagtttacatttcaatgcccaaacttatttatatatttacataaagatgctaccttgattaatcaatgtctatttgcatttccacatgtgaatttcttcagttttgatattccatatgaaggagctacagtgaaaacacttttgaataaagcagtgaaccctaagaatcttatcttgagatgagatgtgtgaaccaccatttgaatgttatttctccctgctgtgtacattagtctggctgggtgttggtcacagacatgggatgcactgacggctattcccataaccgagccaggcgggaanggggaaaaggaagacattatttgtncaccaacaaccccagtatcccaagtcaaaattctcaactatggccaaaaaggcctaaactcgacccacaggaactgggctttctaactgggttgacaacacgtaagctggccctcntggcaaaaagccaaccagagaacangcaggtggcaacaggnccccgnctagagcagagcacttcagaagaggatggataatccatcagggatgctcanggcttcctgaccactgtccgggtganggcctgccacttttcctcaacaatctggtatgtc

SEQ ID NO: 60913 - DNA, 520 bp, Homo Sapiens
  misc_feature (463)..(463): n is a, c, g, or t
ttaatataacccactatataatagtgaactaaatatgtttgtttcatagaaacaacttacatttgccaatataaggcaaatggtctatgtacagatacatcaggactgcctaactgacagtgagtgttgctagccaggctccaagctaatggagctaatacggtggagctctctgctgaatggactttcccttcaggatacgtcggatctgttctcccacagggccatcgggaaccaaatgcactggctgttcgttctccaagttccgagtacttgggtctgctcccttcctcatcaacaggcggacagcatctaattgtgtcaaccgatactgcaagctggcagcaacatggagggcagtgttgccattgtaagcctttgcattcacaaaagacaggcaactgggcagctccaaaaagaggcgaatgagttccagatttgcttcttcagctgccaaatgcanggctgtgcggccacttttgcgatccttcacttgcaccgctgctcccatttgaattaa

SEQ ID NO: 60914 - DNA, 466 bp, Homo Sapiens
gatgaaagcgaaggggtccgcgaactcttcccagctgggttcgaagaccgggcactcgggtggaggcaggaactcgcccaggcccgggccccgagggagcgcgggcgagcctgggtgcagtgtggtggccgcctccatcaccgcaggctgggcaagggcgaggcgaaggtgggctccgggaccgaggctgcgagctccgctcagtccgagacccgtgcagacgcggctcgagcaacagcaagtccgagttgtacgggcaacggcagcaccttgggctttttcagcctccgacgacgacgtctcgccgcaagcccacgccgtgcgcctccgccgccacggcaggaaaaagagtcccaccccacccccatcgacccaccctccgcgcgcgctccacgccccgcccccgaatcggacgggcgacgcctttccgctgtggatggagtttatccttagggtttcagttgag

SEQ ID NO: 60915 - DNA, 266 bp, Homo Sapiens
tttttttttttttttttttttttttttaaaagggaatgaatggttttatttgttaatccacattagcagcaacaccagaaaaatcattaaccaccccacctagcattgaaactgactccacttatcgcttcttctttttaaattataatggaaaaatgaattgcaaaatattttttatttgaacttacctgaagtcaaaatcataggaacccgatatttaaataaaaggttaaatctcaaaggttttttttttaaacataaaattt

SEQ ID NO: 60916 - DNA, 2573 bp, Homo Sapiens
cattgcctgagtaaaattaggtttttaggtctttttggcatttacttcttttacagctgatgtggaatcaattattcctttatatgttcataagtacaaaatttcactatcttaattacttccaaacaaacaatttccaagcaagggtatgtgtgcctggtttttctgctcctccaattctaagatcgttatttgtttgccttctgtttctcacccaaaaatacagatggttgggaaagatacatcttattgagttgtcctatgcagtctctgtctatatttgcatttctttctattcctatcttgcctttttttttttttttacacagatttggttttcccttccctttgtgaaaaccagaattgagcagcattgtacatcagagatggtacccaggaaatgtctttgttcctcagtatttttcgtcaaaacttccatgcaaagacagtcccagcaaagttgacatacatcccaacctctctcattggcttttctaactttttatagagctattcccctgagaaaagtgaaatgctgagtatgatgggtattgcctgttgataggatagctaaggaaatttgcttttggagaatgtatcttaaataattatacaggaaagtagtcacagtatagtgttctgtttaaggtacatcatgggtacataaatgtctaaaaccttcatcctttggtctatttctctgtaagtgtaaattacatatatattagaaagagagatagaatcaaagaattaggggtgttacagaggcagctttttgctgccttggttttgactgtatcagcatttctattgcagacctctattttcaggggttttagagactcgaccataaaaatttgtttcaggcttaaaagttttgaaagatttttttaggtatctaattttaaacaaatagatcttgtttttatattataggagggaaataaatggagtttactagttcaattttgcgctaatataacttttaataaacttaactttttaaacaaaaacataaaatctaattagttcatagttggttgatgcttttttaaaagaatcaattattgaccttgagaaacttgcctgcttcatcagtatagtaacctatctttgagatattttaaaacgtgtatacctttattaacattatcttgattccagcggtggatcagtatgataatgcagatttatgacatccatataagctatctggtaatatagatttaggaatatatagtatatatgatacatatatatatatatatatttactagatagattaaggagaaaaagctcccataaacttagtttgtcaaataaataccatatatttaaaaaatgcacagacatttatcattcagagtcagaatgagattcaagtaattgcaaagggaagttgtctcttgggtaaacaatacacattttatagcttcttgtgaaactaattttttcctttctatattgtggttatgggaaagtaaaagaattaaaattaatacagactttatttaaataacattaaactgtgaagcagagagaaacgccaggaaattaaatatttaggccattatcttgtggttgtctgacaatacttcacctttcttttaattccccatgatgttttcaattatggagagagtattaaaatctagatttaagtttctgcattgttctcattacactcaacactatttcattaagttcttgataatatgtagtcttctgtgtgcaaggaaagaaataaataacacatttatttgctgaatgagttttaaggtgtgcaagttgtagtgatgtttttcccacacaggattctatacacttataccatcttaaatctggcatttttttttcagatagcttctactgacaaacacaaagcttgtttgtgtgcaaatataaggctaaataaatggtgctaaagtgtattatgactgtcagataaaatcaggcaaaattttgtggtgcttaaattaattttttcattgattttattgatcagtgcattgaacagtgtttattattcacaagttgtcttttattagtaaatcaaggcctcatagcacattgttaaataaagtggttgactagtctatgtaacagctcaccaagctactatctcttttaactccttataatgttgcgtcattaaaggtcaaggggtcatgctattaatctcattgctatagaccattaacatgactgaacttttccacaaagtacttatgtttacaatgctataaccctttgactgctgcggcaacctttaaccacacaaatgtcacaagctagaatcatcagcatggttcttgccatggcaatcaaagagttaagggctgtgcagtgatttgttttgtatttattaatttatatttattttgtttccattcaaggaggggattaggggtggggcagtttttgtctgctgtaagtgtcttaacctagggaagggttaaatggctttttatactattgcatcttctgtatttaccatcaattcattgtgttgtaattaaaagaaactgtcaataaataagagaacagaaaaatgaaaaaaaaaaaaaaaaaaa

SEQ ID NO: 60917 - DNA, 1769 bp, Homo Sapiens; identical to SEQ ID NO: 23096

SEQ ID NO: 60918 - DNA, 2037 bp, Homo Sapiens
ggcacgagggccggctgagctgagtctcgctgctcggtgcgaggcggcggagagcgaggcctggtgagcaccgccgaggcgcgggccagctcttcgaggttgtgcgcgggagtggcacggcgggcgggcgagcgaggggctaacttcagcggtggcaccgggatcggttgccttgagcctgaaatcatgaccaccccaggaaaagagaactttcgcctgaaaagttacaagaacaaatctctgaatcccgatgagatgcgcaggaggagggaggaagaaggactgcagttacgaaagcagaaaagagaagagcagttattcaagcggagaaatgttgctacagcagaagaagaaacagaagaagaagttatgtcagatggaggctttcatgaggctcagattaataacatggagatggcaccaggtggtgtcatcacttctgacatgattgaaatgatattttccaaaagcccagagcaacagctttcagcaacacagaaattcaggaagctgctttcaaaagaacctaaccctcctattgatgaagttatcagcacaccaggagtagtggccaggtttgtggagttcctcaaacgaaaagagaattgtacactgcagtttgaatcagcttgggtactgacaaatattgcttcaggaaattctcttcagacccgaattgtgattcaggcaggagctgtgcccatcttcatagagttgctcagctcagagtttgaagatgtccaggaacaggcagtctgggctcttggcaacattgctggagatagtaccatgtgcagggactatgtcttagactgcaatatccttccccctcttttgcagttattttcaaagcaaaaccgcctgaccatgacccggaatgcagtatgggctttgtctaatctctgtagagggaaaagtccacctccagaatttgcaaaggtttctccatgtctgaatgtgctttcctggttgctgtttgtcagtgacactgatgtactggctgatgcctgctgggccctctcatatctatcagatggacccaatgataaaattcaagcggtcatcgatgcgggagtatgtaggagacttgtggaactgctgatgcataatgattataaagtggtttctcctgctttgcgagctgtgggaaacattgtcacaggggatgatattcagacacaggtaattctgaattgctcagctctgcagagtttattgcatttgctgagtagcccaaaggaatctatcaaaaaggaagcatgttggacgatatctaatattacagctggaaatagggcacagatccagactgtgatagatgccaacattttcccagccctcattagtattttacaaactgctgaatttcggacaagaaaagaagcagcttgggccatcacaaatgcaacttctggaggatcagctgaacagatcaagtacctagtagaactgggttgtatcaagccgctctgtgatctcctcacggtcatggactctaagattgtacaggttgccctaaatggcttggaaaatatcctgaggcttggagaacaggaagccaaaaggaatggcactggcattaacccttactgtgctttgattgaagaagcttatggtctggataaaattgagttcttacagagtcatgaaaaccaggagatctaccaaaaggcctttgatcttattgagcattacttcgggaccgaagatgaagacagcagcattgcaccccaggttgaccttaaccagcagcagtacatcttccaacagtgtgaggctcctatggaaggtttccagctttgaagcaatactctgctttcacgttcctgtgtcagaccaggctacccagtcgagtcctcttgtggagcccacagtcctcatggagctaacttctcaaatgttttccataatactgtttgcgctcatttgcttgccttgcgcacctgctctcttacacacatctggaaaacctccggctctctgtggtggaatacccttctaataaaagggtaaccagataaaaaaaaaaaaaaaaaa

SEQ ID NO: 60919 - DNA, 5402 bp, Homo Sapiens; identical to SEQ ID NO: 22267

SEQ ID NO: 60920 - DNA, 515 bp, Homo Sapiens
cgttttactgagaatactttatttgctggtagaagttgctaaaaatgcacagaacaaataccaatagaaaatgcactgtatttgaatctccctagtctatataaaatgaacggtgtacagcatctgttggaaaaatggctgcatggacatttcttattttatgcccacttattaataaaaataaaccttttattcaagagtatataaaatctgggaattcatatccatatccacagagggtgtgtggtttttggcagagatgtactatgtcagaatttcatcttagcttgtcaatgttctgctccttcattatttgtgttccacaaaggtcaaccaaatccagtgaactccaaaacactcttcgcaattaggatgagctgcttactcataggtttaataaaaatggttagcttttaaaacataaaaaggcaaaatgttaaaacggtttttaaattgtacaacaggaaaataaagttaaaaatatgtttttttttactcaatgttgagttttcata

SEQ ID NO: 60921 - DNA, 1125 bp, Homo Sapiens
gcagaaggcaagcccggaggcactttcaagaatgagcatatctcatcttcccggaggaaaaaaaaaaaagaatgggtacgtctgagaatcaaattttgaaagagtgcaatgatgggtcgtttgataatttgtcggaaaaacaatctacctgttatctagctttgggctaggccattccagttccagacgcaggctgaacgtcgtgaagcggaaggggcgggcccgcaggcgtccgtgtggtcctccgtgcagccctcggcccgagccggttcttcctggtaggaggcggaactcgaattcatttctcccgctgccccatctcttagctcgcggttgtttcattccgcagtttcttcccatgcacctgccgcgtaccggccactttgtgccgtacttacgtcatctttttcctaaatcgaggtggcatttacacacagcgccagtgcacacagcaagtgcacaggaagatgagttttggcccctaaccgctccgtgatgcctaccaagtcacagacccttttcatcgtcccagaaacgtttcatcacgtctcttcccagtcgattcccgaccccacctttattttgatctccataaccattttgcctgttggagaacttcatatagaatggaatcaggctgggcgctgtggctcacgcctgcactttgggaggccgaggcgggcggattacttgaggataggagttccagaccagcgtggccaacgtggtgaatccccgtctctactaaaaaatacaaaaattagctgggcgtggtgggtgcctgtaatcccagctattcgggagggtgaggcaggagaatcgcttgaacccgggaggcagaggttgcagtgagccaagatcgtgccactacactccagcctgggcgacaagaacgaaactccgtctcaaaaaaaaggggggaatcatacattatgtgctcatttttgtcgggcttctgtccttcaatgtactgtctgacattcgttcatgttgtatatatcagtattttgctccttttcatttagtatagtccatcgattgtatatccgtccttttgatggccttttgagttgtttcccatttgcggttatgaaataaagctgctataaacaaaaaaaaaaaaaa

SEQ ID NO: 60922 - DNA, 1356 bp, Homo Sapiens
gctttttttttttttttgtattctctaaagatttttaaaatattttaagttctggatacaagtgcaggatgtgcgggtttgttacataggtaaacgtgtcccatggtggtttgctgcacctatcaacctatcacctaggtattaagccccacatgcattagctagttatcctgatgctctccccgctacggcccctgcatcaggccccagtgtgtgttgatctcatccctgtgtccgtgtgttctcattgttcagcttccgcttacaagtgagaacatgtggtgtttggtttcctgctcctctgttagtttgctgaggataatggcttccagcttcatccatgtccctgcaaaggacatgatctcattccttttttaaaaaaaaaaacaaaattatttccataggtgtttggggaacaggtggtatctggttacatgcgtaagtaattaagtggttacttgtgagattctggtgcacccatcacctgagcagtatacactgaacccaatttgtcactattttcctctctcactgtggctataattctgtggcatatgtgatgatatttgtcagaggtagcagtgaattattagaattcacttcatcagaaagccctgatgaagaaagacacattttgttgttaagtttgttctgtttgaaaagtttctagtttcttgcacctagtagatactcaagttatgctttttaattgattggatttactgatcacagcaactgtttcagacttattcctttatttgacatgacattaacaatagtaaatatcagctattatcattattattcttaatggtatgaacagttatgtgataggtattaaactaaaaactttacatgtactgtaatttaatctgtatacctactattaatattgtcaatttacagtgggagaaattaggcttaaaggtttaatcatttgcctggggtcttccaactctgaagaggttaaaccaagatacaaactcatgtagtttttatgtgctacattatgttgcctccataatatgtaaaagtcatagacgtggccaggagcggtggctcacacctgtaatcccagcactttgggaggccgaggcaggcggatcacgaggtcaggagatcgagaccatcctggctaacacggtgaaaccctgtctctactaaaaatacaaaaaattagccgggcgtggtggcgggtgcctgtagtcccagctactcaggaggctgaggcaggagaatggtgtgaacccaggaggaggagcttgcagtgagctgagatagcgcctcaacactccagtctgggtgacagagcgagactctgcctcaaaaaaaaaaaaaaaaaaaaaaaaaaaaaaa

SEQ ID NO: 60923 - DNA, 761 bp, Homo Sapiens
caaaggacaaaagggtttcatacaacacagtatcaaaaagtaaaaggaacacactaaatgcacaagctggtggcaagtaagtccacagcctattgtgataggtccatccagcatcaatcagatttcttctcatctgttatctcaaggttatttacagatgtgttgactaacaagagtctctcatgggaggatgggcaggcttcaatcattggtttcgggatctgtctgcgccatgtaggcatccaactcagcatccaggtgtccttttgttttcgacatatatgcatccaattggttgtccagctgctccttggtcaatacagggcgagcaagggcacctctccctcgtccacggcctcggcctcggcctccaaagccccctcttccccgacctatcataccccgacctctaccaccgattccgccacgacccatagctccacgccctaggccccctctcccaggacctccacgacctcgaacaccacctcttcttaagcccattcggggagctacggctcgtccacctcggagcaggttttgacctcggagtgacatcccgcccctaatagggttctggtggcacgtcccccacgtagtccttctctgggcaaagcctctcttgaatatggggtaggcctcgtcctccgattgctcccctggccaggccccctatgggtcggccctaccgtgccctgatgttactcttacccagcgcctgctttagcctctgctaagtttaatgctgcctggacagaggg

SEQ ID NO: 60924 - DNA, 512 bp, Homo Sapiens
gatttaatcgtctatttattaatgcatttcaagtttcaaaaaaccttacatctttgcacaatactttattttttgcaatttttagtaaaaatttccaaagtgaacaaaaaaagatactgtataaaacacagtggacattaaaactgacagtagtattagatctcatttgtcttgatccttttatattaccacatcttgattcgcagtggaaagagttcagtgcatgtatctcttttcagaaaacatttaacttagactcaaaataaaatagggcagtgtgtgtacctgccaaaatcctaccacaggataacattacaagcaaaaaatttacatgttccaaagtctaccacactcaagaagttactaagaactcttgcagaataaaagtcaccattttagaaatgcaaacccacttccaacctttggcacagtccaaaaacaaagggcatttaaatgatttaaaagcaattacatacatatctacctacttgtttgtttagaattatttatag

SEQ ID NO: 60925 - DNA, 3565 bp, Homo Sapiens; identical to SEQ ID NO: 24213

SEQ ID NO: 60926 - DNA, 512 bp, Homo Sapiens
ttccgagacagaagatcttgctctgtcacccaaaaaaagaaagaaagaaagaaagaaaactgggttttggtcaattgattaaccacacttgaaaatgggagggaagatttctagcaaatttaaaaaatgtgtttgtgtatatgtttgttaaaatgcaggccacaagggtacagatgattccctgagtggctttgggagggaagggacaccttgggattctccatcacaccctagttgagcggttggcaaatttttctggtaagaggccaaacaggtgacattttccattctgcaggccatatggtctctgtgccactactccactttgaagttatagtatggaggttgctaaagcaattctaagtaatacacacacaaaggggtgtggccagattctaatacaactttttttttttttttttttgagatggagtttcactcttgtggccttctctgcattcaccacccacagcttatcacttcggcagtgactcccagcctgtagccttgtt

SEQ ID NO: 60927 - DNA, 6313 bp, Homo Sapiens; identical to SEQ ID NO: 28771

SEQ ID NO: 60928 - DNA, 491 bp, Homo Sapiens
  misc_feature (69)..(69): n is a, c, g, or t
cctctgtgttctccatcagccgctgcttgttgtcatctgggaccagcggacggagcggcggtccaatcngctgcggggcgctgtcagcttgcgggggcgccccaaagggccgggccgtcttgttgagggagacgctgggtgcaaaggtgtaccgcggagggtccgcggcgggggcggaggccttctgcggtttgctctgaaccggctgggccctgctgaggcccaagctgaggcgctccccgcaggcccggatcttgttctgagcttcgatgtgtgtgaggctacccgcattctcgccatcgatgctcagcacccagtcacccacggacactccggcctgcgccgctttgcccccaggagtgagccgggaaatggagaggggcacattgaagtccttgcccccttgcagccggaagccccaaggtgctggcccctccagcactactttgaaggaatccatgatgccggctcctgcttggcccggccagggc

SEQ ID NO: 60929 - DNA, 513 bp, Homo Sapiens
gcgactttggttctggtttattgcccctcagcaggcagcgggagtcaaggcctaggctggggctgcccggctcagccagcgggtctaaacagtgtgtgcaggggcgccgttcgcgctccaggaaaatgcgcgatcgggaatgtctcgaagtcagtccaggaaagagtcggcccctagtcgtgggggattagggcagggaagggcagggcggggcggggccacgcgccgtggccaagtcggtcccgccaggcagcgatcaaacgtcgagtaggaggcgggggacagggagggggttcgagagggcgtggcgggcgccggccccgcgcccccagcgcccagcactcgccactggaagatgctggcgtccttgccgcccagcgagacgaggttcgagtcgtcgtgcgtgaatcggacgctggtcacgtggctgccgtggcccccgtacatggggctcggcgccttggaacgaacgcacgggtacttgaagagattcactttttcgaaatcgtccgc

SEQ ID NO: 60930 - DNA, 3926 bp, Homo Sapiens; identical to SEQ ID NO: 24241

SEQ ID NO: 60931 - DNA, 2682 bp, Homo Sapiens
tcaaagagtgtgccaatctatttttgtatcagcattggaagtgcactttcccctggggcgtgtgggtgtgtgaatgtgcaagtgtctgagagatactgcatcagccctagacccccagagccagtcccgccctttacagagcagcccttagcctggggccatgggtcaggctgaccttcaacaattatttctagatgatttctggataagaattgctctctcggtaccagacagtttgacatcctccacccttagaaaatgactgacattgttttgttactgctcctacccaccaaggggataaagaaggcgagttctgagtgttggatgagtcagtcgcgtggaaggacgtggagcgtggcgctctgtaacttcctgccgtctgccaccccgccacgtgtatttaaccctcgcactttctccactgtggagatggctggggcggcgccccacagtgtgtattcctgtcctctatgttagagtgcatcagaagcacatttactgtgctatctatatctctatataaaagtgttttataaaaacccagaataggagcacgacgcatgattggtgtttgaggcgtttgccagctgggacaaactgcgtttggagctgtggttaagctgactaaggaggcggtggctctttcttaacattcccacgtgcccagggctgttcatgcaagattttaatggtgacttgtcctggcttactgggacagtctgtatgaggcatgtcaccacactgtcgcctcatagctgcaagagagaggcaccagctgaagttcccctgactgaagagagcctgtggccatgtaaaaagagaattaaactcttgttgctttttgtatacctgtatgcgtttgtgtagacgtgtgtctcaccagtcacctttgccctgcattgctgatccccttgcgcacactgattctagtgaggtcacagattcggagcttcacacaccagcccagagaaagggcgatggaaccgaaccgagggtctgcagctttcgttagcagagctgtcagattcttgacagtcttggaggatggagaaattcaagcagcagctggtgagggccaaaacagaatacttggcttcttcagaatcttagattgcactgagtttagtcctaaatattttgctaacaaatttccttggccagaatcagttgtaagacagtgatttgggtggtggggggagggaggagggagaggatatgattaatgtggtctctttggctgatcgaaagctagatcaactggtacttagggcacttgctgtttataaagcaaaattgagaaaatattcaaggtgcctccatcgcctgaactacaaaatgcccttggccttcctcacatggggtctgtcaccttgcatctctgataagccatccaccttcctggtcagtgcctacagggggagagcctttctgagaagcaggtcctgtggtatctgagaatggtctagagagctccccactgcccatctgcccccgaatttcctgccaagctctggggagtggggtggggggagggacgtccgatggatgacaggccgccagcccagacgtggggagagaagcctgagtcctttcctgtgtgataaaatcaggctaatttacttggatttggggtgatttgtttggtttttagcatttatgaggtgagcccatgaagttagtggtccattactttttaaagatgcattttcattttaaactgtctcctggcctgtggatttgtggaatggacagttttgtgggttttaatttatttgtgaggagtcggggctgagaaggcattttatcaggaggtctccttttgcacgtccatgacatgagcttttcggaggcaaaggaagtagaggagggtgagagatgcaggtcactgccagaggcacctctgtgacacggaacattccagacacgtcgcagccttgggcttcggcgaggaggaagtctgagcctgtgaagcgagaaggccaggcagtagactggctctgaggttttgccctttgacctcctccacagagggcagcttcagccccttgtaagccctgccccctctcaggactgccctgaggcctctccagtcctccccacactcagagatctgtggggaagctccgcccagccacactccttgggataatactagccggttctgcctgattccttttcccccggagccagcctagggggcccgggactcctctagtgagccttgactgttaggtaagagacaggaagcagacaagccaagaggttgctgcagctgcccccaggaggaaacgggcagcagggagtgtggcccagcccccactgtacccctccaggggcccgagcccttgccagcccaatgacaccttgaagtcaccacttttcctttcttgcccgctaataaaacctatttaaacaggaaattcataccaaatgcaaatgggttttgttttccttggcattttgttgttccgatcacagatttccctgccagggtgtctgtggttatcagctgcaggctcagcttggggcggccgcttcacacaagccactctgtaccacgtgccctaccttagtgacgggagtaaggagcttccttcccctccatgtcattccttcctgttcccttcattccccaacagcaaataaaactgttgaatgctaaaaaaaaaaaaaaaaaaa

SEQ ID NO: 60932 - DNA, 497 bp, Homo Sapiens
ttcatccaaatcaaggctgtatttatcgtcactgattgacatgggaacagaatatttaaaacaaacagggtccaccgtggaaatgtggctgaaacacagaactgagcaaagcaagtggctcgacggctgaccccgaaggctgggaatcccggcaggacacagcccagacatcggggaacacaaaaggccgcaaggggggcagggcatgggggggctcatgtgggtgagggcaaaacccaaactgagaggaggccaggccaaggctggcagggcgacgaccacaccgaggtgacgctgatgcctcaggcggaagaaaacacacagcagtgattttgtgtgtgtgtgtgtgtgtgtgtgtgtgtaatcagcctttagactcttgcacttctatacctccaccgatctggtctacagattccaagaacactgcaccatccacacaaacgtccacagcatcgccgcttgcggctggagccggccagttcctgaagccacag

SEQ ID NO: 60933 - DNA, 2736 bp, Homo Sapiens
gaaaaggcaaatctacccttcacagttcctgttaagggtagatttgctgaaatggagaaacaaagacaagaggaacaaaggaagagaacggaggaggaacgaaaacgcagaattgagcaggatatgttagaaaagaggaaaatacagcgtgaattagcaaaaagggctgaacagattgaggacataaacaatacgggaactgaatcagcatcagaggaaggagatgattcactacttataactgtggtacctgtcaaatcatataaaacatctggaaaaatgaaaaagaattttgaggatctagaaaaagaacgtgaagagaaagaaaggatcaagtacgaggaagattaaagaataagatatgaagaacaacgaccatctctcaaggaagcaaagtgtctttcattagttatggatgatgaaatagaaagtgaagcaaaaaaagaatcactttctcccagaaaattgaaactaacttttgaagaactggagcgacaaagacaagaaaaccgaaagaagcaagctgaagaggaagcaagaaaacgtttagaagaagagaagcgtgcttttgaagaagcaaggcggcaaatggtaaatgaagatgaggaaaaccaagacacagcaaaaatttttaaagggtaccgccctggtaaactcaaactcagttttgaagaaatggaaaggcaaagaagagaagatgaaaaaaggaaagcagaagaagaagccagaaggagaatagaggaagaaaagaaggcgtttgctgaagcaaggagaaatatggtagtagatgatgactccccagagatgtataagacaatctctcaagaatttcttacaccgggaaaactggaaattaattttgaagaattattaaaacaaaaaatggaagaagaaaaacgacgaacagaggaggaacggaagcataagctagaaatggagaaacaagaatttgaacaactgagacaggaaatgggagaggaagaggaagaaaatgaaacctttggattgagcaaagaatatgaagaactgatcaaattaaaaaggagtggctctattcaagctaaaaacctaaaaagcaagtttgaaaaaattggacagttgtctgaaaaagaaatacagaaaaaaatagaagaagagcgagcaagaaggagagcaattgaccttgaaattaaagagcgagaagctgaaaattttcatgaggaagatgatgttgatgttaggcctgcaagaaaaagcgaggctccatttactcacaaagtgaatatgaaagctagatttgaacaaatggctaaggcaagagaagaagaagaacaaagaagaattgaagaacaaaagttactacgcatgcagtttgaacaaagggaaattgatgcagcactacaaaagaaaagagaagaggaggaggaggaagaaggtagcatcatgaatggctccactgctgaagatgaagagcaaaccagatcaggagctccatggttcaagaagcctcttaaaaacacatcagttgtagacagtgagccagtcagatttacggttaaagtaacaggagaacccaaaccagaaattacatggtggtttgaaggagaaatactgcaggatggagaagactatcaatatattgaaaggggagaaacttactgcctttacttaccagaaactttcccagaagatggaggagagtatatgtgtaaagcagtcaacaataaaggatctgcagctagtacctgtattcttaccattgaaactgatgactactagctcccctcccctctccctggaactttctctttcactccaactttcttactacatccatcttttctgtggcggggccaaaaaaggaaaccaggagtgccactatgctgacttcttattccttttcataacagtcttcaaagcacagctcatctaaagaatgcctacttcttttccaaataagcatcagatttatcgcctattatgcagtaacagtcaataaaatgtacttatgggggggaattactcaattattctatcagaacctattataaagactgtatttcccatagacgtttacagcaactatgtttaaaaaacaaaaacaaaaaaaaaacacacaaacctaagtagaatacattattttgcatgaaggaatgtcatttctgagctttttacacctaaaattaggctgaaatagctgagataattaatttggaacctatcaatttgagtggactttttctttagtagtacaccattttggttgttgtagtttcaaagtctttctgaagcagatatattgggattggagcggggtggggaaaactgtcactcctttcagaggaaaaggggaggagcatggagaaaaacaaaaattaaaggacttaaagaatggctatacagtgttgagtgttgaggatattaaacatgttatttttcaaacgtatgtaatatatattaaatttataaagcaaatttatgttgtgatcttgcctgaacaaattatattttaatgaaaaaactttctattaatagttcacgcaagagaaaacactttcaacatagtcgaaggcttcaagatctaagtgtatcagacttagggaaaaagtggcacaaccttcgatttaaaattctagtctttaaaatgagtttgtaaataattagctattacgttctattaagttgttttatattttaattttctggaagacaattttattttacaacgtgaacccaaataaagtaacttctgtattt

SEQ ID NO: 60934 - DNA, 393 bp, Homo Sapiens
tttttttttttttaattgcagaaagcccctttaatgtctgtggaacagaagaaccatgttggatggggaaagcaggggcaggacacacgtgtcgcgtatctatggggtgttatcagggttatatctgtgacaggatcaactaacttactggctctcatttcacctgataacataagaccctccccgctgactacacacagtttaggttatcactccttatgactcctgctccctgccctgcaccctagattctctgggactcaccgcagttttcctgactctgatggaatgtgctggagtctattacgagccctgcttttcagaaggtgctcaacaggccctgaagatgtgcatctggccgatggtgggtcaaaaccagagttctgcaggctg

SEQ ID NO: 60935 - DNA, 1482 bp, Homo Sapiens
ctctctgacgaaggactggaaggtggcggtggtgaaggtgcaggccgttggggcggctcagaggcaggtgactatgaaaggcttatatttccaacagagttccacagatgaagaaataacatttgtatttcaagaaaaggaagatcttcctgttacagaggataactttgtgaaacttcaagttaaagcttgtgctctgagccagataaatacaaagcttctggcagaaatgaagatgaaaaaggatttatttcctgttgggagagaaattgctggaattgtattagatgttggaagcaaggtaccattctttcaaccagatgatgaagtagttggaactttgcccctggactctgaagaccctggactttgtgaagttgttagagtacatgagcattacttggttcataaaccagaaaaggtcacatggacggaagcagcaggaagcattcgggatggagtgcgtgcctatacagctctgcattatctttctcatctctctcctggaaaatcagtgctgataatggatggagcaagtgcatttggtacaatagctattcagttagcacatcatagaggagccaaagtgatttcaacagcatgcagccttgaagataagcagtgccttgaaagattcagacctcccatagcccgagtgattgatgtatctaatgggaaagttcatgttgctgaaagctgtttggaagaaacaggtggcctgggagtagatattgtcctagatgctggagtgagattatatagtaaagatgatgaaccagctgtaaaactacaactactaccacataaacatgatatcatcacacttcttggtgttggaggccactgggtaacaacagaagaaaaccttcagttggatcctccagatagccactgccttttcctcaagggagcaacgttagctttcctgaatgatgaagtttggaatttgtcaaatgtacaacagggagaatatctttctacgtatcttaaaggatgtgatggagaagttatcaactggtgttttcagacctcagtgggatgaacccattccactgtatgaggcaaaagtttccatggaagctgttcagaaaaatcaaggaagaaaaaagcaagttgttcaattttaattttcttctttctcagacctcagtcggatgaacatattccagtatttgaagccagaattttctttggaaattgttgagaaaaaccaaggaagataaaacaagttgcatttttaagcacgtttctctgctaagacaagatgctcagttgacacatttgaaaagtgtttgaaaaattcttgtgcaaatgatcaagataattctataattaacatcttaagggaatttttctaaaaaccttttcattgtttctatatattttgcccctgctataaaattccttccatgaagaaaactgctgctttcagcaaaagtcacactactcttgataaaagctgttgcaggcctttgctaagct

SEQ ID NO: 60936 - DNA, 492 bp, Homo Sapiens
tgaaattttagatttctttatgttttaacaaattaacaacaatgataagaggacattagcagcttttcttgggtctctttgttaacaataactcgatcctgcagccataacaggggatgtggccaagttttagctggcagaccagtaagccaatattttacacaatggatgacatttctgaaagcagaggcagagacagacccaaagtcacacatgtagtccaacaaacaagtttctgccatttttaattgtatttagagcaacaaaagattccaagattacaaaaagagaacagaacactagcgcttggagctggtcctgctgcccagtggaggccaagtgccaccgtgagaaataagccccatctaaagagatttcaagcaaaattgtttcttttaagaaaatctttgtgtgatgctttctttctctctctcttatttcttttttccttcaatattgaaaattaatttttatctctgtttacatagtctg

SEQ ID NO: 60937 - DNA, 2821 bp, Homo Sapiens
ggcttcctcgagcgtcccaccggctggaagttgtagacgcggccctggacgtgggtgcgcgccaacaccgggcggcgcgtgctgtagatggagacgcgcgggtctaggctcaccggcggccagggccgcgtctacaacttcctcgagcgtcccaccggctggaaatgcttcgtttaccacttcgccgtcttcctcatcgtcctggtctgcctcatcttcagcgtgctgtccaccatcgagcagtatgccgccctggccacggggactctcttctggatggagatcgtgctggtggtgttcttcgggacggagtacgtggtccgcctctggtccgccggctgccgcagcaagtacgtgggcctctgggggcggctgcgctttgcccggaagcccatttccatcatcgacctcatcgtggtcgtggcctccatggtggtcctctgcgtgggctccaaggggcaggtgtttgccacgtcggccatcaggggcatccgcttcctgcagatcctgaggatgctacacgtcgaccgccagggaggcacctggaggctcctgggctccgtggtcttcatccaccgccaggagctgataaccaccctgtacatcggcttcctgggcctcatcttctcctcgtactttgtgtacctggctgagaaggacgcggtgaacgagtcaggccgcgtggagttcggcagctacgcagatgcgctgtggtggggggtggtcacagtcaccaccatcggctatggggacaaggtgccccagacgtgggtcgggaagaccatcgcctcctgcttctctgtctttgccatctccttctttgcgctcccagcggggattcttggctcggggtttgccctgaaggtgcagcagaagcagaggcagaagcacttcaaccggcagatcccggcggcagcctcactcattcagaccgcatggaggtgctatgctgccgagaaccccgactcctccacctggaagatctacatccggaaggccccccggagccacactctgctgtcacccagccccaaacccaagaagtctgtggtggtaaagaaaaaaaagttcaagctggacaaagacaatggggtgactcctggagagaagatgctcacagtcccccatatcacgtgcgaccccccagaagagcggcggctggaccacttctctgtcgacggctatgacagttctgtaaggaagagcccaacactgctggaagtgagcatgccccatttcatgagaaccaacagcttcgccgaggacctggacctggaaggggagactctgctgacacccatcacccacatctcacagctgcgggaacaccatcgggccaccattaaggtcattcgacgcatgcagtactttgtggccaagaagaaattccagcaagcgcggaagccttacgatgtgcgggacgtcattgagcagtactcgcagggccacctcaacctcatggtgcgcatcaaggagctgcagaggaggctggaccagtccattgggaagccctcactgttcatctccgtctcagaaaagagcaaggatcgcggcagcaacacgatcggcgcccgcctgaaccgagtagaagacaaggtgacgcagctggaccagaggctggcactcatcaccgacatgcttcaccagctgctctccttgcacggtggcagcacccccggcagcggcggcccccccagagagggcggggcccacatcacccagccctgcggcagtggcggctccgtcgaccctgagctcttcctgcccagcaacaccctgcccacctacgagcagctgaccgtgcccaggaggggccccgatgaggggtcctgaggaggggatggggctgggggatgggcctgagtgagaggggaggccaagagtggccccacctggccctctctgaaggaggccacctcctaaaaggcccagagagaagagccccactctcagaggccccaataccccatggaccatgctgtctggcacagcctgcacttgggggctcagcaaggccacctcttcctggccggtgtgggggccccgtctcaggtctgagttgttaccccaagcgccctggcccccacatggtgatgttgacatcactggcatggtggttgggacccagtggcagggcacagggcctggcccatgtatggccaggaagtagcacaggctgagtgcaggcccaccctgcttggcccagggggcttcctgaggggagacagagcaacccctggaccccagcctcaaatccaggaccctgccaggcacaggcagggcaggaccagcccacgctgactacagggccaccggcaataaaagcccaggagcccatttggagggcctgggcctggctccctcactctcaggaaatgctgacccatgggcaggagactgtggagactgctcctgagcccccagcttccagcaggagggacagtctcaccatttccccagggcacgtggttgagtggggggaacgcccacttccctgggttagactgccagctcttcctagctggagaggagccctgcctctccgcccctgagcccactgtgcgtggggctcccgcctccaacccctcgcccagtcccagcagccagccaaacacacagaaggggactgccacctccccttgccagctgctgagccgcagagaagtgacggttcctacacaggacaggggttccttctgggcattacatcgcatagaaatcaataatttgtggtgatttggatctgtgttttaatgagtttcacagtgtgattttgattattaattgtgcaagcttttcctaataaacgtggagaatcaca

SEQ ID NO: 60938 - DNA, 3259 bp, Homo Sapiens
tctttctcgtggcaaatcccaatgtacacgatttcaggtctcagacgccatgcctctccagcccacgcccttaggcaggtgatggcagcagctaggaataaggtgtacatgatccacagccctgcggagccaggtcaagccgctgctatgagagctccagggtgatggggacgattctgcccagtgtcctcagtctgtcccctcaggtcatggtcccaagtgaaatgacagagttcacagccctggtcttggctgaggtccaggtcatagtaagggcatgttcttggggccctcgacctgaactctgaccctccgggcagggaagaggaggttgtcccctttggttgtcctggctttggagtcctttgcaaaaatattttgggccccctgccactggctgcagaaatggctcgacggggtgtgtggggacagacacccagaaggaatgtacttttgtggccttggtgtccgatggggctgggggagagtgctctccactgacccagcagcacacccatgtgcagtgcgcctgcatctgtgtgggggcagccacaccccttggctgctgcttccttgggctgcctttctgggggcatgtgactggacctacgaggtctgcactgagctccatttgaatgatacctttcctatcccatttcccccacggaagcaccgcttcagggttattcagtcctctgcctcatggctgaaattgctcatctcgtctgcagatgtctactatcctgtctacctaatgcactattatgtattgattctccatgagacagagagagagagagactatcagatagtttacacccaaagggtaggtttttgtatatttttccagccttttttattaaggggaaggggagagtttaaaaacccaaaccgttgtggttttaaggtgtttcatttttaaaagggagagagaatctatttaaagctatttcagatcagggattgtcatccttttttgtccaatgtattccttgttctttaaaaaaattttttttagaggaaactaatattagtctttgtgttcactaactcttctggtcacttgtatttatttattcattcattcatcagatatttgttgccatctgaaagaactggcccagtgggtctgaaagctcgcttgagaataggaaacttgagacctggccccctgtgggtaggagaacaaggaccacctgggttctccagtcttgaacgagaatctcactcttatcagaatgtttttcttaacctcagcgtatgatgaggaaatttacttatctctagctaggatttgacaaattccaacatcaaatgatcaaaacatttgccactgaggcttcactggtgagatccgttctccgtcctcgggtgcagtcccttgggggctgctcctcggactgcgccccgcacacctgttatcgagggtgtgagaagcgcctaagctggtgacatgtgatctgggacgccttcatttctcgggccaggagtagcagctgctaaggacagcagcttgcattgcgtggttttagggaagcagggtctggcttttaatatgaactgcaaaaagcagcttctcactgatatttttttgttgttgtttctggggggtttttttgttttgtttttaatgcctttgagtgcatattttcttcctcgtctgaaaccgaactcccaaagtggctttctttagccctggctggaaaaccacctctcaatagccttaagcaataaatagatgagtagagaatgtggcttcaactgggcttattaaagtaagtgtgtctagttttcacttgaacaagtgatagctgcagatggcgaaagaaacccatttaatttttgtagcttacaggtggtagaaacaaaaatgcaattttaaaaccttaaataccaaataccaaccattgcctttttttttttgagatggaattttgctcttgtcacccaggctggagtgcaatggcgcgatctcacctcactgcaacctctgcctcccgggtccaagtgattctcctgcctcagcctcccaagtagctgggattacaggcatgcgccaccacacccagctaattttgtatttttggtagagacagggtatctccatgttggtcaggctggtcttggattcccgacctcaggtgatccgcccacctcggcctcccaaagtgctgggattacaggcgtgagccaccatgcctgcccagcaataccaaccattgtcttttaaattcgtgttggcttctcagacagggagatcactggaataaaataaccgatggtcttattttgtcacacgtaaatcaaaagaaatgtcctctttgaagttgtaagactccaccaatgacagacacccttttcggtggactctgagtggtgtgtagtggttttatagccatggaaactaggagtatctcactttccactgagaacccctgcccccaatccctctaagttggggtgtggcagttgggcagggtcaagtgacccagccctggctgtaggacagccatatacagtgaagagttctagaaccagctaaaaatggaagtttgggtgtttaccaacaaggtacctctttatggatgcagccccagtaagctggctttaactctcagctccttccctgtctcctcctaatccaagcccttttataaaataaagccccttctgtcccactgctcacatacttatgtgctgctagtctctactcgaagttcgtgcaggactaatgcttttaaaatgaggtctaaaaaataattactagtcgagactattattctttaaacagaactgcctttttctactctttatgtaaactctttctattgtgttggtctaacaaggcactattttaaaattttttaatttttcccatagcacttaaaagagattttgtaaagaccttgctgtaaagattttgtaataaaatggtctaagggctctttttccaacattaccatttttaaaaaatgttttaaaagctagaagacaacttatgtatattctgtatatgtatagcagcacatttcatttatggaaatatgttctcagaatatttatttgctaatatatttatcttaagccatgtcttatgttgagagtgtgacattgttggaataatcattgaaaatgactaacacaagaccctgtaaatacatgataattgcacacagattttacatatttgcagaccaaaaatgatttaaaacaagttgtagtcttctatggttttgtaacaaattgtacacatgactgt

SEQ ID NO: 60939 - DNA, 2937 bp, Homo Sapiens
ccacgcgtcgcagaatcagcatctaatgaaaatttcactgagttttagttcattcttctttctctgaaaggagaggaaatcgcctccaggaaccagttccttaatgacgtagataggccgtctttgtgtgtgaactcctatacttttgacattactgggatgattatattgcttgaggattttggcttctagtaaaaattttaatttcagttcctggggaagacgttcttgacgtgttttaacagcaacagcaattttatcctttaatgtgaccttaaatgtgtcaccaaaatttcccttgcctcttgtaacgtggcacctttatgattgagaacccatttcttattctcctaatggccatactgtgataccatgatgctcttaattggaacattgactttttttttttttgcaatttaaacaattgagataaaattcatataacatcaaatttacctttcacttttttttttttcttttggagaccaagtctcgctgttgtctcccaggctggagtgcagtggcgcgatctcggctcactgtgacctccgcctcctgggttcaagcaattctccttcctcagcctcctgagtagctgggactacaggcgtgcaccaccacgcctggctaatttttgtatttttagtagagataggggtttcaccgtgttagccaggatggtctcgatctcctgacctggtgatccacctgcctcggcctcccaaagtgttgggattataagcgtgagccatgacgcctggcctcaaacttgccatttttaaagtgtacaattcaatggtttttagtatatccactatgttgtgcaagcatcaccgctgtctaattccagagcatttctgtcaccccaaaaagaaactccatgcctattagcagtcactcccagttcttcccttcctcggcccctggaaaccagtaatgtactttctgtctctgtgattttgcctgttttggacatttcatttaaatggaattatgcaataatttgtggccttttgtgtttggctttcacttagcatcatgttctcaaggctcatccatgttgtggcatgtatcagtactgcattcctttttatggctaaatgatgtttcattgtatgagtgtgtaccacattttatttatccattcagcaattaatggacaggaacaatggcttttaagtattaaattgtaagttcaacattaaatgtatccacagttattgataatatcaagattatacatggtgtgaacagaatgctgtgtcgaaatggtatgtaaattatttgtcagcatttcatgtaagtgattattttctaaggacccttctagccctggttttaagaaatatgtgaatgtagtattttcatcaataaagtttaatgcattaagcattagcttaaaatttgaatgaaggcagatgtgaagatatttgccacatgttgtaataatcatgttttgaaattatttcaatatgaagtatttgaaaaatgtcaatacataaaggaaaggaaatgagtataattaagtcaatatatttttaaagcaatttttataatttagcagacactgcatcttaatataagttactattaaaattgtgtccttgtgaaaaatgtgatgtcattttcctttttttgttgatcatgtaaaataggttacttttctttgctacattttctatttaataagctattgcttgccgttgtggaatgttttacttgttgctccatttttttctccctacccccacccctctctcccacacgcacacaatgttcaatttttttttttaagtcatcattagtgtgtttatctttaatggattctaagaatggacaaaaagaaacacacaaatatttcatccttttctggggactcaagtctttgttaccgatggaactcattaacttcttgttctttcttaaatcttcctccctccttaccttttcctctccttccttctcttcttcttcctttcttctcccctccctccctccctcccttcttccctccctcctcctttcattctccttctctccttctcccttccttttctcctacctcctttgactaagcctccctcccctactccctcctttccttccttccttccttcttctctatcaatataatcactttgtttctttcaggtgagatcggactggaactgttcggctgcgaccagaaatttattttcctgagtaaattgccgagaattaagaatgaagagggccatttgcatctccttaaattattcagttacctgctttattgctccatgtggaaaacttaaaattgttaagttgtgcattactgtattttaacttgttgcttagtttctacatgtttattttcagtaatggctgaaagtgttaactgttccatacttttagcacaatgtgctgcataaggttacctgtgtacagagttttactttagattaactaaatattgcctgggttcagtttttatttccattctgaaatgcttcctttttattgtttgaaactgaaaataaacaattgttgaacccttttgattttacctcattttaaaactgttttaatttattatttggcttgttcttaatattagtcactaaaagcagtgggagcattgtcttatgaaatgcttaggaatcattttatatagtacatgtacaacattaaacgtgtttaaaaaagaaaaaggtaccagcgatcacttgtcccttgccattttttcttgtaattatgttagacaaatcttggcggcggggggatcaaaacataattgttttaattctacagctgtaggagctttgtattgctgaactttcatctggaaaagtttcacagtgacatttttaaaagagaatttttttatctgccgaattctaccagtgtaaccttttttctaaataaacaatagttttctcaaaaaaaaaaaaaaaaagg

SEQ ID NO: 60940 - DNA, 478 bp, Homo Sapiens
  misc_feature (464)..(464): n is a, c, g, or t
ttttttttttttttttttttttttttttacttatttttaaatggctttagtcaggctgccaagagtgatatcaggtttgattctcacatacataaatgccagtcccaaaaagcaactctaacttgtgcacctggcttaaaacaaaatgtactgaaaactttgtatttgttaattgggataacccacccattcaggcctcaattccctttggacttgcacacgcacttcctacacacagaagtggcctgttatgcagcaataatcatagtgaaaagcagcaattccgtgaaggctccacagagaaatcgcgtttgcatttcaaacaagtttcctcaaagtaagcgtctttcgattaaatgaaatcacaattccagcttcttatccacagaaaacagcattcactatgtaacttactgctttttataagtgcataatttctgtcacagttagccacatatttatanaatttaagcaatac

SEQ ID NO: 60941 - DNA, 569 bp, Homo Sapiens
ttaaaatcatataaaaaataatgagcaatttacaggtctttctctaatcagaacctcaagtgtatatataaaggtactgtacaatatataaacatttacaaccagtacatccacattttgctcagcattccaaggccacattgctaagtcagtatataatcagtacagagtttacttaggaagaaccacataggacaacatatgacatcaaagttatgtcacagttaacaaaaataggattcgttatcactaattgtggactacagggaaaataataaataatttctgtggtactaaattcttagtatttatcaagcctcctaattttgctctatctgaatagttacaataggtgggtaaatatagttctggatgaaaaggggatttcaaaaatctcactctgggaagcatgtcttatctacaggggctaattgagttgttgggttaaagagtttcacagtcagactcccagagggaaggacctggacctaatgtgcttcacaacaagatgaacccaggtgacagaacaagtgtgttcacacactccataaaatagttttattctcaga

SEQ ID NO: 60942 - DNA, 600 bp, Homo Sapiens
ttttgcactatatacattctgtccactgacgatactgtcagctggccatgcattttattgcacatataaacagtgtacaaggatcttgaagacgtcttagccatagaaggactgcatttaaaagaaaaaaaagcaattttacagaagactgaagccatttacattacacaaccaacttcaagaaaataataaaaattaatatcaaaagaaatactttaattttgaaaaaaaaatctctcaaaacaatgattacaaagcttcatgctaccatatatacacgtaagaaaatatttcaggaccccgcattctgaatgcccgtgaaggtgcagcaggctaaactcctacttatatagtcaacctttgaatgttgcttaaattgtatacactctttgtccaaaatgtttctttacatcattatgctatttgacaaaacaggtatttgtgcagtacagaaaaatattaaaatacattttaagttaggttaaagtgcacagtacatctgataggaaataactgctagctgccaatccaaatttccgttttcagaaacctccccccatcttcccaagagtggagggcagccattgccttggttgatgt

SEQ ID NO: 60943 - DNA, 1721 bp, Homo Sapiens
catagaatatatctagatgtggggaaagtctcctatttggtaatttagttaaaatgtaaatgttatatcacagcatatgttggtatgttttggagtgtgcttccattgtgctcagcttttgaaaagtttgaaatccattttagtcaaatgtagtcaatgggatttccagagatacatattgtttttcttagtgtaccacacactccttgaaggcagatactgtacttaatatatcactgtcttccataatactgccctaggtctttttagtttttaagagaccgggtctcgctatgtttcccatgctgaactcaaatgcctgggcttaagcaatcctcccacctcagcctctggagtagctgggactacaggggcatgcaccaccaggcctggcttcctaggagggtctttaaagagaaaatatttgttcaattgaaaacaggattcttgtcatctacaactccaacacagcctgaaaatatccacattataacctggaccttagacctactttctccactatcctgcaaagctacatctgtaactacctattggctatctatatgagtcctcaagcatctcagactttacatgaataaaactcaacttccttcccattcaaatctgtttattttcttctgtaagagaaagataccatttgagactccagaatctgcctctaactctcaacaagactctgcaattactcaagtatcctttccatcctcattgccctgctgttattacataggccctggttcaagtccttgttacttgttcccattattgcaataacttctaattccaatgccgttgtgtgatcccattttaaacacggccagagcagtcttccaacaacatagctctaatctagtttcatccccacttttacatgcttcagtggctttcccagtgacttggcatggaacacgtcctcagttgccatacattccagctaactcttacccaacctttctttgttcacacagtttccttttccttcctcattgacccatccgcatctctgtttatccaagacttctctgtgatagctgacccttagtctttctctcccctattcctccagactagatcctgtctccttcctgcagccccgacacagccttcagttcatatcttttgcatgatgcttagcaccttctatccctaaggacaacttactcgtttgagatttctggcagggtaccttgcatgcagtggacactcagtatttgctgaattaaattccttcctatggatcccttctgattttttttaagtgcctctaatacacatatcattctagggctcatgccacttttaatgtcattttctaaaggaaaatcttatctatgatattttcccttataagagatagttgttttgagtagggttttttaaaagataaaggtagtaggaaattttttaaagcctaaatatcaaattcctttccctttggagttgggggaaggaatgaagggggagcaacttgctctttcatatgagttggtcatagcatgtaagaaccaatcttgaaatatcgttttttttttaatggcttataatgtatttctagaaatactttgtacttaaaatgataacagtttgtatctttttgtccatataaagatactttataaataaaaaaattagcattgtaaataatgttaatatgtatttatacaaaataaatttactataataaaaaaaaaaaaaaaaaa

SEQ ID NO: 60944 - DNA, 1822 bp, Homo Sapiens
acttgttgattcccaggagggccgcctttccggtctgggtccccgagaggactgccttgctcacctgtcccctcggcgcggccccggggagctcccgagaggcccccgggatcgctggccctccgaactccacagcaatgagcaagttgggcaagttctttaaagggggcggctcttctaagagccgagccgctcccagtccccaggaggccctggtccgacttcgggagactgaggagatgctgggcaagaaacaagagtacctggaaaatcgaatccagagagaaatcgccctggccaagaagcacggcacgcagaataagcgagctgcattacaggcactaaagagaaagaagaggttcgagaaacagctcactcagattgatggcacactttctaccattgagttccagagggaagcctggagaactcacacaccaacactgaggtgttaaggaacatgggctttgcagcaaaagcgatgaaatctgttcatgaaaacatggatctgaacaaaatagatgatttgatgcaagagatcacagagcaacaggatatcgcccaagaaatctcagaagcattttctcaacgggttggctttggtgatgactttgatgaggatgagttgatggcagaacttgaagaattggaacaggaggaattaaataagaagatgacaaatatccgccttccaaatgtgccttcctcttctctcccagcacagccaaatagaaaaccaggcatgtcgtccactgcacgtcgatcccgagcagcatcttcccagagggcagaagaagaggatgatgatatcaaacaattggcagcttgggctacctaaactaaaacacatttttgatacctaaattaatgagctatagataaaatataaaaaatgtttttaccaagttcagaagttaacaaagactctgctttataattatattgaatgaataattgtgttttaagcctcctaagtaaaagtaaaaaaggagtcatgtgcatacatagaatcagtgatggaggccaggcacggtatctcatgcctatagtcccagcactttgggaggctgaggcagttgagaccaggagttcgagtccagcctgaccaacatgaagaaaccctgtctgtactaaaaatacaaaaattagccggacatggtggcaggcacctgtaatcccagctacttgggaggctgagtcaggagaattgcttgagcccaggagatggaggttgcagtgagccaagatcatgccactgcactccagactgggcaacagagggagactccgtctcaaaaactaaaaaaaaaaaatacatttagtatagcggggggtgggggggagaaataatgttatttcctatgcgaatgacgtgtatccctgtacccatggtaaatgtaaatatactgtgtctcttttgggagagccttttagtagaggagtcttatatgagtctctacataagtagtttcacttgagttttgcagtttgaaatcttaaaggagctttaattgacatttattataccaattaagcttggaatggggcaatggatgcatttcccaaaacgtgtgaaagcactaacagcttatattgctgaatgagaatctcctgggtgtaatttagccacttagggaactgcgtgaacactcccaggccattatgatgctgttacagcttcagtgtataaatgcatgagtattctttctgttctgttttgtgctctcttgtacatttatttaccctttacagaatatttcttgtaaatacataaaaatattggcaattaaaagtacatcttgaataaaaaaaaaaaaaaaaa

SEQ ID NO: 60945 - DNA, 650 bp, Homo Sapiens
ttttttttttttttttttttataagggtttatctttattttataaaaactgctacacacacacatacactctctctctcccctcttgctttcctcatttgacctagagaagtttggagtttgttcccacacattcttttcaaggaaataccattcagccatggtatgtttttaccacaatttattcatccattcccttactgatggtcttttttttgtttgtttttttggtccttaccaaaaaatacaatatacattagtaaacatataatcttaagtgctggcgctttttattccttagggatagattcccaggagattcctaggttgtaagagtatattaatgttaaaacagactcacaatgttgtccaaggaggctgttacaatctacatttctaaaagcagctatgaaaataacgttttcccctcctttgtgagtaagtaagatgacaacttagacaaaagcttattgggctatggatgttctggataaatttgttcagaaaggcactcaatatatagtgggaccagcacatcaatgatatccaaaaatatttttttaaaagccagttttttggttgccatttataatttccaatacatgatttgtgattgatagggaaaggctgaacttaagaatttgaaatcag

SEQ ID NO: 60946 - DNA, 572 bp, Homo Sapiens
tttgatatattgtataccattttattaatatgaagcaatgggataaatcctttaacaggggtactgatttactaccgtgaatatgtaccaacactttggtgcagtatcatgcctgattcagtcaaataatgtgttatttacttgcactgccacacatgtgaaaacacatttcattggttgacagaagagcacacagccatgtacctcgtttctggcttaaatgcatagaaatgttctcatgtacaacggatttttcaccactcaagggcttccataatagatgaacaacttttcaatacactatttctgccttgctatttttttttttaagtgaagagagaggggaaaaaaccaatactgtggtacaaaagacctttttacaaggtcctttctggagaaatgttgagaatacagttatagtcctataataagactataatcaagatcatcctacaaggacgtgagggtagactcactctcctggagagtttctgatcttattaagactattatatttgtctggctttaaaaacaaagaatattataatgaatagaggggagaaattctagca

SEQ ID NO: 60947 - DNA, 517 bp, Homo Sapiens
tttttttcaaataaaccttttatttacaggcaaaggatatagtacaagaagaaaaagagaatacagatgacatcgggggtccaagagacattccatatttaagcttcataatgtccttatttgcacacatataccacactgccttcattttctccagctgatagatttgtgtaagaaatcttgactttgagagttcaatgtcattcccaacagggtctttatgtctgtctggtcatgttatcagccagtcttacttaatgtattaggccagttggaaaccatcattaaagaaactgaccctggtgatcaccagagtagtttcagactataaacaacacatcataaatcccactgcccttatcttggcccaaagacaaaactggacattctgatgaccccagagattatgacagtgttttctggtctaattaaaccatagtcttcatatacctttaccacgcctccttcctccaattaggaagctaagtgggtaagaaagaaaaaataaaggcagagc

SEQ ID NO: 60948 - DNA, 497 bp, Homo Sapiens
  misc_feature (392)..(392): n is a, c, g, or t
  misc_feature (412)..(412): n is a, c, g, or t
  misc_feature (434)..(434): n is a, c, g, or t
  misc_feature (489)..(489): n is a, c, g, or t
taaatatagagaatttaatgggctacatttaaaaatgtacattattatgtcaaagggtaaatttacaaattgataatcatagtttgcaacaattcaaagtttattctcaaatttatccaagtttacttttatttacaatgaataaaaagaaccatgtgaaatgtaagagatgtcagacattaaaagtatttttggtattaactcttataatatttcagaattcagggtagcaaattttaaaaccaataacaatagaaaaaatgtaaaccatttactaattaagattgcattaaaacaattgttggtctttaaagaagtattcttatccttagacactgtactttcaattgaatagggtggtattgccagaatttgggcccacttccatattngccccataagcctctccagntcaaatggtttcaactagtccnctcttccttattcccaggtgggaaaaaaattccttgggaaaaggtaaggaatacntccaatcc

SEQ ID NO: 60949 - DNA, 571 bp, Homo Sapiens
  misc_feature (301)..(301): n is a, c, g, or t
  misc_feature (339)..(339): n is a, c, g, or t
  misc_feature (406)..(406): n is a, c, g, or t
  misc_feature (485)..(485): n is a, c, g, or t
  misc_feature (499)..(499): n is a, c, g, or t
  misc_feature (520)..(520): n is a, c, g, or t
  misc_feature (528)..(528): n is a, c, g, or t
  misc_feature (539)..(539): n is a, c, g, or t
  misc_feature (566)..(566): n is a, c, g, or t
gagaggctttatttggctttatttagtaaaatgttaaaataaataaatacaaattgatcagctgctctgtatccccccccaccccctcaaaacaaaaaccaaacaaacaaaaacaaaaactttgaagcacaaaactccaaatacaagtctaccaagactgaaatcacaaagggcatggacaagagacagggttggggtctggctggctcttctctgctaggagctggctgacctctggcctgcccgtcccatcccgcctgactgcagctcaccctgggctgaggacccacggacaccgganagaggtgagggtccaaaagcttgctggggaaggggtangggggtggggtcctcagggaggaaagggccttgtgggaggggggcgccaagtggaacttgggagaancctgcttccgttttagaggaggtatttttcagagttcctaacccggctttcttgagggcagccccagtttcctggcccntcactttagcaaangggccagaagactgcccaagnttggccantcctgtctttngaaaagagctgactcagaagacagttntaatt

SEQ ID NO: 60950 - DNA, 515 bp, Homo Sapiens
  misc_feature (168)..(168): n is a, c, g, or t
atagtccgagcgccgcgcctattagtagtatatccgagattgggttttagccgaggggggatggcgaggtgccagtgagggccagaaggaaatacaaccatctgatccaacactgaccaatggcagaggcaggaattgtcaaatagcacccaggaggagcgcacccgncacgagggacccgcgcacaaacctatcaaccttttttttttcctccttctccttcgcctttctcctctctctccccaacaacacaacgcgtcctgttccacctacgtaggatctgtgaaacaggctcagtgcctttgagggaggagggaacgtttagattgagaccaccccactcccgggtgattaaataaatatgtctctcccccaccccacgcaggattggaaaaagttaattgtggtttcagaaaagttaacccctgcgttgcttcgaccccttctctccagggaagggttgggtaaatgtctacgaatcgccttgagagagaactaaagaaggtttgttctag

SEQ ID NO: 60951 - DNA, 596 bp, Homo Sapiens
tttcaagtatctacaaaatctttataaattcacatatttttttgaaagtgtacaagcagtctcaatttactgggacaaaaatgaacatttttgttctttagtaatgaagtcaatgtacaattcagagcaggtgtccatagaaacaactaggtttgaaaaaactgtaagacaattcacagttgaaatcaaacaaacactgtgaatgtgttaaatacttgccatataacaacactttaacattgatcttgctaaataaggctatgattcataagatgcatgtatttccaaagctgtttaacattcttataaattaattcacaggattcaaatagttgctttttagcttcaactgggtattagcaaaaataatacaaaatgatccccgtgcaagcacaaatttaccttccttcctaaataaaacatgacagattatattacaacttgatagcctctcttttaaaaagtctgtgacattattaaagaggtgacggaatgcttgttttgcaaaccccaacacatctttcactgtggaccattgctattacttcattaacacagttgctcagatctcaaggtactcacggtctgaaatatat

SEQ ID NO: 60952 - DNA, 95662 bp, Homo Sapiens
gatcaagggtgatatttttctttttctcctgctgttttgactacagtttctcattattatttatctaagttcaaaaagttgaattatgtccacttatctgaggatcttttaaacattctaagatttgataatatttccttctcttatctgaatcttatcttttgaagtaattaagtcatttttgttcataaaaccatatggctccccttttgctgaatttatggtgatgacaattggttttaaataaacaaatgagagagtatctatatccaagaaactgaaagaatcacatatcttgctggaggttctgaaaggaaaaaagaagatatacacttatgatttgctctagataaatattgttataaataagtagttctttatgtattgtctaatgtttaaggataattagctttgacttctggattaatatttaagaataaattaggaagacagcagaagaatagttatcttccagtacctgaagaaatgaaattaataaataaaattgaactttttctctacagtccacaagttaaatcaatgtgcataaaaggcaaactgagggctctttacaaaagaaaaaaaaagcctgaataatggaagccaatggccttagaattgtttgttctgtgaggaataagctctatgtgacttgaagaattcactatttagttgacttcttgtctaggaattatacagcataatgtaaattttcaggtaatttctacagtcacttacaaccttgctgcatcatggaatggtacgccaattgtaatctttaagcatatatttatactttaagcattatattcatgtataaaaaaacactatatgtagagagggtacagtgaatggaaatgcattgtcttagaggaggctggtattaaacagttacattcaaaccccaacttaagatatggtataaaaatagtgatggagaaactggtaaagagaagcgagaaagttagacatgtttttctgtgcgcatgcatgggtgtgtagacatggaatacccaggcatatacacattctcaagtaattgtgttagggatcaaatataaattcatagttgaaaatctataataagatttctagagagttctttttacagcatttagcaggattgtattttctttttaagtgccatactaaatgctttagtatcatagcaaaacataaaactcaatctaaatttttccataacattttagagtgccttctacttttatcaaattttttcatcaaatttcaaaaacatcaaaacataaattatctatggccatgtgttactttctgaaaaaatttttttttttttgcaagaaatcaagccttggagaaatatttaaaagatgtggctaagagaaacaactatgttggtcattttaatgtgaatgtttagcaaaagtgtcattgagaattcctgtacatttatggtaaacatgactagatttctactgaaaataaatatgacatagatttcccttggggtctgaaatcagtatttgttaattttccaaacccacgtatgctgtgacccatgggttttctaactcgcgtaatgtcttaaagcacatcggagaacataaatcttccctgtatgctttagttttttgtcatttgcccactgcatacaaatgagcaaaatgtctttcatggcaggagtaactgaacataaataacggatcactgttaaatttctacttggttcaaccagagatctcgttaattctcttattagccatatagaattttcataaaatatactccatgtattttcaaacattcttcttatcaacttattttctgtctatacaaatatcctcttttttatacgctgatttcagcaataccttttgccaatatcaatttgttctttcatgctaatatttagtatttttaaattctacatagttaatccaggtttaactttctaggtatatttttaattcattttcagtaagaatttaaaccatgcatttcctgtgatggacaactgaaatcaaataaataacattagtggaaactaacattgctgagagcttactcagtgttaaccattttgctaagctctttaaatgaaatatctacttcttcttaacccattttgtacacgagtaaatgtagcttaagaataaatctgaaaacgatttgttttcagagccaccctcttatatgctgactcttacaaattaaattagtcttttataaattctgaactgaaaaataattgtattgttataatttccaaataaaacaatgccattaaaaatgattataagggagagaattgaatttttgctgtatctgttgggaattatttttgggtttttatattttctgcctggagtttaattgtgatgtggtccacaatatgtaacagtaattctgtcacattttttattttctaaatcaaccttttcttttgtctctttgtgtaattatagttaatttgataaattaataaataggaaaggagaaaaagaaacttttcatctgctgatgattcacttcaacatgaaatttagtcaaatttaatctttttatttagaacttgataacaaaccccctcttcttaatttagtcttgtatgatgattcttaggcaggaaataatttctctttatagttattgattatagaatatattcaataataaattgaaagactaaattttgctgttttatcatgtacattgtataaacaatattttaaaaatagtctttttttcttttgaagacttgcatctctttgttatgtcctcttaggataattacatagcagtaaacattttaaaaagaataatatctgaaacatttggcatagtctagttactaagaaacgacagttctcttcttcaagtcccaaagcaggtaacatatgtaaggggagaattgcaggtttgatcatacttaagaacatcttacactggcagatcacaataacttaattcggaagtcttagcttttgttttaatttagtttatttatatttgaatgagagccatatggttaacatagtttgcttatccaaagttcagcatcgcaactaaaaaacatatatgaaaaaaggttttaaaattattgatttaaagtaagcagttacaaacaggagttagttgtggttcactatctggcaaaatatatattttactaatttttaaggtttcttttaatgaaaaggggttcagaagtgcttggctacatctgtatttctgtttttgattttccctaattcagaacagtaactatagagcaccagtcttaccaaacaaatgccaaagtcagaaatattttttagtttttgttgtttgttatattttctcttctagactctagctaaactgatgatctgtggggtaaatattttcatggtaatatcaatttaggatcatgaaaaatataaaatactacttattgtcatcatacactagggttgactctttcttttcttttctttctacttaagtttaacttattgttgacatatctctcaaagatatattgcaaaactagcagtagtgctggtatttgtatcctgagcagagagcacaagtgagaagaaaagagaacctttaatccttataaggcatgagcaaccacagtgtatctatactgctgagagttaaattttggcatgcgggtaataagattataagagagagaggaaaaccaaaacagaaacaaacaaacaaaaaacaaaggcatctaaccatcaaatccagtagtatatattggaagtggcaatcaaaatttggattagactaatactactttgacaattaaattatatatccccactccttaaaaatgtatgctaatttctctgtagtgtgacagtaattgaatctaagtttcaattagagtggaataggaactggggaagccacctgccttcttatggctaataagaagtattgagtcttcatcttcctacttacttactaaggaaagtctgatcctgaacttaacgaaagaagcagctataacattattcttggaaactacaatacgtatgccactgacaggctatttttcctccattcttctcaaggtgaaaatatttatacaggaacccaagatgaaagtattcaccaatctctaaaaagtggactactgtgtacttagaggaaaagcatactactttagtagtgtgacaaggctgagttaaaaatctgactcttttttgagccttattttaagaggataacagttgctttgctgtgaggagtaaataagatgtatacaaatcaactggtaaaatagttgtcttcagtacatggcagctgttgcttctctcttaatttcagaaatgttgaattggctttttcaattcccaatgtccctgatcctttcagacacgcttcttattactctcaggtaccagttatgtttatatgtagaagtattcttcacgttatttttctctgaagtaacacaactgatagaaatatggaagttgtacttatgctatgaggtcagatgacactgctgacctagattgagcacaagaaaacactcttggaaaccagctattattttgcatgcaaatggttcaggatgcttttgttctggaggccagcaaggaatcatggtggtgtaagatttcaccttgtaactcgtcccttatgtggggcaggctagatggccttctggccatagccagatacatgaaaaaatggtgaagaaaaattctgcttccttctactcagaagaatgctttatgatcagccttcatatgtgaagaaaataagccccaaatactaaaactccacatttttaaatttactttttatttataattgaaacaatattgcacatatttttgcggtacaatgtggtgtttcaatgcatgtgtacaaagtgtaatgaccaaatcaaagtgattatcatatccatcattttaaacgtttattatttctttgtggtagcagcattcaaaatgtgttcctgcagaagtagttactatggcatattacattaggtatctcagtatcagttctctactgcatattttagaaaatatagttcactttttttttcactttctttattaggtgccgaataatttatttttcttctattttgctggtactagactgatccaaagatcctggaagtagcctatgatcatttgataggttcatgtacaaatcaaaagggaaggtcaaatatttaacaaatagattttctgtatgataggccgaggtgggtgaatcacctgtggtcaggagtttgagaccagcctggtcaacatggtgaaaccctgtctctactaaaaaaatacaaaaacttcaccaggtgtggtggcacatgcctctagtcctagctactcaggagtctgaaggaggagaatcacttgaacttgggaggctgaggttgcagtgagccgaaatcacatcactgcgctccagcctgggcgacagaacgagactccatctcaaaaaaaaaaaaaaaaaatttggaataatatagtagctggtaaaagagtatctcctttagatactcagtaagtttcccaagtaactaagtttcaaagaccactttaattactataggtaaaatgcagaatactaaaatttcactgctgtgaaacaaactaaaatgtgtttgacatctaaaagctttttgtcattgatgttgtaacacaaagaaagagtttttaaagtttttggttgatttctgctgaaattctgcttccctatagttttactaaaatcccccaggcttctgaaggaaaagattctttcatttaagatatgtataatttttattttaaaaagtcacataataactggagaagaagaagaaaaataattcactgttctcatgattttgtgaaaagaatgtttctactttcttaaaataaatgagggctataagaccaactgctaaccaatctttttggggcatgtgacagatgatgtctgtaaagttcataggacctcaggggaaaggtgctatatataaagacaagagctattaaaaagtaagtgcttttgtggaggtaaactacaatccctagcgtgagattcatatttctagcggctgaaaatagggaccaagtaaaacacatttgttgggcttgtcatgcccgagacagcaagcccctcatttcagagtgatgtcccatggaaggaaactaatcattttccatcacctcagtcctgccctccatgcaataaaacatttcagcattctggacagcttccacaactgggcacaaacctctggccatgctgctttacagttctcagcttctctgtcctcaggccctacttcctggaccctcatgagcttgggttctcaagggtttgtgtttctccccctgcatgactttagttatcctgccaatgtttctgaccaaatatcccgtttcttttctaagccccgtcactttatcaaactgtggggcacgacagtatcttctgcaaaatttttagaaagaatgtcaacactttaaaaaatctctatcccctttaaacttctttatccctaacatacccaaatcatatagaaaaatggatttcttctactgctatatgttaccaggagttgtaaccacgtttctttctttctttctttctttctttctttttttttttttttttagtagtgatggggtttcactgtgttaaccagaatggtctcgatcttctgaccttgtgattggcccaccttggcctcccaaagtgctgggattacaggcgtgagccaccattcctggccataagcacgtttcttatccacagaaaactctcaactcatagttcatatcagtgtgtcagggtactgctactaataatagcccttcctggatttcatttttccagtccgtcttttttttcccctttacttatgagccacagaatcctatgcttgtttgtacatattattacatttgtcccttcctttgattttcacacattaccaataatatataattatcaatatataatactggcaaagtggctttttttttagattactcttttaaatgtcagtaaaaagaagagaagagaaaagtccagccaaggtattgtacgccaaacctcatttgttaaacagaaccccagaattactgtgaagaatcactcaaaaatcttatcctgttctctacagttaaaagaaaattttaatacttaaaaaatagtttaaaatcccaacttttccttatttttgtttgaatttataaagcaatgtaaaccatttgaaaaacaagaaagtaataaggaggaacgctaaatttctgtttgtgatacttcaagtctgtatacttaactctggcaacaggtctgcgcttttacaataaaactacaaaagatgcaaatttttcatcaaagtataacaaagttgaaatttgtagctagattacaatatacttaatttaagattatagtaaatttaagtatatatagaatttaagtagacaagattctatcttcctcacattccttaaaatctcatataaaaatgatttattctgtatgctgggtggtgaattctgtacgttttaaatgatcagtttctaaaaagggtagaattctagtataatttagagtcatataatccataatttcacagtaccagaatcaaagttaatcacaggttgaaaataagtgaagatcagatagatgtgtggatgggagataatacactgatttgactactgctaaggagtccataacggatactgcaagagccatttttgaaatgaagaaaagataatttgtgcacaagttccatcacaggtgttttgggttaagcagtcaattaccgtgggtttagaggagaaaaaaacgaactggaatgtatgctaacatctcaaagtgatatcaacgtttagactctgataaatcctcaaatgaatgtttttcaaactgtgtatcctagagggaaactcaatgatcatatttggaaccacttatccttataacatcaacatgtgtctgaagagctgttttatgtcagaatctcctttaataactctgttttgaaagaaataaacattttgaaaatcatattttccaaaaggagtggtctgaaatacaaaaccggtgagtctgggatagagctttggtttgccagtctaccttccctgtgactataaatttgaaatagtttcagttgtgttcttaggcaaatgtgaccacaatacactaacctcagtacttatatgaagtcatttgggttagagtagcagatctagaaggattgaatctccagccccaattatgacaaaatttagtagttcagcgctccagcctcatctacatccttcttgatctctttatgaatagaataataatttcttagaagatatcagtccaatcctatctttgttcactgagttaataaaactgtaaaataatatacccatatatttgctgctcaaattgtttctttatgattctggtacaataattttgaggagaaaataagatggacaaggtataaatatttcttaaaaaacttttcacgagcaaatatttaatatttttgtttgttttttgttttgttttgtttttgtaaatacaaaaagacaatatctatgtcaataacaaactctggatgcctacagttatagtcattaccactttcatttcataatccaagtattatatgatacccaaacctgaaataattaggaataaacaatgtttctttgggtctaactgccaccagcaagatcactgaaatgttggcacatccttcaagaaccctttcaatctcctctctgctgtctcttcttccctcccatttgtgtgtttaagcttgaacagcttccagcaaccaagctttttacctcctattaccaccccatccatttagcagatcacatccctaccctctttccagtgtccacatcaagacatggatatcatacaagggaatttttctcttgcaattggagccactttatcccattactggcattgtctcttgctttgctttggtatagttattgatgcacattaaaactcccagtgttgtcagattgctgctccgctcagctttgagctggtactactctttgaagtcaatgctgatgactaatacagaagataatttcggagatcattctgttgctgccatcctgacccaatgtggaactgctcagaagccattcttctcatatagagagaatctttgttcaccacttctgccagtctgttaactaagttccaaagtagtgctaccttgtcttcccagtattttagagactttgggtaaaagggatgtattagattttctttgattccctttctttctaggagttaaacatgcatctattgaagctgtgccagaagtaactctgagttatagacttaaaaaaatatcactgcagctcatctttttcttaagatgacttcttgcccacaaaattgctcaatcttctttaaatatatgcctggcgaatcaaatctatcactgttctagctatgcctggatgtgtctgaatcctaaggtgactaagcttgggctcaagctggtatccttaccatactttattttaatgttctttttgttacctcacccccattttcatttccactgtatattcaatgcttcatctttatgtatgtttttaaactagaaactactctaaaacaagaatcagctttgaaaattaaatccatgttgatacacacatgtaaaggtaatgtgtttctaaatcaaaatgctttaggtaggcttcttcagttatatatttgcaatatctaaaacatactgtatgtttaataatatcatttaaaaagttcaaataaagttttataaagaatttactttttttttaatacatacggtgtagtctgggtttctctcagtacttctactaaaataactattcagtctttgaaaaggtttagtcaacataatcaatataagtgtattgtttctgaaatactaggtcaaatagttaatgcatctatggtgtagctcaagaccaagggtaactgagcaagcattaacttgtggaatcttaatagtcactccattgctgaagtaaaaaggaaaccaagaggaaacttaataatattaaaagttattttaaagggagttcacattggtttggagggtactttgcttcaaatacaatatccacctttgtaaaacccaagaaacccgtatttgtaacatacacacatcttttcagtttttagaacataaatcttcagatccgtattatttctccacagataaaaattaaaatattgaaagtctttggaataataacaaaagaaaccccctggcaacccaaaggaaacttggaacttcttgttaagtgcttatttaactataaaagagtcagtgtgtgttgtaatgaatggaaaattgattttattgtattccatttatgaacatctctcagcaacctatttcagtattagaaagatcatacattaaaaatgatttctgcagtcatcaatgtatacaagttaaaatttagctcctgttaaattaacacttcattaaaatatcaaaataaaagcttcgtcaaatacttttttatgttgtactccaagacagaaaaaaaaaatgaaaaaatttaaagaacagattgctagttattctattctataacagttaagtttctcagttcttttttttttcttttgctaagctctctgtcactggaaacatcttaaaccaatttcaagtgctacacctgaataaacatgttgtaaaagtgtttatgtattgaagtgggtcagttcaaggtatggtatttggctggaacttctaatttctctttttacagtgaaagggctgccagaaggaggaagtctgagctgaattaatacatttgttacagtggaagtagaatggaaactgctcggaccacaaatcaaactgcctctttcatttatgccagtgatagagtttttctaaaaaatatagactctggcatagagccactgtaagtttgcatttaaaagagaaatctatatgcttatttgtttaaggtttactgctttgattatttgtaagtcccttctcttgtagaactcagtatagtggcatttgtgaggcagatggccattttaatacttgtaggaattggacaacttttcccagtaggttgtaagacaactgtggaggatacctatgctgtctaaattgatgcagcctttttttttttttcaaccaatacctccacatttgaagaacccctgtgtccgtccctctcaacagctgcacaaccttatacgacacggtctcattttctgacggtcttgttctctgcacaatggaagtatacacaaaagtttttatgctgccaaaataaattttgttaagagcaagggtttatttgctaaaatgccattgatgccattttggggacttgctttcctttcctttcttctaaggtgggtcaggttttataatggactgaggttgctccacagtctttactgaataaatattttaagaaaacatgcacatctctcatggggcaagccagagtcaatcatgcacatatttcaaaccacattatatgttactcttaaaagattgctaacttctgtatctagagtagcaactttgcataagatatacataattcttaaccaaatttacaatttaaggttaaatatcatctttgaatgattttcattgaaccagatatcaatggttttctttttcacatatatataaaatataattttcagtgattattttaaattagaagagcctaataaaaactactaaaagaggatactattaatacctaactgtagggcatttgtggaatccaattaaataatgcatggaaactacttagaaagatgcctagcacagcaaccactccaaagtgatttgacatagttttaagtattattattactacccacatgggagaggtactttatcaactttatctctagggcaccttgacttttaactcactcctatattggtacttgttgtgtcccttttcactgatatataaccacatcaaagaacacataagggtctgagacacaggctagtttataggcaaatttgagtcttgaagctcacttggattgtttattcttctttctgagagtctccaggcttggtttgcctcttctgaattcctttcagtaaacatttaggtgtgtcaaaactcagaaggggaggaattccaaaatttctatgtttatttcacaatacttcatattgataattatcaggttggtgcaaaggtaattgcagtttttgccactacttttaataactgcggcttaaagcagacctccatccccagactaggcttccagaatgacttgtgaagaactttaagtgtagtgcagcttagtaaaggttgctgggcactggccagaagtgaaggtggaaaggctatcaccactaattaacacttgaaaggcttcgaataggctggagaaagtagaaacaccctgccaagtattcggcttttataacttaaaggaaaattacagggcatttagtgccgaagagcccatagctaatatttttttaaattgttatttaatgtggacatttccaggcgaatgagtagtcaaatcttccaatttatagtattcttgacttcaaggtctgagaagctctcagtgagtgaaagcagctggagggtattctgtggtggaagaatgatgcaagatgtaacaccatagatggataattgtctgtaatagtaagcctcaatatttataagaatcttggcctgtaaggaaggcattctgataatgttttaaaacttttccccttttcaaagtaccctcagaattcattcacatcaggtaattgttctttctttttcataaaccaagtgcttttgtattacgttctaggacgcagtatcaacgtaaaatctgctggtcttgtgggaagacagggacctcagtcaaaacaaccattcatggtggccttcttcaaggcgagtgaggtacttcttcgatccgtgagagcagccaacaaacgaaaaaatcaaaaccgcaataaatccagctctcatcaggactcctccagaatgtccagtgttggaggtaagaataaacccgagcagcagttatgcacagagagttatggggtcgtatgctgcaaatcaagtagccacaataaatttaccctctatgtataccttcggatggtacattaaatcttccagtgatgtttctagcatcccagaatgtttcatcagtgaatcactcagtaattcattttaaaatacatatgagttgccttcatatgttgaaagattcagttcaaattaaagtcaagatgacagtaataaaattatgaaatggctaatcaacacaatctagccagaactgagctacatgacttgctgagctaacttcctcagggcctttcaaaaatggatggtcaaccaggtaaattaaatgtaaaatcctttctttcgtacttaagtcaatacatgtgaattatgctactcagttttatttttctgagattagcaggagaaagacataagaagacaatgattaaaatatttaccttttcattatttggaggactattatctaattttcttcaggtgtgtctacacacacacacacacacacacacacacacacagtctttcaacaaaatattacgaatgcacaattcatgtcagtctttgcaaattaatctgttaattatagagggatcaaatttcaattgatcagaaagcatctaactgccaaaatttgtagtggcttaatcgtattatttataccaagaagtaccttgtttagtccaggatgcaaacagtaagctgttagatgaaaatggtggctattttagttcaaaaattgatttcatgtataaaaataaatttgaagggggaactcatcctggaacatctcaatgtagtatcacatacttatctatttgtcaaatatgcattcttctgtgataatggccaatttatgcatagcactctgccaggcatgatggatgaactaataagcaaaagatacatgattcctatatatattattttaccaaattgaaattctaacttcaaacagtctttgtcattattcctaaaatcttcatttttctcaggttacttgaaaatgacaggtcatacagcagctatttattactcaaacatgcatgagtgtttagataagaaatagatgacgacctttatttgtttgtttttatttgctcagagacgctccataaaactactaggtggaattcattggacttttcctaaagggtaggcaccaggagaatcacgttagaagtcctatttgtgtggcaagcaacagaagcaggagggaagatttctgtatggaattgcattatactgaattaaatgctgcttataaggtgatgttttaaaataattttccaacaaagaaatttaaccacttttagtaaagcatgacactagtgccttattacaacgctattttttaaagatattcacaagatatttagtttggcaaaaagctgtaattacttaatatgaaagatggagaaaaataactttctaagaccttttcttcctggtaaatactaggctgtcaaacttgtatatttttcttttcatgtagaatggttctaagtttggttgaaatgtttttaatttaatgtagcagactgtattaagaaaaagttttgctaaaccttgaatagaatagtaaataattttggaggaaattacaaagggaaaagtataagtcacatacttattatttgagctcataatgactctggcagaggtgttccggtgactgaaatcatcaaagtccttttccctattggttaactctatttatcttctcttcctaaccacaagaaacaaatgtacgtctataagcagagatgaataaaacacatggagcagaaatcacgtaacttttcaccagtttcctaacaccatttagagtacaaaattattctaatatagaccaatattttctttttgaaattttgtcattggcaaccatttctgtgaaatatgtggtagatggttttggagtgtgttcatattttgataagaagaagaaagaaagtagctggtttgtgtctataagacttaacctttcaataggtagtaatcaagcagtctgggaaaatcctcataggatttggtctaaaagacaaggctttaaggaaagggaatgctaatataaacagaaaatttgatacttcagagacttgaaatgccagtgaaatttaaaaattatccaaatataaataacaaagttgtaatagtaactagattttacaataagatattgtgcaaaggctctatggataagaaggggtgggatggggatggagttagggaggaaagttgtattgcctgtttgcctgattgctgggttttttgcaaagcatattatcaaatgttgaaaatctccattagtacagaagaattaaaacccaagtcatttctgctatctttatcacatttcttttctacttcaacgattcttccttctgacttcctgatgttctttttttcttccatattcctgtgggagagcttagaacagaaaccagcacagaataggagtccccaaaatacttgttgagtaaattaacgtgctgacagcataggaaaaactaacttcgtttttcaagtaaaggtatatagaaccattacttccaggtttcctgcagaaactgcccggcactgcttgttcctcttcaggtttttggcaagatggttgaacagacacattgtggaagatatttcctgtttcatgttgaggcagtgcaaagggtatttctttgaatttgtgtatgagaggaaagaaaatggagccaatagctaaattctaagctagctatccttgaagatataaaggcactaggtggataagatttttttaaaaacctccagaacatgatgctgcttgaaggagtatattcagtgttgaaaagaatagagtacaggcataccatgttttattgcattttgctttattgtgtttcaaagataatgtgttttttacaaactgaagttttgtggcagtcctgcattaagcaagtctattggtgacattttttccaacagcatttgtttacttggtttctctgtgtcacattttggtaatttttgcaatatttcaaaattttactgttattattatatttgttatggtttatgttatcagtgatctttgatatttattggtaattgttttgtgacaccacaaattttacccatataagatgggaagtaaatgttgtgtgtgttctgattgctccaacgatcggtcattaccccatctctttcccttctcttgggttccctattccctgagacacaatattgaaataagttcagttagtacccgacaatggcctaaaagtgttcaaatgaaaggaagatttaaacatctctcactttaaatcaaaagctagtaatgattacgcttattgaggaaggtatgttgaaagtccagatagattgaaagctaggcctcttgtgccaaacaaacagttgtcaagttgtgactgcaaaggaaaagtacttgaagaaaattataagtatgacttcatcaacacaataatgataagaaagcgaaatcgttttcttgctgatgtggagaacgtttgagtggtctggatggaagatcaaaccagccacaacattcctttataccaaagccttattcagagcaaagccctgattctcctcaattctatgaaggctgagagagctgaggaagctgcagaagaaaagtctgaaagtagcagatattggttcatgacgtttaaggaaagaagctgtctccatagcaaaaaagtgcaaggtgaaacagcaagtattgatgaagaagctatagcaagttatccaggagatctatctaagatcactgatgaaggtagctacactgaaccacagatttttaatggagattaagaagccttattggaagatgttatgtaggactttcatagctagagaagagtcaatggctggcttcaaatcttctgacaatctgactctcttgttatgggctaatatacctggtgagattaaattgaagacaatgctcatttaccattctgaaaatccttggacccctaagtatcatgattaatctactcttcctgggctctgcaaatggaagaacaaaacctggatgaacagtgcatctgttgatagcatggtttattaactattttaggcaaactgttgagacctattgtccagaaaaaagattcctttcaaaatattagtgcccattgacaatgtacttgatcacccaagagctctgatggagatatacgagtagactaattgtttttatcatgcttgctagcacaacatccattctgctgcccatgcatgaaagagtagttttgacttccaagttttattattttaaagatttattttgtaattctacagcttccataaatagtgattcccctgaaggatctaggcaaccttctggaaaggattcaccattctagattccatttaagaacactcatgatttatgaggggttgaaatatcaacattaacaagggtttggaagaagttgattcctacctcctggatgactttgatgggttcaagacttcagtggaggaaatcattgcagttgtggtagaaatagcaagagaacttgaattacaagcggaacctgaatatatgactggattgctgcaatctcataataaaacttgaatgaatgaggagttgcttcttatggttgagcaaaaaaagtggtttctggatataaaatcttcctggtgaagatactgtgaatgcaattgtaatgacaacaaaggatttagcattttaaataagtttatttactagagtagaggcaggatttgagaagatggactccaattttaaaagaagaccttcacaaagtaaagtgctatcaaacagccttgcacactacacaaagaatcttttgtgaaaggaagagtcaatcaatgtgacaaattttatcgttgtcttttaagaaattgccacagccacatcaaccttcagcaatcaccaacctgatcagtcagcaggtatcaacattgaggcaagaccctttactagcaaaaggattacaacttgctgaagactcagatgatcactagcattttttaatcaatagattatttttaactaaggtatgtacatttttaaagatataatccaattacacacttaattgactgtagtataatgtaaccataacttttacatgcactgggaaaccaaaaaatattgtgacactcactttattgtgacgttcacttcattgcagtggtctggaactaaattcacaatatctccccagtaaatgtctctgacatatgcctgtatgaagaatccaaaagaattaacagggcaaatggcaagtcctggatcattacagaactgctaagaaagattgctattgtatgctggatactgagaatcttcgaaaaataatccaatcatgtagtggccctgcctacatccatggtgatttcgtagggcaagtctttggtatacaggtgctcttcaacttaaaatggggttatatcccaataaacccaaataaagtttgcagtaccataagctcaaatatcatagcttagcctagcctcccttacacatgcccataacatttacattagcctacagctgggcaaactcatctaaaacaaggcctatttcataattaagttttgaatatcttatgtaatttattggacactctactgaaagtgaaaaacagaatgcttgtgtgggtactcatagtatgatttctactgaatgtgtattgctttcaaaccatcatcaatttaaaaaatcttaagtcaaagcattgtaaatcagataaaatgcatagttactaaaattgaaacattctattcttgttctcaaatttgataggcgctatctcttgcctaataaatacaatgtaaatttatgcctcttggaaaaacagatattagtcaaaacaagaaaataattaattgaagttatttccatcgaatgttttatattatataattaatacactgttttagtgtttagaaataataaaatcataaataaagctaaagttctcccttgtttacctaatccatacataatagattaccttaatatgctgatatcaacatggtacaaacctctctctcatctcttttgagagaatgtatttttgttatatgcttttaattacatgaattatatattttacaggttttataaacaatgtttagccatatgtcaaataacgtgagctaattcttttcaactgttgcagcttagtattggcatcagtttatttaatcatgtcactccaaaaagacattttgctttttttccaagttggcactctcaaaataaatgctgtactgaaaatcctgcaatgctgcacaagtgagaatatttctaatccacgtaattatgacagtaactaatattaaaagttgctatctgtgccctgaatcatgaaaaattctggaaacccctcctgaaacaagtatgttgatgcatatagtatgtcgttagctagctctctctatctatatatttatctatcatctatccatcacttaatatctaatactgacttcactacttactagttgtataatcttgcacaagatatattacctctctctgactgtttcctcatgtataaagtgggaatgttaattatacctgccttgcagagcaggattacaagagttctgaggattaaatgagttattatatataactaatttaaaatagtggtacacggcaaatgctcattaagtgttgaacattataattggttttatagaactggtacaaaaggagttcaaactcttacatcagagaaaaccagaagttcacactctctcttataagtactcatacctgtggtcacaggatttcttatcttttgagactttagaagcaagagaaattttagtctttaacctaatttggctaatctatattagcaattaactacacactttaaaaaagacttgccaatagacattaaggcattgtgtctgttgttaaatttctctctaggaaaaatccacaggaagaatatatctgggtataatttcttataaataatatttattcaatatcaaataaactcccattatatgccaggcacagcattatatgctatataactatatgccatgcactatattaactatatggcccaaaatactacatgagggacttatctgagaataaatagacattttctagaattaacagacatggatgaaaccatttcaggttgtagaaatgaaatggctctacagttgtagagccatggaccattgtcaaatggctggggtatgcatgtatttttatgtgagaggaatgtggtatcagctaggaaattattaaggggccaaatcataaagagtagggtatgtgatgataaggagcagtgatgtcttcccataggcaattggaaaaagaagaatcataaccagatatgcattttaaaaagttaattttggccatggagtgcagaatggaatgccaagggtggagacagaaaactcaaataatgattagggtctagtataatactccaagcaatgaagatcatagattggagagagagatgtaagaaccaaaacacactggataaggccagcaggggtttgaagagggtggataacccaggactctggagaggggagtgttgagagtaagtggaatgtgtagggaaaagatatagctataagccaaattgttagatgtaggatgaggctgaccaaatgccacaggaaacaaagaaagaaaaaatataagatggagcctccttggggaacatcaacactgtaagtacaggcagaggagaaaaagaaattccataaaataagccaaaaaaaatcagagatgtcaaagaggagcagggataaagtgttattttagaaaaggttagcagaagaggacattgaggaagtatgaggcaactaagagtgcaaagggcttccaacaggatacctagattaaatagtgaaattgatcaactaatgaggctttgtggatccatttaatataggatcagaggggaaaaatgaaaatcaagaagcttattaaattttctggcctggacgactgatggtcctattaacaaaaatagtgaacattgagtgtgaggtcagaagtagaaatagtgagcaggaggcgtcagggaactgtcctttagaggtgtctagcaaattcaggtttgtggatagatttttatatcaaggagctctaaagtgacgatgttaattacatgatccacatggatactttgctgagcagagttatgcaaacacattacagagttattttgtggtgtcttgcgtcacacattggtacctacacaaacacaaaattgtgttaatatatctacaaaataaacaacagtacgtattactggcttgtgtgtaaatgcaagtgaataattcactgggtatagaaaataatgattaagctagaacaacaatagcattttaaagccccttatctttgggtaggattgttatttatttttgggcttatcctgaatttttctacccccaaggtcatatcaaaatccacattatggtagcaccattcctgctttttcaactcttgtaccttcattcatttatcattttaaatttttataaataaattaaggtcttctgatgctttaggtatcaacttcctttttccctctttctctttgggaaataagagtgaaaacactaacatctcctcttttgctttgaaacagcagcatatcatcatatttagctcattgaagctgttgtcatggttaaatgttaagttttatttctgatttttctttgcttttatagctatatctgtgtttcatccctttaataaactaatactatgttctgaagaaaaaaaatggtatatgaaggtttttggcctggattgtctttgtccagttcacagcaagtctatcccatgtttatttatttgtttttttcaggagctagtatgcagaactttgacagtccatgcagatttctggaatttgtttttattgatacataataattatacatattcatggggtacatgtgatattttgatagatgtatacaatgtgtaatgatcaaatcagggtaattaagatatccatcacatcaaatatttatcatttctttacattgggaacattcctaatcttgtcttctagttattttgaaatgtagaattaattatcgctaaccattgtaaccatactgtgctattatcgaacactacaactgatttcttctgtaagttttttaaaaagctgtagttttgtgttcattaaccaattgttcttcatcccctctttctgctaccattcccagcttttggtaaccaccattctactctctacctatcttcaggagatctttttttttttttttagcttacacatatgactaagaacaggggttatttgtctctctgtgcctggcttatctcacttgacatcttccagttgtttcatccatcttgctctaattgacttttttttcttttctttctttctttttttcttttttttttttttttgagacagagtcttgctctgtcgcccaggctgaagtgaagtggcaccatctcgctcactgcaagctccgcctcccgggttcacgccgttctcctgcctcagcctcctgagtagctgggactacaggcgtccgccactacgcctggctaatttttcgtatttttagtagagacggggtttcaccgtgttagccagaatggtgtcgatcttctgacctcgtgatccgccctccttggcctcccaaagtgctgggattacaggtgtgagacaccacgccaggccaatttcattctttttatggctgaataataagctgttgtgtatatgtaccacattttctttatccattcatacactgatggacacttatgttgcttctgtatcttgtgaatagtgctgcaatcaatatgggagtgcagatgtatcttcaacttattgatttcctttgttttggatatatacccagtggtgagattgcttgatgatatggtagctctacttttacttttgggaggaacctcaaaaaagaggttgtattaatttacatttccaccaacagtgtactagtgttcttcttatcatattcaggaatttttgtgttttaccaacttttacctccacgtatttattttgtttttcatgattttattctaagacaaaaagaatcaaactaaagaaaatcgaactaaagattaaatttatacaatatctagaaattgaccataaagaaatttgcataaagtatttagcaatatgtttactattttggcatgggcttcctaatattattactattaagagacaaaacagagaaatattattgataacacttgcactatggataagacatgttggtttactttttctagtgttgattgtagaacattttaataatttttgccatgactcttcatttgtaggcaggctcattaacagtagaattatatccatttcatactaatctcctaaaggctgcccatcagtattttaaaagacataaatctaacttccttgcccttcctcctacggcttattctgccaagcatttagagtaaacctaactgcaggcttttctagtttgggtacaacatttacttcactcactatccattaatttttatttctgacagaataagcatatggtcctaatgctctatgaaatcagactcttggaaccagattctgttatacatttcattgcttgttacatttatgtgatgttacattatatacatcacttagcctgcataaaaagacatatatatggaacagatatattttgactttaaagttttattttctttattttttatatacatagaattcaaataatcatatttgtagtttatggcttttcatataaacatgtatgtgctattggctacaatgttgttattcatatttaatatttttaattaagacaaagatgaatagataaatattcccattattacctaatgcagagtttgaaaaagtaaggcctaataaccaaattaagcctatcatttgtttttgtatgacctactaagagtggtctttacatttgaaaatgtttgcgtggaaaagaaggacaatattttgcagcatgtgggaatcatatgaaattcaaattttagtatccataggtagttttactggaatatagccacacccattcatttacgtattgtctacggttgcttttatactacagcagcaaaatcgagtagttgcaaggagaccacttagcccaacatatttactatcagtttctttaaaaaaaagtttaaagaagtttaaaaaacttttaaaaagtttgctgacccctggtccaatgcatagctaacatttgtttttccccgttttgtatatcaaggagtttatgaaatcaaaccaatagtagaatcaattatttctttttctaaacacgatcgaggaaatttaaccatttcatgtttagtgttaaagtgttatttatccattgcctgaacaaagttagctgcaagggagatatttccctgaagaagaaccagaatgtagagtctgaaataaatcctctctcccccatttcccattatctacttatttaatctgttttaatgaagttaattgcatagtaggaataaataacctagaagaaaaataccttgatttcaaaatttaatcattagcttgttttttagattaacattaaacaaataattacttgaagtaaccatgagaagcaaggccctctatgatgggctcctttgatctctaacttgcctacactttcattagaggttgagagtaattaaacaggaaggtgacactttaacaaaaactgtaaaacaaattattttttaattttatttctttaatattttattttagaaataatcaaagtggactagtttttcgaatgttatttgtacaaaatgtgagcaaacccaacacaagacaagaatgaaaaatgttccataaatctctgtgtttcttcagtattttactttattccagatgcaagattgaaattctacatttatatttaataatttaaaacaattataaaaagttatgggtatttcagattacattccaaaatatgtaatgatagtatttcacttgcctcaaatcacttatggaacactatgagaaatttgtccattaactcctcagatacttttttgaatgtttattttatgccaggcactgttcctggcactagggatacatcagtgagcaaaacagagccaaacgagattcttgcccctatgacgcttatattttagtgggaggaaacagacaagaagccacacataaataaatgaggaaatgacatagcatttctaaaagtgataattgagatggaaaaaaatcagaacagagtgagagaaatcaggtgtatcagggtgagagttgcaatattaaaagggtagtgaaggtcttgttgagatgttgcttaagcaaggacatgaagatgcaggaattagccatgtagctatccagggagagggactagtgagagaaaaggctctaaagtgggagcaaggttgactgtgagtgaaacagcaaggaggtatggtggctggagcaaggtgaaggagaagaagtgagagtcagaggggtaataggatcaaatgagtcagaggggtaataagaccaaaatgtaaagagccttgtaaccactctgagaatatttcactcttaatgatatgaagaccatagagggactggcagggaagtgatgtaattaagtttacttgttaaaaggtccacttgactagtttgctatagaggagcaagggcagaagcagggagactagcaatgaggatattgcagtaattcatgccagagatgatggtgtcttggaccaagaccaattatgaagggcgtgagagcaggtgcattttggacttattgaagatagtgtgtgagatttcctgacagattggatgtgtaaatgaaagaaaaaaaaagaactattttgattcttgttgttttgttttggtttttattttttaacccaggcaactaccattagtcaagaatgaagtctacaggtggacaggattttgggggatgattagaagctcaacttgtggtatcctgaggttaagatatttattaaaataaaatcagctaagtaagatcccagtatctgcctcatggaagatgttacaagttattgcacaaatattatatatatataatctctctcaatatattaagtacccctagagtatgaatgaattaatgaataagtattcattgagcagatggtactcaatgaacgacagacaccatgctgtgccctgtcaagtagatggcttaacagaatccatgttagagcttcatcaggtaaatggtattgtctacatctcacagaagaagaaactcaggacaagtaacttgactgaagttcacatggttagtaagtagttctaactttaagattgaaactcatttttccacaacttcaaataaaacccctttaaaaaatcttaccagtgatctcacaaaagaagtattagtatatctgtaagcaaccatttattcaaaatgtggtttttatcttcagattataacacaagtgagcaaaaacaagcctgtaagaagcacgaactctatgtgagcttccgggatctgggatggcaggtaggaattttcagtcaactttggtgcttcttttctgaattatcataaatccttaataagtcatagtctttggcagtaattttccaatataatacccaatgatttttgacatgaccatttagaatatggcttattcactttattttcatttctcaattaaccttttaccattgaaacatgattagtaggtatcacagtcaaacaaaaaaactacgctgaatgagacatagaacactaagatatttaggaagaaaaaaaagagtgccgttgtttaagtattccaaacttttaattttattgtaaatagaagatttgttcatattagtataagtaactccactaagcctctgagggtctccaactattggaatgtccctgtcatggggaagatgacagacatttttttttcttgcacttaaaaatgtattgctatcttttgggtagcctttagaaacaggatgaggaggaaaatttcaccaaagtaattttttaatggctctatgtggtgacagtttaaaatgaaattttaagacttctcctaatattctattagaatggattctcatatatgagttcctgtattgagaaatactattaaaatgtaaatatattcaaaattcatgataaactttccacatgaataactcaataattcctacatttgtgccaagttttatttctctgtgggaaaaatatcaaggcaaccattcatgtaccaattctttagcttcccgaaatttatcatgttcagtttttaggaatttgctccaatttattttttctaaagagaccataaagttaatgcatgaatggaaagaaaaacagcatgcagaaaaaatattaaggctttaggatgttgtcagacttataaaactaagaatgagttcttaagaagtaatgagaatgatctcaattaacttgattctcctttttctttcgggttcacttgaactttccagagttcatcatttcctgtttaaacaatatttagaatgctattttcttataatagttttattcgtgaatacatgtttaatacatactatgaatatcttacataactaccccttgggagtaattagagaggacaatttcttgtgaaaatatttatacttttgtcctaaacttcagcttaaaattaaagggtgtggggaagataattccattagaataattgttggaccaagaatagaaacctattcagatacaatatatttcaataacttttaagattttttaaaaatttttactttggtgatattttttcttgttgtttttttttttttttttttttttttttttttttttttttgtgtgtgtgtgtgtgtgtgtatgtgtcaggactggattatagcaccagaaggatacgctgcattttattgtgatggagaatgttcttttccacttaacgcccatatgaatgccaccaaccacgctatagttcagactctggtaagctttgtttttgaaggattaagaaaagcttagaatgcaagcatattataaagttgttttagaggaaagcatctatttacaattttaatgcattattttatcttctcaaactcatttgtttctttttagagctgaagtaacaactgtgggtatagtcaggaaactcgggctggtttagagtaatcccagttacacaatggagaaggattcagctaggaaaactggagtaataacatgaaatggtcatcttgaactgtttgttcattacacagtatgactaagcacacaggttccctggggctgtttctaacctagcaattcattagtaatcattgcaaaaacattgagtaatagctgtactaaatttcatctgagggtttttaattatttaagaatgttctataacatactttggtattataaaagttcttcaatgtagtatacaaataggaagctaatttctatttcttattgttctcctcctcctcctgtaatctttaaagtagaaattatacttccttttctttattcctcaatctcagaaacttagcagtgattaaatctctaataatctaggcttatttttatgaacaatgtactgaagggttgacgtgattaactgattgccttgtacctaatgagctcatgaaacctattgagagtctgatgtacctcatagcatctggcctatcgatttggcagaggaacaatctccctaagactaaatgagaggctcctagaaaacataccagactatgtgacataattttaaatcaatgtttgggctaatataaaaattttaacttttgtatttaagaagaatgggagagaacacattattttagaatcaaggcttgatgggagtggaattatttggtggacgccagtaagagaaaagtagatagtagacaatcttgtctttgtgggtgaggtttatttatggaaaaagaaagaattactcttagaatttgtgaagattcgactctccataagtttgctattttcccccacaattaatttaaaacttaaagctgaattaaggaataaacaatgatatctgtgaactggcaaaagcaaatacttgaatgacttgatatttactggcatctttattgacttaataaaatacgacagaatatctagacaccaaaaagtgcaatctataacaactagagcatgaacgttatcaaagactggaaataaccttgggctagagagcaacagaaagataaagcaaatatacattttgataataaattatttataagtattcttctttttattgattcatgaccagtgagaatgcctactttagtgccatatacaaggtaaagagtaaatttctggggggatttaaagtctgatatgacttcacctttgctatctgtaagtataagctcttctttatatggaatagtgtttccaggagtatggagtgtaggtaggctttgcaaggatggatgttttgcattcaaacttctaccactaaaagaatttttaagaagctaacttttctctttgtatatgagaattcatgttgacatgaaagcatatcagataaagaagaatgctgttgtttcatcctatgaagagaacttcatgatcactgtctttctgtaaggtcatagaataactcctatcagttgaagtaatgctatttaatttctcagaaaattctttgcctctttttatcatcattttgatgactatgaaagcagacttttgcttccttagatatggatctaatgtatcaaaaattccctcaggctaagcaatgcctacttattgaaaaataccctttgtcaaatactcccccttctctcattttttcttttttaaaataaataaatacatattttcagctcttatggctgtagtaaagtatcaaaaaacaaatataaaaaaaatctgacacaaactttgaacaagagtctgctctgtatctctaccctgggatgtaggacataagtcattgcaaaactggagcatacacgtgaagtttgattttttttccctggtgttgtgcacgctttatgtttgttctgtgaaggacatgaaacaaaaagacggaggaaagcatgtttgtgactaatatattgagaaaccattcaagaacaatccattttttttccgttaggctgccaaggccattgaaacagcaggattatcaatcatgtatgtgtgggttatggaagataaagctgatgaaggacataagcagcatcagaaatttgtagaaactatccaacttttagttttgtgaggccttaggaaatttcaagttcatgtcagatcacctcatttttcctgctgtttctgtccacatgcaaggcccctatatcatttcagccaggacgttgtacagccaaaactgtaagaggctgtatttgctttttgtggatcccgtaagactcatcagtgggatttcccataaactcctctgggggaagggccagaataggtgggtgggaaatgggggaactgtgttctggctcttttctcaattatttcaaatcataggcagactgccagtctgatcaaaattattatcaaccctttacttaagcatttcacttttcatgtacagacacctttttaggcttttggggaggtggatgttcatttgtaaagtctctaggccctttgcttctgatttagcttagcctgctttttggcacttgtctagggggcaggcaagggagaaaaaaagtaaatggatattaaactccagccaatgtgataaaaaaattctatgaagagctgaaatcattgctctaaggcaagtattggattatatgtggattttattttattatgatttttatgcttcttttaccatggaaaattaagagttggcttaaaatgtatgatttattgcttaattttccttttaaaagataattcttagatccaaatctttctgcaactatgtgttttcattgatttgctcttgtaacttccatattcctcatgatatatataggaacagttatttcaactaaaagcaacaacgtgctagttgctgtgttctttccctaggaaaacttccactgaatattctatagaggaagttttctttatttggtgagatatttttcaaggttcaaacacataattgaattggctgggttgattccaggtgttaatgcttaagaatacatccttcagtcccccaccccagtcatggaataaatgggagaagggagatcagcttaatggtgtgcctgattatgagtgataaaataatcataccattttaaaactgcaaaagaatgtatattttatttcttaataaaacaaaaccttttttctttcccaggttcatctgatgtttcctgaccacgtaccaaagccttgttgtgctccaaccaaattaaatgccatctctgttctgtactttgatgacagctccaatgtcattttgaaaaaatatagaaatatggtagtacgctcatgtggctgccactaatattaaataatattgataataacaaaaagatctgtattaaggtttatggctgcaataaaaagcatactttcagacaaacggggaatttcctaaaattagtctggctcattttgactcttttcctatgtacaatatcatgtatatagtcatttttatttatttaaacgtatatattctcttctgtggaggctttatcaataaaatctatttcataggccactacattatacaatagatcatctagtataattttcaatgggttatgctgagtccattcaattccatttcaacatttttttctaatacaattttacataattttctgagattagacagaactcctttgactgtttaatattgtggaaggaaattgaataatttagttatattgtgccaatgaaaaccatgatagaatatttatttagaaataagacttaaaaaaataacaacccaaacaaaaattcttggataaacacaatttctcttttagagttcctgcttcattagataaagtgaaatgttgaactggatttgaataaataaacggtaggcagaacatagaagctgaaagattgcacagaattgttttaactgtttgctttaacagaagtggtgtaactgtaggagcatgttcctttttggcttgtggattgtagattttgcaaagagctcaaagcttcaggagacaggcttgagcctgtgtccatagctttccaagttaacactaattgtagtacaaccttcttacctcaaataaatcatgtctgcctattatctagaacactactgctgcagaatttttttttcagatttaaaaacctagtccaaaataaagaaacatttacatgtgctccactttcctccccacaggcaagagtcactgcatgcgtaaaatgtacaagagcagaagatgccgaaagaaccattttctttagctctcctttataactgagtttgctgattgatgtgatgcaagggattttatttagaagtaaaagcactgaaactaaactggaggaaattaccaaaagtcccagaatggctttgacagaattgccatttctaaagaacagctgaaattcatttttcatatctttgagagtgagctcaatgaaaaccttattttgtaaaggcattttgtaaaccttcttccaagcacaaataattccaaacaggaaggttctgttgtgtgtgtgtgtgtgtgtgtgtctgtgtgtgcatgtgtgttcttccctctaaaattaatttattttctctatctattagaatgccctctaaggcctttctttaacacacactgactttttgaagaatgatctttagattgataacttgctatttatggtgactctgtggttaggcttatttaccgttaatctaaagtattcataaagcaccatttattaatcatccttttggatctttcaaaccaaacgtataccaaaaatgtcttcaaaaatgttatggctttgtttgtaattcgggtatattaaaatgttgttttgaaatacagtttatcttaaagaaaatttgacagtaactatattaaggggtacattaagtaatatatttttaattaatggtgtaccattgagagaataagaaatggaagtctattgttttattctttaaatgtgctgtttaaatatatttccatattttaaaatatattaaacagatgctaatttctgctgttcttgatttggttctttatttaaaaggaatacaaaatgtaagtatatcataaattgagacaataagaatatttatcaaatgtaaactgtttgtggatcacatgattctttatgttgttcttaattgccaaaattgttttttgtgttgttaataattatctcactattaaatgtgcaaagcaacaatccatgaattaaagattttcttaatctgttcaaacaacaaattttaaaaatagcaaaaaataattagaatggagaaatacctcatttgttctttttcatatgagaagggaggtaattggcatcagtgcttttgcattttctaaaattacatatgtgtagcataatacgcacatatacttggtcacattagtttctaataactattacagtaaactcttagtatcaccttggtgatactcaagctcttactagacaccagaataatttgacctattttaacaggtcttcattcaggtctttttagttcgttaatgatgtactcacttttttgattgtttatttttaatttttctgttttatacttgtttttactttgtaaagtggccataatcctttttggaaatagaagggcataaatcataaatattcaaattctttaaaactaaggcaaaaatagtctacattaaactaaagaaattaagaaaacacaggcagaaaatccaaaattatttttttctcaactaagaactgtcattttataatcctagtatcatcatcatcaaacccaagccagagtctactgggtacttcacaagctggcagatatcatctcccaagacatttacaatgaataattagcttatgttccagttccattcaaggcagaagaaatcctcattcccaaacacaagtaaccatctcataaccattcagtccagtgctcaatctattatctaatttccatctcagattacctatttttcctttcacaattttttttttggtctggaattttttaaagttagaagtgaagatgcctttgctgataaagcataaaaattgttggtatacaggtatacatctgtgttttatcaagtttctttaagatcataattgaagagaaagtacaaaaagtaacaatcaatgtcaatgcttatttaagtagaaaatgatgctatatccaagttagcaattttaaaaaaatagcaaaggctctgcaaaattttaaaagtctattgtgatatttgttaaaggctgttttaaatacagagatttcaaagacaggaaaagtcacatcagatacagcctttgaaaattacaaagaaatttcaaaaattaaaagcatgtatgttaacttttgcatccttgtttcaacttcactaaggcagctagcctaaaatcaattctgggccaggcgtagtagctcacatttgtaatcccagcactttgggaggccgagggggtggatcacctgaggtcaggagtttgagaccagactgaccaacatggtgaaactccatctctgctaaaaatacaaaattagctgaatgtggtggcacatgcctgtaatcccagctacttgggaagttgaggcaggagaattgcttgaacctgggaggcagaggttgcagtgagttgagatcataccattgcactccaacgtgggcaacaagagcgaaactccatctcaaaaatcaaatcaaatcaaatcaaatcaaatctgaagggtcaaggtaggggatgggtagatacagtagagcctcaacttctgtaaattatagagaagagaataaagtagataatactgcataaacagcctcaagaatcagtctggaaacaggacctaacccaagagtttagtgggatataagcaatatatttttcagttcattgtgcataatactatatagtgaaatatagtagaacttacttaaaaagctggactatatttattttctttcaggtatctacagaaaaagctgagtaggagaaaaattctcaaacctgagcataagcccaataagatagcttagactacatatcactttctccaatacacacacacacacacacacacacacacacacacacacgtgtgtataggggagaaatgagtactgtattagtagcattttctgattgctattagcctggagctttggtcaatgaccattccatgtggcaagaaccaaagccttaggtctgtgcagggcaggagctcagatcagagctcagatttcagactagaagtcacactatgtatggcatctacacatacacatatacttgtgtgcagttatggcataaatgtaagttttaaaagtctctgatctgattagtgaagctgaaaaagcatttgagagaagcaaacgcgaaatttatcttttggaacttgacgttcaacctaggactcaaggaaatcccactgaaaatatgccaaggaatataagctcacatcaaaacaaccaaaggaacaaacaaacaaaacaaaaactatcacaataaatgtacaaacaaggcaccataagagctataagaaataaaaaagggtaacaccaaactcataagtgtcctgtttactgaattattggatatagaatataagtaagtatattttatgtgatttttcaaaaagaaagaataagaacgtaagtataaacatattttaaatgaatatatcgaacatctaagaagaaaaatctttaagctttattggatgtgataaatagtggttttgatatcaggaacaagagaaatagtgagctggcagacagatctgaagaaactatccagaaggcagcattaagccagataaaaagatggaaaatctaacagagaactaaaagtacatggggattaaaggagctctaacattcatctaatcagtcttccagaaaattggggacaatttttgggctaacagttggctcctcaatcaaactgttttctcaacttaaaagtcagtcaacttgtaattactgtctttaaattgataaggaaaaataactgccatttagaattctatatccagcaaaactatcttcaataattagggcaaattaaaatgtttttgagacaataaaacgaaaattgaaaaagaatttatcattaatagcaaagccactgctaatggctatacctcaggaagaaagaaaataaactccaaaaggaaatatacgcaaaactgataagaaaaaatagtaaacatgggggatagattaaaataaatagtattgtctaaaaaccatggttaaaaaaagcagagtagagttagaatagtgttaaaagagttaagatagagtttaaaatacagtgaaactacggaatgtatgcaagaaggtaggtaactgaaaatacatgttttgcattttactcgatgatgatgattaaatttgatttggcctcagaattcatggtaaagttttaagtgcaaagataaaataccagaaaaacaatatatatcttctaaatcagggtcagcacactttttctgtagagacctaacagtaaatattttaggctttgtagttttgttccaactactttactctgcatctgtagtgtgaaagcaaccataaacaatacctaaatgaacgagtgtaggtctattacaataaaactttatttacaaagatgtgttggattggatttgggtccttgaattgtaaacttttgacccctgttctaaaccggtaattgcaatgtgataaaatgcaattatttcaacaaaataaaaaaaaggaggaaaagataaaagagacacattaaaagggagaaatgttgcatagagtagtatgatagaaataaatctaggctgagtgtggtggctcgcatctgtaattccagcatttgggagaccaaggagagaggattgtttgggctcaggagttcgagaccagcctgggcaacatagtgagaccccatctctacttaaaaaaaataaaatcagcctggcattgtggcatgtgcctgtagtcctagatacatgggaggctaaggtgggagaatgatgtgagcctaggagatggagactgcaatgcactatgatcatgccactcctccctgggtgacagagtaagaccctgactgcccccccgaccacatccccccccacacacatccagataaactcatgaaattttaaatgtttaagtgtattgaaaagtcacttttaccatattagatttaaaaataataacttcaaccagtagctacatgctatttaaagacccaaaaccacagaaaagtttaaagtaaaatgaagggaaatatatatcagggcaacaatagtcaacaacagaaacaaaaactctgacttaatcatatgtataaagtgtgttcacactttaacacaaaacaatcattactagagacaatgaagatcaacacatattgataaggttttcaatcatcattattttaagcttaataagcttaagtgtacctaatactatgttttaaaagtgaataaattataaattgttagaactataaggataaatcaaaagtgtacaattttagtgaaggatttttagcaaactctattattaattgatagattaacagaaaaaagattactgagaatacagcagatgccttattaacaaatatgacttaatggacatatgtagaacacggcagaatatacattattttcaagcaaatatgacaggtgtattagtccgttctcacgttgctataagcacatacccaggaatgggtaatttataaaggaaagaagtttaatggactcacagttccacatggctggggaggcttcacaatcatggaggaagatggaggagcaaagacacgtgtcacatagtggctggttatttgacaattacttgttttaaaggtgaaagtcaacaatattgtaccaaacaatacatcttgagggcaataagcctttctaaggtgttctacttagaactttagtttatttgagatggcaagcatttctccaaggatgtcatgatagaaagaggaaatatttgaaaaatcttggctattgaacataggggtccagtgaatctcatctcacactaaccttctattattgagggctgttattaagtgaaaataagtttaactactctgtatcgcccaatgcaccttgaaaacattttttttattcaccagtaacgtcctttctaagttttgcctgctgatattctattgattcctagagacttttctcatttgtgaattccttcaaaatgaccaaatacacaaaaccatgtgtatttaatccctctaataaataactatagcactcttattttgatacatgcttcacatcataccattatgtcagttactacagttatttggaaatattctccctctacattgagagatagggaaatcttagcacgttcattaatttatcaattccttaaaaagttatcacaaagatattctcagagttgatgctcaataaatgatttagaaataactggaaaatggtctaatttactgtttaatgggaaacagatagcacatctaaaaggaacatcatcaaaattgagaaagtgaggggactaatttccttattttaaaaccaatagatcccagtatctttcacttttagagtatgctaatctagataaaacaagaaacacaatatgaaacccacaggatgatttcgtttttctaaattataagaggagaaaaaagcttccaaccaacgtagaaagtgttgcctaattcacatagtggtgatacagaattggacatagagacaaaatgaatgatttatgtagatatccatgagaagggagtttcaggcaaagatagcaccaattgcagaagtatggttggcatattagagacacagcaaggaggccagtgtggccatgcagagtgattgatgggaaaagaggaagaacataagtgtaggctgatagtaggcagccaggttgtataggatcttgaaggccactggaaggactttgaatttttactcagcgatgcatagccatttggagtttttgagcagaagaggccatgagttgtattttaaaaggaatctggccatgtgaggagactacttggtgttacagtaaaggcagaaagaaaggagggcaggttagaagacactgaaataagccaggcctagagaatagggtaacttggactagtgtggtaatggtagaggtgatgagaggtaattggaatctggaaatatttcacaggcagagttgataaggtgagttaatggggtgtgagaagggagcgaatgtgttattccattctgcatggctctaaagaagtacctgagactgggtgaattctaaagaaaagaggtttatttggctcatggttctttaggctatacaaacatggcaccatctgcttggcttatggtgagggcttgggaagcttttacttatggcagaaggcataaaggggacccagcgtgttacatggcaagagagggagcaagagagaggagagaaaggtcccagaccatttcaaacaaccagatcttgcttgaactcagaaccacctggaagacatcatgccattcatgaggcatctgccctcatgacacaaaccacccccccacaggttccacctctaacactggggatcacatttcaacatgagatttggggggacaaacatccaaagtgagttaagaactcctgttaataaggctcaagtaactagaaagaaggaggaatcatttattaggttctgcataggacagaaaggaattgttccaaggagttgagaccttggttatgggcatgttaatgttagagtgagatgcccggaaagcagttagaaatgtaagtcctgatgttgcaggagacatatgcgtcagagatataaatctgtaagtcatcagcaagtaatggcatttaaaaccatatactcagaaagattactactgtaggtgcgaagtactggaagtaaataagaacccttctccaactttttctactcagctaaatcacaccagggtctacctctggaaaacaggtattgaggtggagtccatcagcatagtgctggggatgtttcttatggaatcacattatctctgtttaataagaagggtcatttggaaatctctatatgtttttcagaaaataaaatctaggtactagttactaaatgtcttcacttgctgaaacttttagatagtccaaggagcttttgggaaaatgaatacggcagtgagaaaaaaaaaatgaagctaaacatctgggaacatttgtataacatttcattgatgtaaatgctacatgaagatgagtttttaatgaaaaacaaacaaaaaaagtaatatgtatttttcaccaatactgtatatgtggtgagaaaaaggaacttaaattgtagcataaaaggtttaggagagacataaagaaggtttctctgatttaaaatatcactgaacattaaaatggctctccaagaaaaggctttgaaaaaccctttgcagaagagatgttaatatttgatcatcctcatctctcaccattgacaagatagttctgccttactttcgattaagttcctttatatattcttaagatttacttgatttatacagcttcactttgtgctaaaattacatctactttctttttgtaaacttgctatattttttgcattaagacctagttatcaagaaagttggttttccaagaatagttagtactagtccagaagaatttgtgtcgtggggaaacaatgttattaatccaaacacttctagatgttgtagtattagtgtgatcattctgtaagtggaatatattattgggttaagatatgttattattagacaaataatgtattctttgacaatactaatttaataaaatatgtagaatttttggatgactttttaaaatctgtgctgctttctcttatttcaactttactagttttaaacattagtacctcaaactttgtctctagagcctgaagaagtcttctaaaatgcttcatattttatctgttttattattcaaggtttctaacagctctcataggaaatgctacatcctaaataatgttgtaggagttgatttgaaagagcttatcctctttcatggctgtgtgttaaactagaatgaacacattgaagaagtatgttttcttactttttctttcaagcatctcctcataaggacataaagagtgccaaaccatcaattagaaagaaaaatactttatctgttttaaaataattgttatcaagccagttatggccaaataatatataaaacaatgttcaactccactaacatttatgaaaagacaaataaataccaaagtaatgtcacaatacacactggattggcaaataatttttaaagaatgttttaacatggttgaagaaaatattattatgcattattatgttgctggtgggagtataaattggtaaaataattttgaaagccattaatataataatgttaagaagaacattcacatacctaccacctagggattcctctcctaaatttttaccttggaacacttctggagatctgaacctagaaattatgtgagaaggtttatgacaaaactctttatcttggagaataataaatacaggcatgtatgttataactaaaaatacagatgtcacacagatattgatctgtagaaaatggacaaatatatcacattatatatcagtgaaaataaattagtcacaattctatagatgaatcccacaacataatgttttagaaataaagtatatcatagaagattacatatagtatgatatactttttataaactcaaaataaagcaaaactcaatattttaggcacatatgtatgtacattaagggatagcaagggaatgatttaaaaattttaaaattcatgatggttatcccaaaattatggcacagtatttaataggtgagggagatatttataatgctacttcttagtataaatgatagttaaaaatctgatcttataaatttttaaaaatgtatatgcgatttttacctcagagggagataattacacaaaaacacagctacaagaggctcgaacaaattgagggttattactgcaacaatctatcacatttatttttatatattactttgcatatgtgcaatattcaataataaaagtgcttaaattttttaaaaatcaaatgattaacacctatgaagtgatatatgtcaagacctcaagatgttcaatggaagaagggttattctggttggcgggatcaagtcaggctctgtagcagaaaaaacagtaaatatgggattagaagatatgcaggcttagggtttttggaagtcagaatgcattgcaatctaatagaaaatataaggataaagcaaaaaagggaaaggagtaaggggggatttgtttatttatttatttattttactaaaacaacaaggtttaaatgacagcaacaggaaataataccctgtatgtaggaaagagtcagataaaacaggacatgaataataggagaaagggtttaaagtttgggcggcaattaaaatcattgaagaattgtatttacgagaatgacacagaaaaacgtaaggaagaattttgttgtacactttcagttgtcatttcagatcaattttttctcttcattatagacatatagctgacctattggaaactagctgcttacctggcagctagttctggtgccgtaactaagttctcactaaagaatggcagaggaagtgttgtgtgctatatttttttcatttggataaaaaaagttgattgtttctgtttccctaccctcctactgaaatgtgggatatttcagtcagtggagagagagaaagagagaaagcgggggggagggagagagagacagagagagagagagagagacagagaaagagaaagaaagagagaaatacatagagtgagagagatttttttcttactttggcttctcttcattagggcattcgccattgtagctaatacaagtaatcaggctgcagtgtgaaaacatatgtgtatagtagggaaccacaaatcttggcaagaataacaaaaatgatttatatggatgtcaattattatatatttgtaaaggctgcatgaaagactgttgagaaaggtcttagggtaagtttacacattaaaactaattaaaaagctgaagttcactaacaatgtcactaccttaattccagcctgtagtgtttctcatcacccttactacagtatgatgacctcctaacaagcatccactttcattcttgtccatggcagatcacccaagaattagttaagttctgccaccagaataatttatccaaaatgtgactcggattatgtcattctcttgcttaaaattcttcagttactttctaccacctatttaaaaaaaaatcctagatttctaacatacaagactcagtgtcctggagtgtgttttctcatttttaactgagaataataacaaaaactacctgattgttcttgtgaatatttgtaataatattttcaaatatagttcttggcacaaagaggaaaattagtgaatggtagctataattctgatggcatgagaatcttgcgcaaactccattaaaatttaccatggagtatgactgtaggaagcaagaagttattaaggcaaacaaattggctaagagagttcgctgcatacaaaccagccttgaagaaagccattttaataatagaattaatagtacaatatctttgagatgattttttgaataactgatcaagtttcctgagtttctgatattatcagggtataatgatattctgaagataagtctttctgtagcatcctgaacatgtttgcacaactttcctcctgaattccagacagttcaagtccatattaatcaggccagtgaaaagaacacggagatggtactttattaccttcaaatgaagctacttgattcttgaaaaatatagattacttattttaaagaaactgaacattttcttagccaaacattggttatttgctatttggtaatgcatgagatgggaagtcagaaaccctaatactgtaagattattcttgattcttcttaggatccttgtgaaagtaataagctcattatagaaactctggaattggaatctaaacaatttcagggaggagaaattgtttagataattgtggataaacatctaaatgtgttcaaagtaattgctaaaactattgagatttgttcatcttcattgtttaccttctgtcacattgcatgtatatagcctgtaaggaagaatgtttaaaaatgaggtgatgtaataaagccgaaaatgtagaaagaaagaaatagtgtaaatactaccctagctttaattagagaatggatgggagacaggaagccaggtaggagaatatccattcccaacacactttgttattctttgctcttcggttattgcattcatactgttgtgcactggtgtctactaaggccctcattaaaaggtgatgctcgaatgttggcctgcagtaccgcacacattcctacaaagaatgagcctcagacatcacattctcctaaaatacttccccaaataggcagattgaaagaggtattttctgaatgaggcctttgtgaatcaagagaggtttgattatattaaaattaattgtgaatgtttgcataagatcgttaagtgagaaatgatattacatgcgttcaaaagcaaataaaaattaacagtgggaagtatgatgtctcttggggcccatagagttagaaaaggcagccagaggtaaagctggaggagactcttatgtgctccagggaggcttatggtatactgtattaatagatccagttgtttatcattccctgcatctataccctttgctattgaactttgaagtttctctcactaaaaaggtgaagtgtgtttttccactcctcgcctttgtactggaccacatgacttactttatccaatggaagtttgaagggtgtcacatgaataaatccttgaaaaacacttgtatgattgtgagtaataagtgattgtttgtggattctgctgtgattttagtggttggttgttacacagccttattgtggccttagcttactgttacagagctataaacataagttattattttgcttcatgaggtttcttctcattgtcagtggtgaaagacactgtttttctttttttgtttttctttttaattttattaatattatactttaagttttagggtacatgtgcacaacgtgcaggttggttacatatgtatacatgtgccatgttggtgtgctgcacccattaactcatcatttagcattaggtatatctcctaatgctatcccttccccctccccccaccccacaacagtccccggtgtgtgatgttccccttcctgtgtccatttgttctcattgttcaattcccgcccatgagtgagaacatgaggtgtttggttttttgtccttgcaatagtttgctgagaatgatggtttccagtttcatctatgtccctacaaaggacatgaactcatcctttttttatggctgcatagtattccatggtgtatatgtgccacattttcttaatccagtctatcattgttggacatttgggttggttccaagtctttgctattgtgaatagtgctgcaataaacatacatgtgcatgtgtctttataggagcatgatttataatcctttgggtatatacccagtattgggatggctgggtcaaatggtatttctagttctagatccttgagaaatctccacactgacttccacaatggttgaactagtttacagtcccaccaacagtgtaagagtgttcctatttctccacatcctctccagcacctgttgtttcctgactttttaatgatagtcattctaactggtgtgagatggtatctcattgtggttttgacttgcatttctctgatggccagtaatgatgagcattttttcatgtgttttttggctgcataaatgtcttcttttgagaattgtctgttcatatccttcgcccatttttgatggggttgtttgtttttttcttgtaaatttgttggagttcattgtagattctggatattagccctttgtcagatgagtaggttgcaaaaattttctaccattctgtaggttgcctgttcactctgatggtagtttcttttgctgtgcagaagctctttagtttaattagatcccatttgtcaattttggcttttgttgccattgcttttggtgtttcagacatgaagtccttgcccatgcctatgtcctgaatggtattgcctaggttttcttctagggtttttatggttttaggtctaacatgtaagtctttaatccatcttgaattaatttttgtgtaaggtataagaaagggatccagtttcagcgttctacatatggctagccagttttcccagcaccagttattcaatagggaatcctttccccatttcttgtttttctcaggtttgtcaaagatcagatagttgtagatgtaccgcattatttctgagggctctgttctgttacattggtttataactctgttttggtaccagtaccatgctgttttgtttactgtagccttgcagtatagtttgaagtcaggtagtgtgatgcctccagctttgttcttttggcttaggattgacttggcaatgcgggctcttttttggttccatatgaactttaaagtagttttttttttccaattctgtgaagaaagtcattggtagcttgatggggatggcattgaatctataaattaccttgggcagtatggccattttcacaatattgactcttcctactcatgagcatggaatgttctcccatttgtttgtatcctcttttatttcgatgagcagtggtttgtagttctccttgaagaggtccttcacgtcccttgtaagttggattcctaggtattttattctctttgaagcaattgtgaataggagttcactcatgatttggctctctgtttgtctgatattggtgtataggaatgcttgtgatttttgcaccttgattttgtatcctgagactttgctgaagttgcttatcagcttaaggagattttgggctgagacgatggggttttctagatatacagtcatgtcatctgcacacaggaaaaatttgacttcctcttttcctaattgaatgccctttatttccttctcctacctgattgccctggccagaacttccaatactatgttgaataggagtagtgagagaggacatccctgccttatgccagttttcaaagggaatgcttccagtttttgtccattcagtatgatgttggctgtgggtttgtcatagatagctcttattattttgagatgcgtcccatcaatacctaatttattgagagtttttagcatgaagggttgttgaattttgtcaaaggccttttctgcatctattgagataatcatgtggtttttgtctttggttctgtttatatgctggattacatttattgatttgcatatgttgaaccagccttgcatcccagggatgaagcccacttgatcattgtggataagctttctgatgtgttgctggattcactttgccagtattttattgaggatttttgcatcaatgttcatcaaggatattggtctaaaattctctttttttgttgtgtctctgcccggctttggtatcaggatgatgctggcctcataaaatgagttagggaggatttcctccttttccattgattggaatagttgcagaaggaatggtaccagctcctccttgtacctgtggtagaattcggctgtgaatccatctggtcctggactttttttggttggtaggctattaattattgcctcaatttcagagcctgttattggtctattcggagattcaacttcttcctggtttagtcttgggagggtgtatgtgttgaagaatgtatccatttcttctagattttctagtttatttgcatagaggtgtttatagtattctctgataatagtttgtatctctgtgggatcagtggtgatatctcctttgtcatttttttattgagtctatttgattcttctctcttttcttctttattagtcttgctagcagtctatcaattttgttgatcttttcaaaaaaccagctcctggattcattgatttttttgaagggttttttgtatctctatttccttcagttctgctctgatcttagttatttcttgccttctgctagcttttgaaggtgtttgctcttgcttctctagttcttttaattgtgatgttagggtgtcaattttagatctttcctgctttctcttatgggcatttactgctatacgtttccctctacacactgctttgaatgtgtcccagagattctggtatgttgtgtcttttttctcgttggtttcaaagaacatctttatttctgccttcattttgttatgtacccagcagtcattcaggagcaggttgttcagtttccatgtagttgagcagttttgagtgagtttcttaatcctgagttctagtttgatttcactgtggtctgagagacagttataatttctgttcttttacatttgctgaggagagctttagttccaactatgtggtaaattttggaataagtgtggtgtggtgctgagaagaatgtatattctgttgatttggggtggagagttctgtagatgtctattaggtcttcttggtgcagagctgagttcaattcctggatatccttgttaactttctgtctcattgatctgcctaatgttgacagtggggtgttaaagtctcccaacattattgtgtgggagtctaagtctctttgtaggtctctaatgacttgctttatgaatctaggttctcctgtattgggtgcatatacatttaggatagttagctcttcttgttgaattgatccctttaccattatgtaacagccttctttgtctcttttgatctttgttggtttaaagtctgttgaatcagagactaggattgcaacccctgcctttgtttttgatttgcttggtagatcttcctccatccctttattttgggcctatgtgtgtctctgcacgtgagatgggtttcctgaatacagcacactaataggtcttgactctttatccaatttgtctgtctgtgtcttttaaatggagcatttagcacatttacatttaaggttaatattgttatgtgtgaatttgatcctgtcgttatgatgttagctggttattttgctcattcgttgatgcagtttcttcctaaccttgatggtctttataatttggcatgtttttgcagtggctggtaccagttgttcctttccatgttttgtgcttccttcaggagctcttgtaatgcaggcctggtggtgacaaaatctctcagcatttgcttgtctgtaaaggattttatttctccttcacttatgaagcttaggttggctggatgtgaaattctgggttgaaaattcttttctttaagaacgttgaatattggcccccactctcttctggcttgtagagtttctgctgggagaccagctgttagtctgatgggcttccctttgtgggtaacctgacctttctctttggctacccttaccattttttccttcatttcaactttggtgaatctgacgattatgtgtcttggagttgctcttctcgaggagtatctttgtggcattctctgtatttcctgaatctgaatgttggcctgccttgctagattggggaagttctcctgggtaatatcctgcagggtgttttccaacttggttccattctccccgtcactttcaggtacaccaatcagacatagatttggtcttttcactagtcccttatttcttggaggctttgttcatttctttttattctttttttctctaaacttctcttcctgcttcatttcattcatttcatcttccatcactgataccctttcttccggttgatcgcatcggctactgatgcttgtgcattcatcacgtagttctcatgctgtggttttcagctccatcaggtcctttagggacttctctgcattggttattctagttagccattcgtctaatttttttcaaggtttttaacttctttgccattggttcaaacttactactttagcttggagtagtttgatcttctgaagccttcttctctcaactcatcaaagtcattctccatccatctttgttctgttgctggtgaggagctgcattcctttggaggaggagaggcgctctgatttttagagtttcctgtttttctgctctgttttttccccatctttgtggttttatctacctttggtctttgatgatggtgatgtacagatgggtttttggtgtgtatgtcctttctgtttgttagttttccttctaacagtcaggaccctcagctgcaggtctgttggagtttgctggaggtccactccagaccctgtttgcctgggtatcagcagtggtggctgcagaacagcagatattggtgaactgcaaatgctgctgcctgatcgttcctctggaagttttgtcttagaggagtacctggtcgtgtgagatgtcagtgtgcccctactggggggtgcctcccagttaggctgctcaggggtcagggacccacttgaggaggcagtctgtcttttctcagatctcaagctgcatgctgggagaaccactactttcttcaaagctgtcagacagggacatttaagtctgcagaggttactgctgccttttgtttgcctatgccctgcccccagaggtggagcctacagaggcaggcaggcctccttgagctgtggtgggcttcacgcagtttaagcttcccggctgctttgtttacctactcaagcctcggcaatggcaggcaccctttccctagcctctctgctgccttgaagtttgatctcagactgctctgctagcaatgagcgaggctctgtggatgtaggaccctccgagccatgtgcgggatataatctcctggtgtgccatttgttaagccctttggaaaagcgcagtattagggtgggagtgacctgattttccaggtgccgtctgtcacccctttctttgactaggaaagggaattctctgaccccttgtgcttcctgggtgaggcaatgcctcgccctgcttcaattcatgcacggtgcactgcacccactgtcctgcacccactgtccggcactccccagtgagatgaacctggtaccccagttggaaatgcagaaatcacctgtattctgcatcgctcacactgggagctgtagactggagctgttcctattcggccatcttggctccaccgactgacactttgttgatataagaaaggctctcaatgtaaatattactatgctctcatttctcagcaatgttagctctgggcaagcacagagatcaatgtattttacagcttatttctagaataaatatatgtttatttttccataggaatgaaactcaagatctacttttaagatgacagtccatattacatttataataaaagaggaagaaactaaagttaattttgctgttcatatcaagtaaatttcattatggttgtcaaatcagaagtgattattataatattctttaaaccaacaacatttacttacagttgaaactactttcacattatctcttattctttaattttgcagaaagtaaatgtatagtcctatatcatgtactttatcttccatgagtacttatggcaattaagaacaactaatgtgtttctgttgaaagttctcaaaatgtcactttgggggacctaaagattaaattatttcccaaaaatatttttaaaatttctttttaagtaaatacttagtaaagatcttgggggaaaaaggagagtttataatttaattacatggtagaaaaatcctgagacttagatattgtctcttactagctaatatattttgttttataatttgtgtacctgtatacaactatatattcatatatacagatatctgtttcttacctgtatagttgtattatacagttatttgactgtttgttggctgtttatgttttaagtaacataaggttatttttgacatgactgattattttttgggtgagagatataagattaaaacttcatttacaaactcaaaacacttataactggaaatttttctggaagagtatactatagtgaaagaaatccattaggaaagtattcacttggtgacatccttcaagggctggtcctggaaaatatgtagaatagaaagactatgtccctctttgtctgcccctagccctcttgctaagataataattttttcttagaacagcataccaattcagattccttccctctcaggtaattggaagtctcatatttcttgctagtccagtttaggaatgtctgcatgggtctctgaggccagaaattccttttgtctcttctctattatccttaaaaaaccaaataccatgtatcactaggtgtcattcttgattggttctgctctcagtatgtttatgtctgggaagttgtaagggtgagatcattaattcagtgtttcatcttacctcaagtaatagatttcagtgtcaataaaatgaagactaaatatgaagttacaaacttcagatacaaattgaaactgatacatttgataacaggaaatttggaaactattcagtggagaagagattttgtacagttgggtaatatggagatacaaatggggtcagttactggacttttcttggccaagacttgatcctgaaggatttactttctgtaatattgagtttgaacccctagctatgttcttccttataaaagtccaaccaatggcattgtgtctgtagctccatggcaaaaacaacattagctgctacaaaaaacaaaacaaaacaaaaaaaccaacaaacttctgaaacaggagcagcaatgataaactaataaactattgataattggctaaaagttctgtatgccacataaaaccaatgaaaagtgagttaataagtgccataggcctggcacaatggctcatgcctgtaatcccagcactttgggaggcctaggcaggcagatcatctgaggtcaggagttcgagtccagcttggccaacgtggtgaaaccccatctctactaaaaaatacaaaaattagccgggcatggtggcatacgtctgtaatcctagctacttgggaggctgaagcaggagaattgcttgaacctgggaggcggaggttgcagtgagctgagatcacgccactgcactccagcctgggtgacagagtgagactccctgtgaaaacaaaaacaaaaacaaaaacaaaaacaaaaacaaataaatgccatagcagttttttttgttagcagaggaagaatactacaaatccttaagagaagtatttcaaaagcaatagagaaagacctataaaatattggtcattggattatattaatcgtttcaattagtcttgaatgttgatgaggatcttttaaaaatcatatattaacattttaaaattttgactgaagtaattttggcttacgaaaagggtcaatctagttgaatcatgattgctgtcttctagatttcagcaactaaattgacaaaccagagacatagagccaatttatcagcattctgttaggctgctaaaacttccattttaccacaaaatctgtggatacaatttcaaacctaggaaaattaagcataaatatcttaaagatttaaatttgagtatcttcgggggaaattcttacaaagaaatataacttaattactcaattaccataaatagatacaacttgattgtgttatttaattataatataagttagaatagtttctaggatagcaaaatagttttattttgtcaatggaatcttattttcaaaccaacaattccaaatctaagattatataaagtgtcaatatgaaaattaaatttcaagctcatttcttataccaatgagagtcttgaattctcattacacaattgtctgaattttatattaatatgagtaaaatgaaagataggtgaaataataaacagctggttaaatgtttatgtatttaactaccacattgatctgattactttttttatggtgaagatgatatgtaatctagtttctcaaacaaaaactgaaggaaacatctttgtaaaatcaggaagagtgtgtcggtaggaagaaatctgtgagttagattgggcattttgtcggtcctaaattttcaagataactatttaatcaaccatagcacctgttgaacctgcttatctctaataatctaattgcaagaattacgttattataagacttataatgaaatcaaagaactcaaataatatatttaatatcttatgtttacaaagatatatgtatattttatatttaggttcttataagtgtcctacactatgagactataagctatctgaaggcaaagattgtttgtgaatacgcacagtactatttttctttatttctagcatccggacaggtgccaacattttatagacataatcaaattataaacgcattagtaggcaaaaggatgcattagttaaataacttcatttaggttgtttcatttattaggttaagggcagagattcagacatcaaaatgggtgttattggaattttgccttgagcttaatacttagtatttaaatgagtatctttttttgttaacttttcaaatccagaattaattatccatctcttagcctttgattttttaataccatttatactgttttctggcaccagactcacaatagcccagatattttcctctctaggacactgtattactcacgacctttgattatatctttaatcaggtgtcatcacttcatggtataagctgtttgattcccaccttggaaaaagacttttgctgccttctacttcatttcatttctctgaagaatgatttcccaccccacattttctttgttgttcatattttatggtgcaaggaatagaaatggattgtattttagtcaagataaaactcttttggatagaaaactggaaagtagggttatagagaatcagttggttgctggagatctaggcttggaaatggacatttagagatgcatcgcctctctatgattctgaatatataatagctgagtatctaaaaggaagattaggtgaagagaggcctagcgaataatgtcactgctcatttcagagctctgaatcccttttgacaatcgtgtgctctcccaacttcaggtggagagccagaaatacctgggaatttaactataaccagaaaatatataggtgtgtcagtattaaagtctgaaccccttgtcatcagtgggacaactctgaggcagtacttacaccataggactctcgtgcgggatcaggtcaaagatgttctcccatggactttgcctgagaagtccaaaattagttcctttgggctaaaatcaaagtgttgatagtgctggattccttttgaaggttctcagaaagaatcacatccttgccatccttgccttccatcttctagaagccatatgctttctgtgttgtggctctttgcttcatcttcaaggccagcaacatagtatcttcaactctttctcagtctctgatactcctgcttccttctttcacttttaagggcccttgtgattaaatttgggctacctggctaatccaggattatctcactatctcaagatctttaatttattcacagctgtaaggtacattttgccatgtaaggtaatgtatttacaagttccagagattaggacttggacgtcttttggtgtggcagttttctgcctttcagacttggcatttttcctcctcctcccccatcctgctccctgtattcccataccatttccctaggagcatttgtcaataaatcacttgcagaagacatgctcaagatgtgctaccagggaacatgatctaatacaggggggctaacaatgaaaaagtgacaaacatctatgaaagttgggatgtatgattgattcagggtagcttctggtttccatgtttatttctcctcttgcacactgtttcatcaaaatggttaggatcagcattttaaaatacaataatggtgttgggaaacagaaaaaagtgctaccagtggaccagaaagttttaacaaaccctggaaaccaaaaagtaggtggaatgggattaatggagaaaacagagcagaagaattcaagccaagattccagaagtgagagcaatcaatcctgatggagcccatgagaaattctaaactcaatgacatcaacacaaagaataggagagggtcctgggaatcatcatggaaattaattaattaaacaactgctttattaatagctgggcctagagagaccttttcctttctcctcctctggaatatatgcagatgatatggctgacagcagtagtatttgcctccaagctagaacctaacacttgtctggagaggtattctagaatgagttttggcctgagagagaagtagagaaggatgtggtggggtcgggggaggggggagggatagcattgggagatatacctaatgctagatgacacattagtgggtgcagtgcaccagcatggcacatgtatacatatgtaactaacctgcacaatgtgcacatgtaccctaaaacttagagtataataataaaaaaaaaaaattcacacagctgtacaaacaaataatgactgaaaaaaaaaaaaaaaaaaagaaatagctccagacatttacttcagacaccaagaaaatatcaagtaaaagaagaaaacaaaaatttcatctagtagtgaaatacagtaaaatactttatctccagagtaaaactcttcttaatttgataattgaagggatctctagcctacctgctccatacctaagcaccctacagtggtattgatttgttgacatgaccctgctctctaagagaaatcagtggttggccctctcatttaaaggagaagctcttgggaaaataggtaaacacaaccagagagaaaattctatgactcaactttgtacatgttgagaactaggagctaagatcaacacatatttgggggaagaaaaaccacaaaataaaagaaagaagaaaatatatccatcaaatccagaggaatcaaaagtgatatatggaataatgagaatttttcatatttctaatagttatattccagggcttcccaacgttgccactgttgactttcagggccagataattcttttttacagggggctgtcctaggaattaattattagctatttagtagctttcgtggcctcaacccaccagataacagtagcaaccctcacaattgtgacgagcaaaaatgtctccagatgttgccaaatatcttgggattggggggaattctcttaagaaacacagggtatttttacagagatttgagatatcaataaattaaaaacaacttgttcctaaaaataaacgattagatatcaagacaaaaatgacaaatattatctccaacaatgagacaaaacaaatgaataaactaaataatacaatgggttaggctaaaaaaccaagctagtgatctacaacataaacacaaagaactccccaaatgcaaagctaaagacagatattaaagcatgagagaaagtaaaagagaaatgatagatcttggagatcattttataaaatatccagaagcagagaaaagagatggtagaaatcaatcaagtatacatatatatatatttttccaagctgccgtaagacatagttcttcaaattgaaaggactcccaattgccaaaagggatagactaagagatacctacatctaaatgcttttaggtgaaaaattaaaatctaccgaaaagaaaaaaatttccaacacccattagagatcaagaaatagcttacatacaaagaaattaagatcaattaatgactaatagaggacatgagaaaaaatacaatgtcttcaattaaaaacatattttaaacttaaattttcatatcaagccactctatcaagaaagcaagagtataaaataaaaacatttaaaagtatataacccagaatatttccactcatttattcctaataaaaaagttacataagaaaagtaaattccttaagtaatttaatttctaaaaaaatttacttaaaaaaagtaaggacagtaaggaagaaaaatggaaaataaaaaagggccataaaaagaggaagtcttcaggtacaagaagaatgatagctgattacaactataaaaatattagcagagaatttaccagacctttgtgtttgagacattcatttttgggtttcaggaacttagtgacaagcatgcatttcctcccctaggtacttagtctcatttctttattctttattacgttgcattcattaatatataaccataataaactaaattctatttttattttaaaatatttaaaatcattcaacaaattaaaattgaacttctgacagaatgctgagtcaataaaacttaagaatataaaatacagctgtagctgttccagttacctgttgctgacccaaagcctgataacttaaaacaacaataatcatgttattgtctctcatgtttctgggttgaccaggttctgctaggtgttctcaagctgggtctctcgtcattacagccagatgatgatggggacaataatcatctccaaagctttcttgtgagtctggtgctggatctggctgtcaggaggaacctcaactaggtctattggctagaacacctaaacatagcctatacttgtgatctgggtttcctcagagcatgctggctgtattccaagaataagcatccccagagaaccaggagaaagctggttgtcttatatgacctacccttggaagtcaagtagcaacacctctactgttttcacaagtctgtgagagtcaaggtgagggaaaaaacatcccacatcttgatgagtggaaagtcagcatcatgctgtaagatgagaggtgggagatcttaatgaggctatcttggaaaatacaatctgccacagtcaccaatatgaagtatgtgagtaagtggagaaatgcggttttggtaaatttctcatcttttatagtagctaagcaataggtacattctacatcaaaatagagaagtaaaagaatatttttggaagtcataagtctagcattggaagatgtaataataggcaagatttaccagtcctgaagttagagaatttggtagtggagttattttttaaaaaagctctgtgccagtattactctgtaagaatgtcatatgaacttttacttagatatataatagaatatattaataacaaattatgtgaacttttattaatataatacaattttgtaaaacaaagccaaaaagtataagttcaagtattcaacaattgaggttatttatttcatctcaaaaaacatatattcactgggcagcaactgattacatgacattatattaaagtcaagtcaagtgattttaggtatagacagctggaagtgaaagttaacatttatttggcctaatttctgagtttttcaatgggagactatctaagaggagttacaaaacagatgcctgctttgccagcttcacacaatttttttggtcataaaacaattgcaggcagaattctaaagatgtccccacaagagtcccatcctgggttacttaatcacactctaatgtagatattgttgttaagatggaattctgcttgctagtcaggtgactttaaaatagagagattatcatggaatatctgagtacacccgaagcaatcacatcgatatggtttggctgtgtccccacccaaatctcatcttgaattgtagcttccatagtttctacatatagtgggagggaccaagtgggaggtagctgaatcatgggagtgggtctgtcccatgctgttctcatgatagtgaataagtctcagaaaatctgatggttttataaaaaggagttctgctgcacaagctctctttcctgccaccgtgtaagacgtgccttcctctttcaccttctgccatgattgtgaggcctccccagccatgtgacactctgagtccattaaacctctttttcttcataaattacccagtctcaactatgtctttattagcatcatgagaacagactaatacacacatgaactcttaaaagcaggaaatgaaaatagcagagccagacagagatgcagcagaaaaggaaggctggagacttgaggcaggagaggagactgaactgtgaaaaatggaggaagaggggcacaagccagaaaatgtgggcagccactagtaactgagaacaaccgtcagccaacaatcagcaagacataagaacttcagttctacaaccacaaggaaatgtattctgccaacaacctgaatgaatctggaagcagattatttcctagagcctcctggtaaaagcctatcctgctggcactttgactgcagccttgtaaaactcagagaaaccagttgggccaacttagacttctgatttatgaacttagagataagcattttgtgttgttttaagccagagtttgtggttatttattatggcaacaatagaaaacttatacaaatactaaaaccaaaatcaaggtcttctgacaccttgttttgttctcctttaaatggacaaaagctaaaagagattgttttcttctctcaaattgtttataagttaatttgcttggggaaaaaatgtgccctgaaaagaaaatatcaaaggcaatccaaagtggcagtcctttatttgacagatgttctataggccaccctcaataaatttcttaacaccagcctcagacaatagtttgcatattagatgactgttcagaagccttccctgctttgcagccatataattttccctgccagtttctatgcctctactttctgatatgttttctggactcctgatttggacttatctctaaagctcactaaactctgtttctagctcaattcttgattccttaaacttctcttatttcagtagcccccacatcttttggtaaacacttgttctatctgcctattctctggaattcactgaatgacccactccccttcccaattgtgactatttggcccaagcaccaagtttgattaaaacttcatttttagcaattatggctgacattcttaaaagcaagaaaaggctagattatagaattaaattttaagtcaatagaatatttctcagacaagttaacattttcctttgtgaaactggcattttttaaacaagggtcacactatatagactgcaggtactgcagtatatatgcttcagtgcattctattttggcatgatttatagtcatgtctacatattagtactgtgactgtgcatgtaaatgtgtagaaatgaatgtgtgatttcaagtcatcagtctttcaaatttaaaaatataaaactaatttgtttgacttaagcaaaaatatgtaaattgttgaaaattcacacaatgacagtgctgtatatatagaaataggaagcagctatggattttattgaaaaccagagtaagcgccattaataaatacttcaaaaaagctaacaaactcaagtattaaaataaacatgcaagactccactatgtatggaaagaacgttgcatcttccagcttttataaacaacttcatcccttcctctcactactcataagcttttctttgttaaatatccttctcagttccagtctatatttatattaataatacgtatgtgttattaataacatttgcacaggaaagagaactccatgcaaagaagtttctaaaaagcaaaagtatgtgttccaaaagtctgtacaaagttagttttctctttcttgtcccatctttctttttttctccttctttttcttctatgacagaaaatcccttagagatatttggttcaagggtaaaaattagcccagtactttctcctaaatcttggtgatttcacagtctttcatatggtacacgtgtactgactttagacaatttaatcatgtaaaagggtagaaaatgttatgcttcctcattattaagatacattccccttaattctgatgcttctttggaagaaagtagacttttatcctttgacctcttctccaaaagaacacaataatatatataggatattgaaaattacttccttctttcattagtgttgaagatttctacaaatgtaaagagtaagagtttgcagaatgtatattaatacactaggactggatcccaatcagcagtataaagagcttcaaagccttatgggtcagattcttgtgtttttatgtttattccagcccttttgccttgtaaatcacatgtttgagattgaataaaacaagtcatttttttccatgtgaaaaaacattcatcaaatagcattttctgatactaaaaaaaaaagcgaaacactatgctggtttactatccacacagatattctaaaactaatctttcagtggtattaactcattttagttatataggtaactaatactttttgaaagaatgaataaagatgatctaaatttgcaattttttcttttctttttttttttttttgagatggagtctcgctctgttgcccaggctggagtgcagtggcgcgatctgggctcacttaaagctccgcctccggggttcacgccattctcctgcctcagcctcctgagtagctgggactacaggtgccatccaccacacccggctaatttttttttttttttttgtatttttagtagagacggggtttcaccgtgttagccaggatggtcttgatctcctgacctcgtgatctgcccgactcagcctcccaaagtgctgggattacaggcatgagccaccgcgcaggcctatatttgcaatttttagcatttcaattgtctaaaagatatttcttttaaatagtctcttttagttaataaaatatgtaatcctaagagtatctcaaacgtttaacatgttcattactaaattcatttagaagcactcctaccatggcagctatttgaaggaatgaaactgatatttaaatgtcaatttttattttggaatcaatcttatcgactaaaattactttcatatgctcaataaagtccttttgcgaaacttcagcagtaacaatttataccatttaagaatttctttaagaagaatagactaagaattaaaatctaaatttgaagaataaaattggtgatcaaattcataatgctctttgatgcccaaaattaatagatgagaatgatttccttttgtgattggtgaactttcctcagagatatttaacatcatggttttaaatatggcaattctgatggctaacactatggagggcagcataaatttgttgtgctgaatttatgagttctgttgatttagttaatttaaagcttaattttttcattttcatatgatagtcattcttagacaaagtcatatctttctcctttaaaaatgtacatggaataaaatttatctctcaatttacaacatatgtttttaatataaacaaaagacacggttctacatggataaataatttaactatttagaattcatttcctttcctttagctgcagcatggccccctgaataacataagtataattatagttctcccccttaattactttctctgcatgcacattgaacaatataaatgttgaaatgtagcatttttgcatttcccagagtattattacatagaaaaaccacttccacaggacattaatgtgtgttccaggaaaaaaaaaaagagatttgcaatatttatttgaaaaatactgaattaagaaatttaaacaggtttatttatggtaggaattctgactattgtgcatttttgattttcagaagggaagtgtaatatttattacgtaccaaacaagattatttgacaatggaactcttttacctagagactatcaagatagtactgttcttctgaattttttttatgaaacactgacttaaggaatgctgaaggtatgcctattttatttattcagaaataattcttgaatcatctcttacaagtttaaataagacaaagtctgtcctcaaataatttgcaattcataaatgaattcaaacgcaaatgacaacaactggctacgtacaattacaattcattatggtaaaagtaataagaataattaaaaatctaatgaaacatacaagaaggagggagaaaagcaaagaaaaaaagactgaatctggctgaggaaaaggggaaaattcctccagtagttggtgcatctgctgactgactttctttttttttttcttttttgacagagtctcaatctgctgcccaggctggagtgcagtggcgctatctcagcaacctccgcctcccagctcccaggttcaagtgattctcctgcctcagcctcccgagcagctgggatcacagacgtgcatcgccatgttcagctaatttttgtatttttagtagagacagtgtttcatcatgttggccaggctggtctcgaactcccgacctcaggtgatccacccacctcagcctcctaaagtgctgggattacaggtgtgagccactgccgctgactttcaaagtattttccagaagaaatagggaagacatttcacatggggaaatataaaatgtttttgtaatgtttggaactacaaaggacctaaaatcatagttatacagttcatgtattagaaattattcatccttctgaatcatgtcctgcttgtttagaaattcaatcactcttatagtctatataacatactatttaactactggtacgttgaatattgaaaaaccagaaaacacttgcaaactctatgcaactcatgctgaagaatgaaacaaactatattaatatttaaaacaattacgttgcaaagttgatacctgtaaaagaatacagatttgtatggcaaaggacttggaattttaatacatgtttaatctgatggctaatctggtcctctggccgcatgtctatggtgaacggcaagaaacccaaatttaatatttcatttgccgaaagatttttagaccattggtctccaaactttttagaatcatgcactcttatcactatagttttgtagcatgaacatacaatatgcatatatttattcatatataaattacatgcataaaccactggaatggcagaaaattattgttcattatgcataccctaaatatacatttaaaaggtgagctaaactgttagctttgaaatacgattttgaaataaattgataaaattgaaatcagtatttttgaaatataatatttaaggaatttttaatttttctattaatggtagaaaccattttaaataccaacattgtagtaagtgcaacataactaaatttgcttcatgaattttagaatatttgtttagtaatgtatgatacaccaatttaaacatatcttatgtttattttcttttaacttcattcagagggagtattttatgattttgagggtgtttttggctttcaagcttggttttgctgccattataactagaaaattcacaatgatacatagatcaaaaatttttgcaatttggctagaaaattttcgtcttccttgatttcaattgatttttcctgaatattcttttgaagttgtaccattttatttttattttctatatccataggttattggggaacaggtggtattggttacatgagtaaattctttagtggtgatttgtgagattttggtgcacctatcaccgggaagttgtattattttaataatgttaataaacttgtttaaaacccattgaaaattttcatttggaatgtttgaaaagtagttaacaatactcttttctcaaattaattttatgtgtacacataattttcataggtgaggcacattattttttaccacaaatcttgtaatgataaaaattttctaaaagaatttgaaaaattctctcttatgtcctttttacaaacactatttttactttgaaggttacataaaatgtgtttctcactccccatccccaaatatgtctttggcaacatataaatgttggtcagtcatcttttgcagaaaagggcagcacatttgaaacatttgtctttttgtaaaagaaatatccataactcatattctttccctccctgagggcaataataatttttgtaattgtaaaataagccacatatgcaaaagtgaatgaaaatttacaagtataattttaaaacaataaaaaatgtgtatatccatatggccactaccaagttaataaataaaaccttgtactctaaaagctccttatctatgactttacttgcccacttccagtgcctcctcctgcaaccagttaaccataatattgaatttactggctttcctcacagattttatacatacatatatgtagaaaatcataaacagtagcttatttggctttgaactttatataaatagaatcataccatatatttattcgtgacttcttttgcccaatagtacatctccatgattttaatgtactgatgcctatgattctcattaacccattttcactatcaaatcatactccactgtataaatacaccaccacttatttgtctatttctactgctgatggactttaggattgttcaaaagtattttgtttggttggccggatgttgtttgttttgttattattaacaaggttgttatgaactttattatgcatacctttgggaaaacgtgtaaaagcttctaacacctaactcttgagaagtaggctttcttggatacatgctacatgcatgttcaaccttactgtgtgatacataccatattccaaatatgttgcccacttttttacttatgccagcaatagtaaaatgattcttgttgtttcacgttctcatgggcacatggtattgacaaattgtggatatgaaagggtatttcattttggttttaattctcattttcctaattactactaggattggacatcttttaagattagagccatttttgtatcctactctgttaaatttctattaattccttttatgtaaaatggtggtagcagggtattttatgctttcttactgatctgtagaagttaaatgtacattcagaatatgccggtggctcacgcctgtaatcccagcactttgggaggccgaggcgggcggatcacgaggtcaggagatcgagaccacggtgaaaccccgtctctactaaaaatacaaaaaattagccgggcgcagtggcgggcgcctgtagtcccagctactcgggaggctgaggcaggagaatggcgtgaacccgggaggcggagcttgcagtgagcggagatcgcgccacagcactcctgcctgggcgacagaacgagactccgtctcaaaaaaaaaaaaaaaagaatatgcaatatgagttagaaatatatgttcttgaattgttgcttacttttatatactttttatggtatttttgatgagtataccttcttaatttttcacatagtaaaatgtattatagtattttatgctttttaaaattcttttttgggtcaagttttatattcaacaacttctttaaatattttgtcatgcagtaactggtgaatctatgtgggatacacaaaatttttcatgatcgttttccatttcatatcagagttataaagattctgttacttataataataagagcccaaaattcacataagcaaacaatggcgttcaatctgtggcaatatgctgaaaacaaatgagtgatcatgtggcactcactctccccaggacttactataatgctagatacaagggatatcagtgtgaatgcatatattttataatgtaaaaaaaaattttttaaatttgggtcaaaatataaatatagcgtcggtttattcctgtgcgttgttgtggatggtcttctgcatccttttggattcatgcacctcatttggagaccaccattcaagacaagctgtcttaaaaccgaggcactcagacctttgggtctggacttaagcagacccagaatttttaaaggaatcgggatccatatcctcaacttccatctgtactagtgtaaaactgatctacctggagaacatagttttctgttactcctttccagttacccctttcactgttgtcgtttctttacccaagttgtgaaataaacacatctcactcacccatcctgattcttacttttttaagggtaaaaaccccccatccaggcacaaaactgagggacacttattcttagggtaactaaaaagatcattactcttatgactgtataataaaactttttgcaattcacacaacttgttttcatgcaacaaaattagaaataatttaaataagatataatctggtatattatttaaaatgtttttggccgggcacagtggctcacacttgtcatctcagcactttgggaggccaaggtggaaggatcacttgagctcaggagtgcaagataagctggtcaacaaagtgagacttcatctcttaaaaaaaaaaaatagaaaaattatctgcgcttgattccagctacatgggaggctgaggcaggaggattgcttgagcccaggaggccaaggctgcggtgagtcataattgcaccactgcactccagtctgggtgacacatacgtgcacgcactcatacacacacatatatgtatttaaggtaagttttattgtaactttaatataaaactttgaaggggtattaaaaaaattaagtgataaatccagagatagacttctttttttctatgtaactatttataggtaactgaagttcatacaatttatattcccaatgtgaaaactaactatataatttatgttgagtcctgtctcattccagcgatggaaatattcatctacgtatacaccaactaattttagaatcacaccaattttcacacacacactttcaaatacattttatttttatgtttaatatattaaacatatttattcaataataatctgaataactgaaccttgaaaaattttacagttagagttacagaaaataatgttatttaattccaaatatatatatatccttttgttatagttatgacaagatgttccatatgtaacctatttaggtaagattataaaatatgaataatattttttggtagaactagattggaagtataatttcaaaataagtaatgcaaaatttctgattatcttctcatatatttttaaaatttataatgataggtaccaaatagctatgatatttacatttgaatagttttaattgaacaaatgatttaacaatttagttttaaaatgtcagtatttgcaagctccaattataacctcctttgcaaccagaaaaactactgataaaaagatgctaattttataatatgcaaggattttttcaaatattttataggctatggagaaaaaatgctgcagcacaatatttaagtgagtcaacaatctgtgctagaaattgatcaatattattagtgatggtagcataaggtgtttaaaaacacctctgtttttaggatgcttatggtaaataaggaactgagttattgaaataaaataaaaagctgccttaatcaatatttaatacatcctttcttttgattcaaagaaaattagaaattttgactccatctcacaaaactctacattttcctagataaagagttaaatgttgttatcagtgctcattaaaggaaaatgtttataatcttcactcatcaaaatcctggcaactgtttttttttttccactatccttccacgatttctttttaatatctaagcttttcttggatatgccaattgacagttttatactggtatgtatttaatttattaattttttttattcttcactagtttgacagatatgtattatactaagcacattatttcatctactcatcaactatccccaaatattctgaaaaatgtacctcccagatccaattccacctctatttcaaaaggcttcctcaaatctgacaattttataacctggtaaatttttccctggttacggttggttgataccaaggaagaaccaaaactaagctacttgtacattagtctcatggattgatctaaagatgagccttatcaaagtttatccatcctgagctcttctctctgcatttggatcccagagagtataaccattctcttcattgtgtgaatctgtaagaagttaagctctggatgtattggcagccatgttttccttcatgtgggccattgcagctaaggccttccattgacagagaaaagaagaatgaagcagagattaaagaaacaaagttatgatacacggtaaatatgaatgaaccttgaatactttaggttaagtgagaaaagtcagatacaaatggctatatatgattccatttatatgaaatatccagaataggtaaatccaaagagacagaaagtagattagcagatgcctagtgctggagggagggagaatggggagtgattgctaataggtatgaagttttttggggagtgatgaaagtgttctgaaattattggtgatggttgcacaagtttgagaatttgctaaaaagtcactgaattaaacactttaaaaaggtcaaccttatgatatataattgtatctcaagaaaactcttattttaaaaaaatgaatggaagacgtactggagcaggagggaagaagagtgggaagtctgataaacacgtggcttgttttagatgtgcttacagcttagctctcctcttattcacgacagatcaggattgtaccgtaaatttttcataaaatagagttgacttcctttctttcctatgatagagtcagactcgtatcgcttttattaccttagttttacatatgagaaattgcaggctcaggcaatttagttaactggtctaaaataaaagggaatatatttcacttcaggggtgtccaatcttttggcttttttgggccacacgggaagaagaattgtcatgggccacacatgaagtacactaacactaaccattgctgatgagctaaaaaaaaaaaaaaaaattcaaaatctcaatgttttaagaaagtttacaaatttgtgttgggccacattcaaagatgtcctggtttgcatgtggcccacgggccatggcttgaacaagtttgctctatatctttatttcaatgtatttctactctcttctatacaatttaaatctatagcaagcccacctttttcacctgtaatatcgcctattttatttaattgttcttcccactttccaatgttggttatgctgttcttagggtaggattttaccttctcatacttttttttctgcttgtgcgttcatcagtaatcctgtatttacattctacttaaacagtgcattttcttggaaacacttcttaaagcacagatccacagcaggagcaattttattcagtaatcagaataaagttattgactttaggaagataaattaaaatactatttaatgattctttaaagtgctattaatttctttgggaacttattgcttagctttgagaatgtcaatcatgagctaatttcaagtgaggtaaggcctctgaatggcgatttctcaagtgagcaagaaaggggctcaactctgtcaaccaactagaataaaaacaatggatttcctgaaatgctgcaaatttatttagtctgtgtctgtgtaatacccgagtaaaatcagctctttcaaatcatatgatccaggagccaaactcaataaaatgtaaaaatcagcccccaggggtgtgaaatctaacctgaaatttcccttttcgtcatgggtttaacaatagcctaaagagatgagcagaaaacagtttggctggattatatatttctttttcaaaacaagaggagtctgtgattttttaaatgttagaataggcctgattctatctatttttctttcctattcgttaacttttattaaagagagagttctagcttttccatgctgtcaatgctctttaggggaaaagattcaaaatacgcttagaaacaccaaatcatctttaaaataaaattggtgctgctaaccatagcctacaaggcccagtgaaaatcagtgcctgccaaattttcctgagctaatttgctcattatgctggttttctctttcttccttgagtatatccagctcattcctatccaggacccttgcacttgctgctcattctgcctagacggtttttaatgctaggccttcccatgaatggttctttcatatcattaaggcatatctgaagacactaatctcagagaggtcttccaatcccaccaatcaggtaccttatctaaaacaggctgctgccaccctcatctctctcattggtcacatggctctgtttcattgtctttctagcatcaattacaacttgaaattaactttatttacttgtttagtgtctgttttattctcagtcgaatttgagagtccacatctgatcctgtaaatcatagtctgtcttgtgaacatggtatccccaatgcctagaacataatactggtcttgtgcctgggacttattattctaaaaaatatttattgaatgaaaaaatgaataatcttccttcaacaaatgacatttaaaggtatcaatcataaatatgaaatttcacatgagataaggaattaatgtgatttattgttcctaaaaatattaataacattgacaggtaagaagtgaaagaagaaaagtaaatttaacaaaaagtaacgtgaattaacatgttttaaaatctattttcatttttccatagtaacagtctttgttttcttcttgcttaaacttttggcatgttctctgtatattatccttatcctagaccaattattgaaaatctatattaaaataatatgtgtgtctgtgtatgtgcacagtttttagccctcagtttctaataatacaactgtttgatttggacagatgggagatttcctctttgcatgttggccacattcagccctgatttgttattgtttaaaattctgagaatgttttacacacgtttacaaagaaaaacatttggcctctgataaacgaatgacaagcatgatataaacgcttggagatgatcctttcagatctgtgcaaagagacctgcacatctgtctccagctgtgcagctactcagaacagaaatgactaatcctggtttggccaatgccagtaattatttttactgttgatctgaagatcaaaggttgtttccaggaagtaagaacagggcaatggactttactatctgaatacagtggagatttatgcaagctattatttggttcatggttatcacattaacctggtgctaatgcatatggatgacagcagaaatgtaaacagtcttgaagtgatattaattataattagttaaaagtaaatcaatctagtggttttgaatcatctgtacccttttgtctagcctcacatcctgaccctaaatgataggaaaatccacagcaactacagcacacttttaaaacacagtgcgctgttctatgaaggattctatgaatccttggctattattttaacattttgattaaatcattctacactgaaattcttattctaaaggtgaggtttttcatgggtgagattagtctaattctccaggatgttgtaacaattttaaattaatgcaaaatcttaaatgtgtaaattttctatatattttttcttcctacccagggaaaaaagaaatctcagatcaggaaccacactactcagaaatgctgcccattcctatccccgcaacaatccatccctgcttctttatcatttctggcatatctaccccaaatcctgcattcaataatgtgctacattgcttattctaatgaatccatatttgagatagagaaggtattggtctcaaatgcagatttagtttgggatctgcctgtcagtgtgttaattatggttaattccatttatgtgttaggcaccaagctagacatttagcatacattatttcctccagtccccacaattcaaagtgaatatgcttatcctcacagataagtaaattgagaccccttaaataataaggatgacattacagtttacatttgctacaattcaaaataagtcctttatatgctatataacatggtctctagtgagacaaaatgttgcttttaattttaagttaatattaacttctgtagtcattctaggttagaaaacctgatttgttcttccttgaatctttagtttttacttattgtgatgtaattgttgctttgcaaatgggtaaaatccatgaagggtaggacttctagaggtggctatattttttcctggagtcattataatacataatttatttaaataaacttttgaatgaattgcatcttctcaaaaagaacctttctaattttgaaaaaaattttgtttagtttgtatagtgtcactcatagaaaattgcaccaaacaggcacttcataaattcaataaatttttatacaacaaataaaaatacctgctgactttaaaaatagaccaagtaggtagaaagccatttgacttctttcaccaaatatttgtaattgtttgtctggaacaagtacatagagacacaagattttctctatggttcattctataattaataatttttattctctcttttaaagacttttctttatgagggttttttattttattaagtccaacgaaatataaagtcttttgtaaaagtgtgcaagtatattgcttgagaaaagagaatgtgggggtgatgacaattggggataattgatttagatagaaatgatgctgccatgagaaaaaacaatgcttaccacggaattcatttcctagtgtaataatttattaggtagtgtgaagcagatccccaaagcacctcatctcccacagcacctttctagacccagatcgtatttctttagactagacattgcaaaaataaacaaaaaaacccagaccctaatttgtttgattgccacttttgcctcttaattctgttttccacactgcagtcaaataagaatctggcatatttgttcatgtaccttattgcataaaaatctctcagtgacttcccggtgtccttaggataaagattaacttcattaaattgctgacaagcccctgtgatctggtaccttgatacctctccagtctcatctgcttcttcactttctaaagttgagattatctgccttttcaatccattgcttttagtgatcattcctctggccacagggccttgcacgtatagtttctgcctgtcttcccacctcagacagttgaatacgttatagcccaaggccactaggtcattccaggatcttcctatgtgcctcttcttttctcctttgagaagagggagtaaaaaaaaaatagagagtgagtaggaagaacataaaaactcctatgactgctacaacagcaaccatttactcagtgtgtattatctactaggcattttatgtgcattaaaacttacttaatccttgcaataacccttacatgtaaatggtttcaaatgtgagtaaacaaatctgatattgatgcaataacttaaactagtaattaggaaagtcagaattcaaacctaagtgtcaaacttcaaaggtactattcatatagctttttaaaatataagtcaaacaaggaaaattatatatgcttaaatggcatatcttgattttatgcatctccactttttctttacttcatctgtcaatataatgaatatttaaagaatttcccactgtaagcaactgtattaatgacaacaattgaaacagcagtataattcagtggttaaaagccgggactctggagccagactgccagattaaaaagcccctttatcatttatcagctctttgtccttaggaaagttgcctaacttcagtttcctagctggaaaatgggattaatgatatcctaatttttctcatagtgcgaggattatacagtgcaagtaaataggtacgtagtcattaacacagaataggaagtaagtgttttaaactattgagagcctagtgagtgttttaaacttattgagagcctatggtatgtatggactgtgttagaaattttgcatattctataaattgttacatttaatcttgatccaatttttccatcttctactagctctatgactggcaaaatctcctataggttttccactccaaatgaaacaaaacaacagaaaacaaacaaaaattggtagcactgtttttttttaatcaaattttcaggtattaaaatagttgacttttttcattatctaatttttaaaatgacatatattttcaaggtagataaaaatctaaaagttttaatatcatgggcttgcagacccggaagagacatcagaccaagatcagtgatggtgccaggcaattgaaaaactgctgtcaaataattgccagaatttctctccagaaatgtgttacgtacttttcaaatggatagcccactattatcttcacactctatataataaaatttatttcaaactttctggaccaatgtttacctacacacatgaaaaagatgtacagttaagttttagggcatctaaaagatactatctcattttttaattaaaaaggaaggaatctacccacttaaggatatcctgaagcctgtgtgcacacaggagtttaagttgaatacttcttaaagaaaggcacttgtacctgggataaagcataaaggcacagttcaaaataagcaatagcaaagcatccttagaatgggccgttataaaaactaatgtttcataccttggcatcaatttaaagctaatttcaaaggatactagaaccatccttaagaaatcttaccaattagcatataagtgaactgaccatcatatgatgattgtgtgtgtttgtgtaattaagaagtgagcttgacaaggatctacaagattctagacaataaaagtacacttgtgtgtctttgtatctctgacttcctgtttcatcttaactgaacttaacagtgcatgtgtttccacatattcctcaccctctagtagaagtccataaaccctgggagctctttctcacttgtttcccccatttggacatctctccactttcttggcctgcctttacctcattcctttaactggcttcattaaaatacttcttgcttacttaatgggtagaagacaaggatcctacccttaagaaacacaggactttcaaaataagaagcatgagtttggctctgtcattgctgttgaacagaactgtagtatatgaggttctacattagggcaacactgtaggaatatggaacggtccagtggaatgagtcatgaatgtagacctatatctaaatttcagaaaggtcttgccacaagtactttaaccatgacaatttttaaaggaattaatgtatgtttcttctctctaaaaagaagatgggcaattcacaactgtgattttttccaactcctttgaacatagtagtgaatgaccttttcaatgctttgcgttttgtggtaaaacttcataaattctataaaaaacacagtaaacagacctttaaaataacttggaaaaagtttagagaaaaattcctttctattactatgtttataacatgaaaaaccttgtcttttctgtgaactttttactaccatattactcaggtaaccatttcaaagctttaaagctataatacacacttatttagaatttctcaaagagattccaaaaaaagtatgttttccagccaatttaaatgataggtccaaaattgtgtttaatttagaaatatttgtattttgagggagagaaaaaatgttttcaactatgtttatgttgaatgccagctcctcatatatcaccaactgtggataagacaaagttaagtttattgctcactgtagtgtgggagaacaccacttgaacagagctttgggaatgtctcagactaggaagcgcaagattgaattttattgagattctgaaacttggttaaagaaagcaatggagggaatggggcaggaagaaggggttgtaggaggaagcttgattagctttgggaaattcttatgacataagaggctataattggtacaagcagcaatgccaagatttttaggcaaggggttcaaagaatcttgttaggttaactgtctgtttatgtcttctattgaaaagttgataagtcttttcaaaagttcctgtagtaaacaagaaagacaattccataaagaccactgaagccaggttaatgtagacattaagatatacaggaataggtttcttttttcatttgtcaaataacataattaaaaacatacttaaagattactggtcaggcgtggtggctcatgcctgtaatcccagcactttgggaggccaagacgggcagatcatgagatcaggagttcgagaccagcctgaccaacatggtgaaaccccctttctactaaaaatacaaaaaattagctgggcttggtggtgagtgcctgtaatcccaggtactcaggaggctgaggcaggagaatcacttgaaccttggaggtagaggttgcagtgagctgagattgcaccattgcactccagccaaggcgacagggagagactttgtctcaaaaaaaaaaaaaaaaaaaaaaaaacttagagattactataaatgtttcctccaaataagtgaaatttttattggaactttatatatgcccatagagaacacatatttaccaaattagtttggtaaataaaataatcattatacatgaatatttgtggttacagacttgctagagtcataaaagaaaaatatagcacttattttcttatctttttaaaatatatttaaaagctaaaaagccttcttattcaggaacacattgaaaatatttgaaataataaaaacaaagtaacactgttaaattgaattttatttacttatgtagaaataaattgctcagaaatgtgttatgaacacacttaaaaaatatttagtttaaaaaacaagagattatttaatagatcgaaaagcttagtaattcaccaggaataaaatattgtttaaatgaatagaaaatattaggtcactattaaaagacttttgaatttattggggctaaccaaggtcaagtgctgtaataaaaaaagactgagaattttgaaagtagtgtttatgattacttctaaaataaatggtctttgagattcatattttctcagtaagaatgcctactgtcttctaatataatttcacaaggttacttaggtttatgaatactacaagaaataacttaaaagttagaagtttaggataaagtattaaaatcaggatggaattgcagagaaaggaatataacaagagcaagagagacagataatagataagttgaacaagaaaataatttaaatgttctagctttagaaagaggctttcataaagaataagtgccatctacccaaagacagcattttttaatgaaaatatttctgggttaaatgatcaatcctaagcattcttaaatcattagcttcactattataaagacagttttccccaccactatacagaggctgaaagagcctaatgtggaagctgatcaagtagtatgaaatacttgaaatgtatctaacataatttatatctttttgttaagcattgccctcttcagaaactgccctttaaaacataaaaaatctcaaaagagcccttggtaagaatgggatcatagaacagaagggattctgaagctgtgaagtgctatgaaaaggaccttaagggttacgagaagacatttcatttgccttgaagttttgcctaggatctctcctgcttgtaggcatgaggtgtcaggacttatgtgagtccagttggatgttacacgttataagttttatgcctactgagcaggagaaggtcatctatccatgtatatcttgggtttaaaaaacaaaagccaatgtctactaaaatattactgatttattgtttctaaattgaaaatatgaaattaaacagttcagaattcatttttggattagaaaaactatggacatctccaggctaaagaacgttttagtacttttaggaagtaacacatttttataatggatatgttcagagcttcatagcttttaacttgtgtaataacaaacagttgtgatggtttgctactaattcaatagttgaaatggaaaacagaagaaaaatagctcaaattccgaagtttgggtgttttagtttgtaaaatggcctaacaacatgtaggtatgaaaccagtgttctcattatgacttatgtggaaatgaaggttttcaaggaaccaattttactcattatcaagagcacagttttacagtgattttcatcaaccatctaatcattttgttcctttcactacctgagatttacatatagcagatataattgtagtactttgttttctagcagttttatgcttagaccttttaacataatagcacttctttttcttttgaaatcagtgagatctctctactgtgtcttgcaagacaaagatgatgtgttatgtggacttaactcctttgtgctgtttcagttctttgcaaagcttcctctttgccacaaaatcagcttaaaatactttcagtgctgctttatgcatatgtgattcaagaaataaagaaatagagattgaatcctttttattttacacatttgaagattcaaggataagcatatttttagcttttttttttacattcttagtcttaacgctttaggaaatgaaaaagaaacttgctttggcattctgcatggtgtaatttggatccttggttttctggcttcagtttgcatgctaaggatttggtatagtgagggaggctgagaccattataaatagactcctggattctgtaatactgggagcattctgttcataatgcaagaaagcttaaaaacattgctttcattataattggagctgctataacaatcctgcagacatactgtttatgtctggatttattttacccaatatttctttgtaaaagccttacatttttattttgtagatggctgaaaaaattggttagatgaagtcaagatgcactgatgccagaaaattgtgtaagtaatgaaatatgatgacttaaaaagtagttttttttccgacatcatccaggcttaccacttacactattcacaaccattggatacttgccattttcctttttgcagtaggaagaactggcccacaagtttcctctttatgtttttatgtgggtagaaaaggaaaccctctggaaatgttgcttcagcaaaggttactgtaacttatatgcaatagatctcaatactcgtagatagaagagcttactttgttttgtggcttgatttattttaactgaattgagcagataatcgaatagcacatggacagactcagtaagaagttcagtcactccttatgtgtttcttaaatataatacttcaacataatactttcccattattgctgacttaatattctacactgctcagtatctacatatgttctaaaaccaattctctgacaactagatgccttttaattcaatttaattctgacactaactacctagagttagcacaggccttacaagtttgtacaaacagttgtgaagacaagactacactcacttcggatatcaactgcaaatctcagggccacaggcgcacctgactgaccagttataaaatcaagagttctcaccactcctttcagatttgataatttgctagaatgactcagaattcaccaaaatcactgtatttacaattactgttttgttatgaatgatacatatcaggaacagtcaaatggaagaggcatataggcaaggtctgagattggggtggggtaggggcacagagcttccatgcgcttctgtagaatctggcctattgccctcctagcaaatcaatgtgctcaccaacccaaaagctgcactgaatctcaggttcagagtttttattggggtttcattatatagacataatttattaaatcattggccatgtgattgagctcaaattctagtacccctggttcttgccagagactgagctgttcccaagtttcagtcctctagtcacaatcatatggtgggtgttttcagtgaccaactcccattcagaatctgcgtaaggtcccataatgagtcacctaattaacctaacaaatactctgactcagaaaatttccactcaggaaattccaagttttttgaagctctaagacagaaatggataacaaggagtagaaatcttttattatatcacacatatataaatttaactggagttatttaattgataatctttaagataatggagaccaattttttctcaagtgctaattttttttttttacagagaataatagtgttatagtctgttagaggtattgtggtttgaattatgataatagaagatttgaatataaacttgataaccaaaaatacaatgttttaatgtcataaaagtttttgaagaatggttgttactaaagtatgtttattatgtttaacataacttttcatttcttatgaagaagctaaatacatatggattaatgaaaaataataacttcctcttttcatgttattactctccagttttcagatttttattctattgtatgacagatactgggtataagtatttacagaataaaatttggaataagcaaaaaagaatactgggtgtctccaatgaaaaactgcattacttacaatctcctcccctggcttatctgattctaattctgcggggctctgtgcccttcactctcttggagttattttacaactccttaaattgcacttactagtgacccaaaataatttttctctatagacatgcaaataaattctgtcaagtagagacttccctgctccactatgtaataagtcagtttcgtgtctatttgcaaattcgttttaatattccttatccataaatgtgtctgttctttgacttctcctttgagcagtttaacgcttgctcacttatttcattaataatgaattacgtaagatatcttacagatgctaattttttatctgtatgagagtaatgattttaccttttttgggaaagtcatccttaaacaaaaattattaagagattgattacaggatctgaaagaaagaggggagaaaagaaaataaataactgttgttagtttagttagcttcaaatggaccagctagtcaaacctcttcagaaaatctgtgtttagccatataataaatactttgtattagttcagtcattcatcaattaatgctttataaatgttatttataataattatttgcctaattaactaaatgtttaagtgtttatagatttaacataagatgtaggtaagaaatacatttgtattgaagagtgccttacagaaacaaaaatactttatatgactatcctgttaaataccagccaaaacatatttttagggaattttttgaaaataatctgtgtactgataattctaaaatttatatctgtagctcacttttcaaaccctaatttcagaacccaaggtttctagcctaagcacctagagaatgaaactggaataactaagataaataaggctgcagatagagaaggactagggatgaacatcaggattttggttaggcagagtgattttgacatgtttagtatacatctaggtggagagtttattcagataatcagatatatgaggttatagctcaatagaaaagtctctgtaaaaagatatcttgggaactgctatcatttacatgatatctaaagccaggagactggatgagaccatgcagggagtcagtgtagttggagatgagaaaacaaaaaatgaactcttggattctgtacattaagagtctggggacatgaggcaaaactagcaaagaaaactgagaaggaaaagccagtaagttaggagataaagggagagattatgctatcctggaagccaagtgagaaagtgtatcaaggccaaagtgctgatggtctgtgaagatgaaatagaatggacaaccgaatttacctaggtggagatcattattgtccttaataggaaaatgagtcacagcaaatacaccattggagtgtgttaaaaagagaaagggtgggtgtgcatggtggtttgttcatacctgtaatctccgcactttgggaggacaaggcaggtggatcacttgaggccaagagttcaagaccagcctggccaatatggtgaaatcctgtctctattaaaatgatagatagacagatgatagatgatagacagatagatagatagatagatagatagatagatagatagagaaagggtagagagaaaagtgaaggcaacatctttttattgatcttgcttttgcctttgcctcctgaagacttcctggcgacagaagttctagcgatccaattaaaatgtaaatcaggtgttgttactgtctactataaactcttcagggctttcccatctttttcagggtataagctaaaaatctgtgtctggctcctgcatgatctttctgaccttatctcccattcttctctctctagttctcctatctctagctatccaagcctcatgtctaaagcctcgtgtttcaggggctttgttcttattttaccttttaggtgaaatgccctttctccttatatccacagccctctctcttcccccagatatcacttcagcgaggcttttctggcgattccattgaaaaatcacacatccttcacttatgttccatgccgatactccatttttggacttactagtactattactagctgacattttatacatttatcttgtttattgtttgcctccctctccattaagttagatccatatgggcaggaattaaatttattttgtatcctggtgtatttcctgtacttaaaacactacttggcactcagagtgcatgcaataaatattttttgagccagcaaatgagagaggtgccatgcagttccgtgcaaaataaactaaacctctgttaaagtgaacaacgggccgggtgcagtggctcacgcctgtaatcccagcactttgggaggctgaggtgggcagatcacaaggtcaggagatcaagaccatcctggctaacacggcaaaactctgtctctactaaaaatacaagaaattagccgggcgctgtcgtgggcgcctataggcccagctactcaggaggctgaggcaggagaatagcatgaacccaggaggcgtagattgcagtgagctgagatcacgccactgcactccagcctgagtgacagagcgagactctgtctggaaaaaaaaaaaaaaaaaaaaaaagaactggtggatacattcacctatggtcgtgttttgaacccctgcctatacggctggctggccctgggatgatatctctatgctacagttcttttaactgccacagcagccagtaagattttgatacattcagtcccttttagggatctcttataagaaaatgggtaaaaattggacaaagatatatgtgccaagaattcactgttatgtaatttgtaatagtgattatattaatcttgtctaccactctttgattcaagtgatagaaacccagttgaaatctacataaggaaaaacagaaaacaaaaaagtgggagcaacatatttgtatattcaataaaatcataggaaagataatagggaactgtttatgcatgactagattcagaaacccaaatgatgtcaagacttccttttcctaactttgttatctcacctctccttctacttgactgctctcaggctgtagctgggtgttcacatacggtcttgggcatgaatactactcaaattattttcctaatttttatttaattttctttttgtgtagagatgaggttttgttatgtttgagaccagcttgaaagtattttttaagtcatccagcatccagataaaaggacaactgagtttgttttccaggctttatgcatgctactgtacacacacgtaacaccctgaacacagcacaggaacacataattattcagggaacaatatctgtgtgcattttgtagcctgcttttgttacctagtacgttctaaataattttttggttattaaattttatttgaaaatgatattcaaagattgcccaatatttcattctatcattaatcatttcctgtaagatgtttcaactttaagatatttccaatgtttcactaatataatgtgaaataaatgctgaaataaaaatcagaagcatatttcttattgtgtcctagaaaaaattcctagatacagaattagtgagtcaaaggctatgcacatttttagattcttaaaaataattgccaaagtgactttgagaaagttgttctgatttaccctttacaccagcattgtacaagagtgattttataactataaatctgctaacattggatactacagtttgcaaatattgttgccagtttgacagatgctttaatttgcttggatagttcttcatatatttattattaatttgtatttctattctgagaattgcctaagcctgtatttcccaattttattgggatgtttttcatttccttattgatttgaaaaagatatttggtacatttattagccctttattgtatatgctgcaaatttttgtatttgttttgatatataactccagattcatatgtagtcaaattatcaattaccatagtcaccaacatctattgtcatatttagatattattataactgcagtacctgtataaatctaattttgatcatgcctcctttccactttccagcttacactgcaattctagtaatgcttccctattcatcggccccactacattttgctcttctctgtctccttcaagtcttgatctctcccttaacccagcaaagacgccatcaaaacaataactccttagactgagactctcttaaccgtgctattctacctttagctagtttagcaaaaacccaaccctgcttggattcaactctatactgtttgccccagaatcaatggaggaaaaatgcagctatgttcgctagtttctcaataaattaatgatcaccatcctcaaatgggtcttctttctgaagtcacattacatttccttaaagtgtgaacaattccccttcaaactattcttctttgctcttccttgacaattactttattccaataaaatttgcctctctttctgtatcataactgtatctaaacggacaatgagcaggggccagatcagacctgtgactgcagcagaaaccagcatggattcagaagctaacttgtggccataaggctcacttctccaccatgttgagatggctcaaacccctcagtccttctatagattcagacaaaaactagagaaaagcaaggatgggagtgttggaaagattgtctttccccacaaagagtaagaaaaagtatacaaaatagaagatactatttcccctttgttacacaggttaaatcaggttttttttctactcttcaatttaagttggtagaggcaacttttattacactttgaatcataataaatttttaaacatgcaaaataaattcctaattagagttgagtactaaccttcttatttgatctgaaaaatgttaatataaatgggtaaataaaatgatagaggttccaatttgcaaggaataaggtgaagaaattccactagtactttcaattagtcagctagagaatatttctgaagaaatacttgaattctggagtaaaaaccttatgtctgtaatagtaaattttaggatatttattgctatattaataaaaatatctattatacatattctttaatatccttaatgaatagcctcttccagaagtccatatgacctaccaaccatgactaattaggagtaaaacagacataaaatcttctgtaacaataaatatgaaagacaagcagggatgcaatattaggaggtaagtttaacatatatttttaatataatatttttaaaagcatacccatttgagcctcagaacacttttttggtgaaaacaatttcaaatatgctcatctttctacagcatttttggcaagattccataaattttctttctagttatttattaatcacagcaacatgtatgaaattcttaacaggtcaacacattcttgttaggttgatttaggatgcacttgaacttttacaatttaaaacttgatcccaatcattgctacatatcatgagaataatctagcctatgtacagtgataaagtcttttttgtctttatagaacttttatacttcttttactgatttatttcttctccacatcagtccactgaaactggcaaaatatcgtcatgtttctaattagaaaacagagagagagaagtgtgaattttgcttaaggtcaatccgaataattaatcacctgcttccctctcctttcttcaaggaaatactaggaggagagaggaggctatttcatttatctcctgagttgtgtattgtgaaaacatacctcagtctctgggccttccatggtgctaacagcttcattatggaaaaactttcactttattactggtcgcagcctcaagtttccagacccaattttctaaaaagatatttctgtcctacaggagaagcagcaatgaatattttgtggggcatagcacattcagtctgctaccttgtctcgttcctcaaaccaccaccattcaaagtggtatgattttataaaacttttctcaaagtttggtactaattatagcgaattgaaaatttcattgttaaattgtgcttccccgtacacccatgggtctattttggggaacacccggtttttttttcttttttggagatggaatcttgctctgtcgcccaggctggagtgcagtggcgcgatctcggctcactgcaacctccgcctcccgggttcaagcgattctcctgcttcagcgtcctgagtagctgggactaaaggcacctgccaccacgcctggctaactttttgtatttttagtagagacagaaaaacacggggtttcaccgtgttagccaggatgggccccatctcctgacctcgtgatccgcccgcctccgcctcccacagtgctggatttacaagcctaagccaccgcacctggcctgggaacactcattttttaaagtcagatttctccattgtcaaccaagtactacctgcccgactctacctaatcttgcttttcttctaatctgtactgtgcaaatattcaccaccttttaggacacctcaccttgcacaggatcgatttgccccaggattcaacatcctctcaccatcagaccttaatctagagatgaatgactccaggtcttaagaacccaagtctttctgaatggtgctgggcacataaggctgtgtcttcctaattcttagcaagagacttgaacataattctgatgccattgacattttttcatcagtgtggttttttatattatttattcctcccatagtccagataatagcagtagacccccacagcattccccttttctgaaggtaaatattaaaacagtataatttaatattatagtggagaaagaattatctttccgtttcataaattttaaaagtgttgccttcacaatagaggcctatcaaccttgaaaaatgagtgatgatatttataatgtatttttaaatttttttctaaaattattcagttaataaacattagtcaccaattatctacaggcactatgttctaaaggtgaaaaccttggttagacagcccttctcatatacccccatagcctcctatacttttcaagtacacatcacaggatcctatattgtaattgcctgtttacttgcttgagttgttcaccagattatatgcatcatgagggtgaggattggtagcttctattttccctcttatctctagcatttagcacagtgctcataaccaagcagtttagtatataactcaagatgaatgaattacaaatctcaaacaagatcactgacattttagatagagaaataaacatccatgtaaccggttaaaaattctatggttgggtaatatgttgagaggttattttgtggttcatctttgttgccacagagacagcaaaatatagcaggtacatttgccttcttaaaggagctcaaaagtatagatctgtgttcagaattctaggtgccgttttagtggattggaaaataggaactcctatgtatttctgggaatgtcttgataataatccctatgcagattgtatcatagaagatgaagtccattgggaaactcactctaggaactgagtaagtaaaaatacttaagccaaacctgagtccctccctcccagggttaaagaggaatagctctgtactgtgcctatggagcctggacactcagccatggttagagagcttgagacttttttattttgcatggatggagagagccatttgaatgagcctgagggcctgggcattctcaacgaaggcaagatgacccttgtctacccagcctaaatacctacaaatccttagtgactacagcagttctctaataatggcttttattgggatctcctgacattgagagcttggaatcaaatttaatgtgctgcaaaatattctcgagtaaccaactttattaactacaagtgaaatgatttaggagaggtcagagaacaattatttttccaggggccttagttttggaggaagggatatgtaacttagcagaaatccttaagcttcgattagaaataggaggagaaaagagcatttgagggtgagggaagagtataagtaaaaatagagaggttaaaaaaagtatgttgaaagaaaaacatttagtttggtgctgctaaagcggtggttactggtatttgttgggcctgagaaccatctggaatgtttccatagatagtatgtatatcaggctcctaaatgggacagtctgaataagcatgcctggaatggaactctatgatgtagatcttgaagaagttttgcaggtgtgtctgcattcaaaaaggtgaaaaacataaggatagaaggttaaattagcagaaaagaataagacgtcagtcaaaatccagataaaattggattttcaagactgttgaacaatctgctcaaaagttaggactttgaatgaagaaagtttcatctttctgtttattttatggatatgtatcattttcgtgttttatattgtcactcatctttaacacttagaaccacccccacttccttcctttcttccttcctttatttcttaacaaacacatatcgaatacctattatatgttagacaaaggtttaaggatgtggatataaaaatgtgatttatgatttcaagatttcttagtgtgattctcttaatactttactagactctgtaaaaattatgtcatggttaacaatttagaatttataacaactggttacttgtataggaaagtttaacctatttccaagagaaaacaatattttcccacaaagacattgaacatttttacctctgaaagcaaaattttgcctttcaaagacatctaaagaaggaaaatactaacctcattacattataagatctttgttatgaaattctaaatgaaccttctaaatactttgtaccttggctggcctttctaatttaaatatttactatacatgatgagtatcttaagaaatttcacacttaaaaggctcttaaagagtagtggtttaaatagtttttgacagtgacttgttttacataacttgaaatattcaatatgtgtgtgggtgcatgtattatgcacttacagacagaattacacttacaaatgactttggcttcagattcagacctcagaaaatgacttaattccataacctgacactttccactgctataggttaatcttctataaactcattttgaaatgatatgttatggttatcccaaaactccttaaagtagacatatctcaaaagtctgaaatgttaatcatgagaactaaaagaactcatttttccccaaaagaaaatttgatctgtcgccaaagccaaataaatattttctataaaatgctgaaataatgtatggaaaaatctgtgaaactaaaacctccatacaatctaagttaaatgcccatatttatttatataaggagagtgaccctcagtgtatagaagatacctctttttgtgactgtgggttttttttttttttttttttttaaatgaaggcaacactgcatggcctgcattctacttaattaaaagctatagtgggccttcccagatgttaaaggggcctgagctgaataaagtgttgacatcagatgaatgggcgaggccacctgctagctccactcttggctttgtggatgatttgcattcctgtggcctgttgctcggcatgaccactctcagcacttcacagcaccatggcctgtttaatatcatggatgccttccagtcatgaagtctctcttctatattaacatcagcacacaatagcaaggggcccattccatgatttctttgctcagagtatgatgtttttacttaatttagaccacataaaagaaaaggaaatgcttttctacaggctggattaagataaaataaacttctccttgcctaaaatcattaacagatcaattgttctttcatgaagacaatgctccttattttaattggcaaatagtataaattagattaaaaatataacttgaccttagtaagcacagaatgtttcaattttatttctttgttcgtcaatttaagataagtcactcaagagtgtttagattagactgtaaaggctgggatggtaatagtctataaacctaggaaattccatgtttcatagaggagaaatagtaggctgcaacagaagtgaaagggataaatcataacattacaatctagagtatattaagaacaaaaagagaaagaaaggtattatgggaggcacttgcaaacaattgattttaaattattttttcacccaatttaatgttcaattattttaattttggtgaagtatacaaatataaagtgtacataaaatgtaccattttaaccatttttacatgtacagaaagtcattttgtacaaagtggtcaattcatcagaaggacataacaatcctaaagtttatgttcctaatagcagagtttcagaatacataaagcaacaactagaagtacaatgagtaagagacaaatttataattgcaactggagattttaatatccctcactcaataattgacagagacaataggcagaaaatcagcacagacatagaaaactgaataacaacaaccaacttgacttaattaacatttctagaacattttatctaataacataatacacgttattttatatgagcatgaaatacttactaagataaatcatgagatagatttggtatgtgaaacaactctcaatgaatacagaatcattaagggaatacacaatgtattctctaaccatggtggaactaaattagcaataaatagtagaaattaatctataaaatccccaagtatgaggaaattaagagactcctaaataactgatgtgtcaaaaaatacatagaagagcatttatttatttattttttaagatatgggatcttgttgcattgcccaggctggaattggaactcccaagctcaaagtattctctgggctcagcctcccaagtatctgggactacatgtgtgtgccaccacactggggtcagaaattatttttaactgaaaaaaaaatagcaaatataaacacaaaatagcaacattcctgggatactgaaaaagcactacaaagaggaaaattgactgcactaaagagttcaaatcaatgatttcagtttccaccttaagaaacaaacatgcacaaaaaataagaaaataatgacacagtcaacattaatgaaagagaaaacaaaatgaagacagtaaaccaatgaaacccaaaactgtctctttgaaaatatttttaaaacttaaaaactttttgccagactaatctgaaaaaagatggaaattgagaagacacacattaccaatatctggaatggaaagatggcccactagagatcctacaggtattgaaacaacagttaagagaacattgtaaacaactgtatgataatagattagtcaaattaaataaaatagacacttttatttttttgaaacagagtttcgcttttgcggcctaggctggagtgcagtcgtgtgatctcggctcaccgcaacttctggctcccgggttccagggattctcctgcctcagcctccagagtagctccatgcctgggattacaggcatgcaccaccatgcccagctaattttgtatttttagtagagacagggtttctccatgttggtcaggctggtctcaaactcccgacctcaggtgatccacccacctcggcctcccaaagtgctgggattacaggcatcagccaccgtgcccggccgaaatagacacttgtttgaataacacaaactgccaaagtgtattcaagaaaaaatagcctgaatggtactatgtgtataaattaaaattgtagtaaaaaaatgtttctacaagaaaacttcaagttcagataccttcagaggtgagttctactaaacatttaaggataaaataatactaattctacacagatttttttagattcatagtacattcgataagactagtgttgcattaatatcaaaaccaaacaaaaacagttaaagaaagcaaaattacagaccactcttcctcataatcatagaatctcaaattctgaacaaaattttagaaactgaataaaatagatagaaggataatgcattttcagccaaagatattttataccaggaatgaaagtttggtttaacattgcaaaaaatcaatataattcaccatattagtaagtaaaaaaagaaaaaccatatgatcatctcaatagattcatcaaaagtatttgacaaaaatcaagcttccattcctgattttaaaacaaattttaaaacctctcagtgaaataagaaaaaaaggaaaacatcttaaaagtgacaaaagggaccaacaaatatctggaaagttaacattatacttaatagtgttaaatactttcccatcaagatcaagaacaagacatgtatgtcagatctcactacttctgttcaacattatactaaagatgggagccagtaccatgaggcaaaaagacattggaagtaaaattatatgtatttaagataacatgttcatctacacagaatattcacaaaaatccaccaaaaaattaccagaactattaaggtatttcatcaatattacagcatacaagatc

SEQ ID NO: 60953 - DNA, 542 bp, Homo Sapiens
tttaaaatatttgaagaaatttattgagtcaaatatgagtgaccatgccccatgacacagccctcagaaggtcctgaggacatgtggcaaaggtgttcttcaaagtgttcattattaaggcatccatctcccataacttcaatgcactttgctaaacaatgcattatttctgaggacatctgaaactgtttctgtaccaatggtcttaatcagaacatcacataaattgccacatctgtgtgagatactcaggaccacggactctcacacactccagaagaaaaggcacggattctgctgctgcccctccaacaccattgtggaaataaaatttcagtaaagggaccaccagtttgacaacctgcttggtgtactccacaaagcagtcaaatcagctatgtgctgcaaaaggtcactttttttttctttgagatggagtctccctgtcacccaggctgtctcaaaaaaaaaaaaagatatattttacaatcctgcctatgaatagggagagaggagagtcacatcatctgggtttttagcca

SEQ ID NO: 60954 - DNA, 6184 bp, Homo Sapiens; identical to SEQ ID NO: 32616

SEQ ID NO: 60955 - DNA, 2118 bp, Homo Sapiens
cttaatgagtgagcagtaagtctgtgtaagaggctgaatgcatgcccctcagataagccagtacactccttgcttagcaacagaacatcagggtgatgtggagaggggcaggatgtggacgccacattggaaatcggcaacatctgagggcaacaacaaacaagtgtgttgggaaataagaaataactcagttttgacaactggctttgtcagcttttgtgatgtttctttagcagtttattggaaagatggtatgagatgacgtgctgcttcattgaattgctctttcccccatctttgccaaatctcaatgtatcgttcttaaccccacctcctgtaaggggctttgctatgcttcagctggttgtctcagcagctgaagtgctgcccacctgtgtgagttgggtccaggaaaccatgtctgcccttctgataagggaagatgaatctagagctgggtgaagatctaaattttaaccaaacccctgggcccaggaaaataacaattgaaaatgtacaaggcagtgttttcaatattaaacttccccaaggaaagcacaaactagtctttttggaaagggagaaaggattaagccacacagtattagtctttgaagcagtactggtctctaggggctggtgccaaaatggagtcccatagtagttacactcgatggcctcatgtactatatactgtgccgaattgtattaaacagtggtggggagttactgggataagaacttgtctaaaagtttacaaaccaaaacagatctgttaggttggtgcaaaagtaagtttttgccatacttaatgtattgccattaagtatggcaaaaaccacaattacttttacaccaacctatgtatttaagaatgtttggtttgccagattccaaatgaggtcttcagtgcagcaaagcccaaaaggtgtagactcagttatgcaattataaggttaaggcgtagaagaaagctgctgctaggtttttgttgcattttacttgactgctctgctgtttttcttgtctctcatgtttggttagctatgacttgagcatcttggtaactgacaaaggtcttccttgggggacttgaacatcttggtaaatgacaggtcttcttggaggactccagcagtatcttgtttaaacgactgaaaggactattaaggttgttgaattgtgttaattggaactcattgaggaaatgcgacattgatcctcctcttattccacagtgtgttttctgatcatataaagaaggttccgaaccatccatccccctcagagtttattcccctggtaagctgtaattgcatatccagtttaaactggactgggactgcatgttggtgaggatcggcaggggttttcccccttttcgaaagatgaaatagattcttgagcactggttgcagaagccaaaatagttcaaatagctttgcataaccattgggttctgcttctgattcaggtgctgggcatcatgtcctccctattcttctcttcttggaaacccagcctatctcataaatacctacttccggccacccatccaacctccctgctcctttcaacacaaatcttggatattgccaaaggaagccattcagcagctgctggggtttttcatccccctgacatgcatacatttgctctgggagaagtgtcttccctctgaccctggtccccagctccgtctgtgcttaattgctcttacctgttgcactaatgaatatgactaggttttaaagggggaatgtgaagcaataggcacatggggcttggatgaattggtcccacagatataccctgccttaagccgctgaggtgatgagtccactgctcatgtgaccctccacctttgtggatccctcttggtttgtgaccagtgtgtctgtttgttgaggttgtacaaacttgacaaaagttaatacttttgtttgtattttctgcactgttgcactctccaaatggccccttgagtatttttattgacttgttacacacatttttgtctttgatgtctacattttttcctttaatgttttttatttggaaggttacctgctgttggatttaataaatttgtttacttgaaaaaaaaaaaaaaaaaaa

SEQ ID NO: 60956 - DNA, 544 bp, Homo Sapiens
tttaaaaaagattacaaaactgaatttattgagattcacacaagatgcacttataaaattagtactgaatgccattaaaacagaagaaatgaacataatcccgaactcccaacagcatctgcaaaggaatggaaatcttctgaaaatgacagcgcagtaacagaataattcaagcggaactgaagatctatccaaaccatgttcctgctctgaaatcagggttgtgtttggcaaagctttccccaaactattccattcacggtggcattgttccttttgttggtaaagggagacggaaaaaataactctaaaatggggctccattaaaacacacacaaagcaattaaaagctttttcatttttaacttaaaatacttcctggtttcacaaaggcatgtccatacaatttcctcaacattaatcttcagatttctttagttaatgcaaaacattaaaattcacttacttttttgtatttcaaatgaacaagtcagaacattaaagcttgctttatatttcatccaagagacagacaaatcaccta

SEQ ID NO: 60957 - DNA, 4495 bp, Homo Sapiens; identical to SEQ ID NO: 32238

SEQ ID NO: 60958 - DNA, 537 bp, Homo Sapiens
gaccagaatagcttttatttcacatgaagctaaggaaggaagtcgagaggacagggctggttctgtgggcgctgcctggcaggtgcaccacctccaactgctgggctccagctccagggctcaaaagccatctccgaaaaggtcgggagcggggctgaagggtcccgggggcaggttccaggccagctcctccagcaggcccaacaggcctttcacctctgtccccaggtgatccacggtcttctctaccatctcctccatgacatctagacggcgttgcacagccatgtgtctgtcacacgctgtgctctgagctgagtctcctcgcggagggctgaagggttcggcagcggccaaagagcccgcggcgcggagcagggccagtccggtcagcgcgcagagcatgggccgcatggtgccgctcgtgcctaattcctgtcacccgggggatccactagttctagagcggccgccaccgcggtggagctccaattcgccctatagtgagtcgtattacgcgcgcttactggccggtgt

SEQ ID NO: 60959 - DNA, 479 bp, Homo Sapiens
  misc_feature (439)..(439): n is a, c, g, or t
  misc_feature (443)..(443): n is a, c, g, or t
  misc_feature (452)..(452): n is a, c, g, or t
  misc_feature (456)..(457): n is a, c, g, or t
tagttgacgttggtctttacggaggtcacaggatcccagcccggcctttgtgggactgaggtggcgctgagtgggagagcagcaggcgatgcgcgaaaggcgggacttggagataaatactgagcacccacaacaggcagccagcaccactgcagattggatactgcaatgatgataagcatggcctgcctttatggaggttctggatgttcctgtggataacctcaaggagcacgggacctgggacatgactgcccccagcattccttctggcggcagacagagtttgtcagttcgccaacatcctgctttcatgagaacagtttgctgtttgctcacagagcctccagtggtatactgagttggtcacgaccctcattccttcgggctccaacatctccccttttggttttgcattaattggataaaggtaatttcngcanaaaacaaancaannatatgcatgcgggccgaattcc

SEQ ID NO: 60960 - DNA, 2356 bp, Homo Sapiens
gaattcggcacgagcggggcgggaggggcctgcgcggcggcgggagcccagagccgcgctaaagcgggtcaagcgtcctccttttctccccgccccttctcctcctcctacctgggcctctgcgtggagacgcgcacctggcaaccggaggccgcgtctccgccttctctgctcgcgcctggcgcccggagcctgcccgggacctccgccggagccgcgctcgctgcaggcggcctcgagcgctctctcgttgatgccgttttggaggtgaccggcgcggcggccgctctatggtggggccgcgttagtggctgcggctccgcgggactccagggcgcggctgcgaggtggcggggcgccccgcctgcagaaccctgcttgcagctcaggtttcggggtgcttgaggaggccgccacggcagcgcgggagcggaagatgttggagctgaggcaccggggaagctgccccggccccagggaagcggtgtcgccgccacaccgcgagggagaggcggccggcggcgaccacgaaaccgagagcaccagcgacaaagaaacagatattgatgacagatatggagatttggattccagaacagattctgatattccggaaattccaccatcctcagatagaacccctgagattctcaaaaaagctctatctggtttatcttcaaggtggaaaaactggtggatacgtggaattctcactctaactatgatctcgttgtttttcctgatcatctatatgggatccttcatgctgatgcttcttgttctgggcatccaagtgaaatgcttccatgaaattatcactataggttatagagtctatcattcttatgatctaccatggtttagaacactaagttggtactttctattgtgtgtaaactactttttctatggagagactgtagctgattattttgctacatttgttcaaagagaagaacaacttcagttcctcattcgctaccatagatttatatcatttgccctctatctggcaggtttctgcatgtttgtactgagtttggtgaagaaacattatcgtctgcagttttatatgttcgcatggactcatgtcactttactgataactgtcactcagtcacaccttgtcatccaaaatctgtttgaaggcatgatatggttccttgttccaatatcaagtgttatctgcaatgacataactgcttacctttttggatttttttttgggagaactccattaattaagttgtctcctaaaaagacttgggaaggattcattggtggtttcttttccacagttgtgtttggattcattgctgcctatgtgttatccaaataccagtactttgtctgcccagtggaataccgaagtgatgtaaactccttcgtgacagaatgtgagccctcagaacttttccagcttcagacttactcacttccaccctttctaaaggcagtcttgagacaggaaagagtgagcttgtaccctttccagatccacagcattgcactgtcaacctttgcatctttaattggcccatttggaggcttctttgctagtggattcaaaagagccttcaaaatcaaggattttgcaaataccattcctggacatggtgggataatggacagatttgattgtcagtatttgatggcaacttttgtacatgtgtacatcacaagttttatccggggcccaaatcccagcaaagtgctacagcagttgttggtgcttcaacctgaacagcagttaaatatatataaaccctgaagactcatctcattgagaaaggatcctacaacccaccttgaaggtataactggatccagagagggaaggactgacaagaaggaattattcagaaaaacactgacagatgttttataaattgtacagaaaaatagttaaaaatgcaataggttgaagttttccagatatgtttctctctgaaattactgtgaatatttaacaaacacttacttgatctatgttatgaaataagtagcaaattgccagcaaaatgtcttgtaccttttctaaagtgtattttctgatgtgaacttccttccccttacttgctaggtttcaataatttaaaagagtcaaacactataaatgagtaagttgacgatgttttaagattgcacctggcagtgtgcctttttgcaacaaatatttacctggcagtgtgcctttttgcaacaaatatttactttgcacttggagctgcttttaattttagcaaaatgttttatgcaaggcacaataggaagtcagttctcctgcacttcctcctcatgtagtctggagtactttctaaagggcttagttggatttaaaaaaaaaaaaaaaaaa

SEQ ID NO: 60961 - DNA, 562 bp, Homo Sapiens
  misc_feature (319)..(319): n is a, c, g, or t
  misc_feature (330)..(330): n is a, c, g, or t
  misc_feature (376)..(376): n is a, c, g, or t
  misc_feature (385)..(385): n is a, c, g, or t
  misc_feature (454)..(454): n is a, c, g, or t
  misc_feature (541)..(541): n is a, c, g, or t
  misc_feature (559)..(559): n is a, c, g, or t
ggttaagaggttgtgaacatacatatttatttataatacaaaatgaagattggagggaaaagtgctttaaaaaatagcatgtaagtgtataaaatgaaaattggttggctttcttctccgatacaattttgattgggtgagcattatttgcttttacaataatgctttggttttttgcattgcattgcactaacctggtccattaatacaaacagaaaaagaaggtggaggacgtggcccagccgcgtgggtcagcgtgccgaacctcggcctcctatgcaaagaactttctgagtgggcgatctgagttccaggattnaatggcccctnccaataactacatcacccagcttgggaacccaagccccagcttgtnggccgggancctaacaaaacccaaccagtctacagatggcaaaaactggccacaaggtttggggggatgttggggganaggggccctaattccaatttccctgtagataagaggggaattaggattcttctagcaccggtaccaaatccagaaggcttttttcanggaggttggccagggacncgg

SEQ ID NO: 60962 - DNA, 577 bp, Homo Sapiens
  misc_feature (570)..(570): n is a, c, g, or t
aatgaataaagaaagtttattggagattattaaagaaaaatgataaaataaggcaagtcctagatcagatttaaatacaatatttagaaagatggctatataattttagctaggaaaatcagtaaaagggaatatccttaaaagtgggaggggttcatataaccttttaaaatagcaagttgaggtgtaaaagcatcaccaacaatagtatgtaccttaatctttacacaattggacagtgaggagcaaagtgggagattctaccaatgccacttacagaacagattttcaagttaataagtcataaaatcctaatgtagtcataggctaggatggtgacgacaatctgcaattactggtcagagtgaagcgaagtgacaggtcagatttttcagcatatcaagttactacttaggtatgcttacaaaactttgttaaataaagttgggtattgttagtataccctttactaaatggtgaggatagctgccaaaataatcaaaaggctaattatgtgttaactctcattttatttggattgcagacatactctttgcctttatctatctnacacatt

SEQ ID NO: 60963 - DNA, 590 bp, Homo Sapiens
agtcctagatacaattcctttattatcattatcatgccccctagcacatgaagctgggcttccacctagatcagctaaggacaggggtatgtttacaatgagaacaatttctctatgcgcattaggttaagacctcttctctgtttctagaatactgtgatgactcacatccatgggccagctgcttccaggaatccatctggcctcaacaacattgggctgcctggaataacggctggcacttgcacagggcagggtatggggagcaggcctcaggtttataagcaggactgggcactgctgaaataggggaagggggcagccaacatgtagcaggttctcccaaggcatgtagaagttggtgggaaaatggggctggggtgtgtaacttgtccccttccaggaagggacccaggcacctggtctcctggccaagatcacaggcgatccaagagtcctccagggaagaacaagaactgcacagacgcacagcagagaggctttcctggctggccatgagctgaccatggtgacacgcttcactcctagcccccaatggtggagcgagtcgggaatctcggctgctgcag

SEQ ID NO: 60964 - DNA, 520 bp, Homo Sapiens
tacaaccaaagataaatgattttattttttataatttttacagaccaaaaaacattatacagattaatcataattttctttaaaatgtgcatactgtcactcaaaaatttcacatcctaggatatcagtaattatatcctcctcaaagaaaacacaaaatatttccaaacaaaaatcgctgttgccagatcagactattaaattgtccacagcttctcaaattttcttatacagagaacaagatgattaattttgaaaacggagagaagcaaaaataagaaaagctgagacagatccctctgagacggacattttgtggcctgtaaaactcaagagactaaacagggatgttctttatcagagctgcaaagcgtgtctttaaggcagaatcgttctgtccaagtaaagaaattcaaagtaaagaaaagctcctaccaacttcccaattttgggggaagcattccaaaaggacatttgaggagagattagcactctgttaactatattcctatacccctat

SEQ ID NO: 60965 - DNA, 526 bp, Homo Sapiens
  misc_feature (462)..(462): n is a, c, g, or t
tttgaaataacacactagcatttattgagcagctacccatgtcaggccttgcgctacaagaactttccattttcatttcctttcacccctaggaggtagggattctttgcctccagcacacacagcagcctgggccaatcaagcctctaggattctctaggaacagaagctcaacagtgacaaaccatgtctgtggctgagccccagaagtcgctggcctgtgttgggtgtgaatggatgttaggtgcctcgagtcagcgacagagaccaacggcaagggtagggatctcagagtgcattgttagagcctcggggtctggtccaggaggccagcattgttgacattttgtgatcttggaacccttctccctgcagcagagggagcattagggaggccgggagacagtgggagcaccccctcactgtaatgaacacaagtcccgtagggggctgatggagcanggccacctcaatggacccactttccctccccagcccctgatttgatcagggccacagctgccgg

SEQ ID NO: 60966 - DNA, 567 bp, Homo Sapiens
tttttttttttttttcagttcaggctgaggtgaaaaaatttttttacttgtaaaatatacataacataaaacttggccgccgcgctccgagcccccattcccgagctgccgctgttgtcgctcgctcagcgtctccctcccggccgccctctcctcgggacgatggcgcgcggtggccgcctggggttagccctggggctgctgctggcgctggtgctggcgccgcgggttctgcgggccaagcccacggtgcgcaaagagcgcgtggtgcggcccgactcggagctgggcgagcggccccctgaggacaaccagagcttccagtacgaccacgaggccttcctgggcaaggaggactccaagaacttcgacgagctcaccccggacgagagcaaggagaggctagggaagattgttgatcgaatcgacaatgatgggtatggctttgtcactactgaggagctgaaaacctggatcaaacgggtgcagaaaagatacatctttgataatgtcgccaaagtctggaaggattatgatagggacaaggatgataacatttcctgggaa

SEQ ID NO: 60967 - DNA, 529 bp, Homo Sapiens
ttttttttttagccaaagggtacaaagaagtttattgactatgatgcagtaaagataccaagagttacaatatttgtgcatatggcccaacagtgcctaccctcctacaaaacaaaaacaaaaacaaaaaaaggcaatgaggtgcagcagttaacagcccaacactggagtcaaaggaatggagctgcctcttctggcagcaaagtttcaagttgtgcaattaaataatagtcttggtccactccttgtgggtcttcttacagtttccctttagaaccataactgagtgacttagtagaacattcatattcaggatgtggcctccagaagtgtcgttttgttttgttttgaacaaagacgtgctaccttctctcttgaagcaccagtgctgggttcaggagctacagaggactaagatgttccccaagtagcctgaagtaacaggtcacatggaaaacacaaagcaattggtgagtccacattttgtaatagaattaagagcgtaatgcataaaacttaaagtcatgta

SEQ ID NO: 60968 - DNA, 2337 bp, Homo Sapiens
  misc_feature (61)..(61): n is a, c, g, or t
  misc_feature (2277)..(2277): n is a, c, g, or t
cggaaggtgtgagccgcaaacccagcggagggcgggaagaaggaggaggcctctagggtgntcgggggactgggggccccgccggcagaggtccctcggcctcctgactgactgactgcggccgcctccggccaggacgctgggagctgcctgcgggaaggtgcggggagcggagccatggcctccggtgcgtataacccgtatatagagataattgaacaacccaggcagaggggaatgcgttttagatacaaatgtgaagggcgatcagcaggcagcattccaggggagcacagcacagacaacaaccgaacatacccttctatccagattatgaactattatggaaaaggaaaagtgagaattacattagtaacaaagaatgacccatataaacctcatcctcatgatttagttggaaaagactgcagagacggctactatgaagcagaatttggacaagaacgcagacctttgtttttccaaaatttgggtattcgatgtgtgaagaaaaaagaagtaaaagaagctattattacaagaataaaggcaggaatcaatccattcaatgtccctgaaaaacagctgaatgatattgaagattgtgacctcaatgtggtgagactgtgttttcaagtttttctccctgatgaacatggtaatttgacgactgctcttcctcctgttgtctcgaacccaatttatgacaaccgtgctccaaatactgcagaattaaggatttgtcgtgtaaacaagaattgtggaagtgtcagaggaggagatgaaatatttctactttgtgacaaagttcagaaagatgacatagaagttcgttttgtgttgaacgattgggaagcaaaaggcatcttttcacaagctgatgtacaccgtcaagtagccattgttttcaaaactccaccatattgcaaagctatcacagaacccgtaacagtaaaaatgcagttgcggagaccttctgaccaggaagttagtgaatctatggattttagatatctgccagatgaaaaagatacttacggcaataaagcaaagaaacaaaagacaactctgcttttccagaaactgtgccaggatcacgtagaaacagggtttcgccatgttgaccaggatggtcttgaactcctgacatcaggtgatccacccaccttggcctcccaaagtgctgggattacagttaattttcctgagagaccaagacctggtctcctcggttcaattggagaaggaagatacttcaaaaaagaaccaaacttgttttctcatgatgcagttgtgagagaaatgcctacaggggtttcaagtcaagcagaatcctactatccctcacctgggcccatctcaagtggattgtcacatcatgcctcaatggcacctctgccttcttcaagctggtcatcagtggcccaccccaccccacgctcaggcaatacaaacccactgagtagtttttcaacaaggacacttccttctaattcgcaaggtatcccaccattcctgagaatacctgttgggaatgatttaaatgcttctaatgcttgcatttacaacaatgccgatgacatagtcggaatggaagcgtcatccatgccatcagcagatttatatggtatttctgatcccaacatgctgtctaattgttctgtgaatatgatgacaaccagcagtgacagcatgggagagactgataatccaagacttctgagcatgaatcttgaaaacccctcatgtaattcagtgttagacccaagagacttgagacagctccatcagatgtcctcttccagtatgtcagcaggcgccaattccaatactactgtttttgtttcacaatcagatgcatttgagggatctgacttcagttgtgcagataacagcatgataaatgagtcgggaccatcaaacagtactaatccaaacagtcatggttttgttcaagatagtcagtattcaggtattggcagtatgcaaaatgagcaattgagtgactcctttccatatgaattttttcaagtataacttgcaagatttaaatccttttaaatcttgataccacctatatagatgcagcattttgtatttgtctaactggggatataatactatatttatactgtatatataatactgactgagaatataatactgtatttgagaatataaaaaacttttttcagggaagaagcatacaactttggacatagcgaatacaaaattggaagctgtcataaaaagacaactcagaggccaggcgcaggngctcacacctgtaatcctagcactttgggaggccaaggcgggtggatcacttgagaccag

SEQ ID NO: 60969 - DNA, 596 bp, Homo Sapiens
  misc_feature (564)..(564): n is a, c, g, or t
tttttctggacactaaatgtttaatattagaagaatgattacacatagcttgttacagatttccaaaaaacagtaggtacagtttttaaaatttacattcacagagaattttaatgacattggaaaatgtaagaaactttgaaaaaagatggagtaaaatatgtataaaattgataatagttgatttagggtggtagaagtaaacataattttttctgtttatatttttctctatcttttaaattttgctaatgtgcatagattcttttaaaataataagaaaataataaagttaatacgttataaaaaatagggacctggctgttgaagtgcgatggagacaatttgttagaacatgtggcttgttacacagacgcttgagaagtttgttgagagagaacgattacctagaaacaagagttacagtaaatggggtaaaaagggcaaaagttcttcagattactatcctatttaccaaagtttgtgatatgtattttgaatatatgtgaagagcttcacttctatcaagccatagcacttatttgtcactctgatataacaatntaacataaaattgagttcattcaaatgagcat

SEQ ID NO: 60970 - DNA, 561 bp, Homo Sapiens
tttctgtttaagttccaataaaatttatttggttgacatcatgccaaggtgcccttttgacctccaatttaatcagaaacaaaatccaagtaacaattcatgaaaaaagattagtgaaaacactaaagagaaatatttccaatttcccataatggccagtgttagagaaggaaacatgcttgttgggaaactgtcaaaatgatcataaaaaatgtaaataggataataactggcctaaggtacaagacatccaaaggtatgttttagcttatgtgttaaataaaatgcttgctgatggggtaatcaactttgttcattctttacaatttccatactaacaccccctaaatcaatgaaatacaagcataagaaagaatttttttttaaattcagtccatgaaacaaatgagctcattagcccaaaggcaatgactattcagggcaaaccagagggatctgtatactctcaagacatttatcagtcactcacagtcgtacagaagatggtgattctgatgcttattgtatcaacctcataaaattctgaaaactcacttcctg

SEQ ID NO: 60971 - DNA, 651 bp, Homo Sapiens
attcatttaagattttattgagacacttaacccaaatctgcaggtggtagggcacatcttagaggggatgagttttaaaggatgggtaactgctagctgggcacagaggaggcattcatttcaaggagagcaaacagttgaaccaagtatttgtatgtgtgagtgttaggtggtaggggaggaagtggtaggcagaaaccagtcaccactaagtagctttaatgtatcctgaggtcaacgggatacctttaggaaattttagggtgggttaagagtgataatgataaagacagtaagctgtttttaattattaccacttggacacagttaagaatgtgctgcagtggctttggtgagatgtaataagaatctgaatgagaacagtaacagagggatgaaactaaagggacagatttgagaagtattaaagagagagaccagcaggactttgcccagttttcgtagtgagggtaaagagtcaagcatggagcatatttcttgcttggatactgagtgcggcatcccattgatcatcgtagatatgctgatttcagtggctcagacatcaagtgactcagtagatctgcatgatgagcatcgtactgtgttgctgtcgtaccttacgtatgcggatgaggttaatcttccagg

SEQ ID NO: 60972 - DNA, 521 bp, Homo Sapiens
tccagttttttctatttttaataccgagccattacataatccacacagtaattgctgacttgaaaaactattggcaacattagaaaatccccagagttttaaacaggaaaaggattactacagcacaaaagcctttggtagtttcactgactagtaaaccattggtaatcgtcacttgccagtggaagtcacatgggccctgggaaacactcccctatctcagggaaagcaggctgggggaagggatgaaatgcagcctcagctgggaggaggaggctgctggtggggtggtgtgctgagctctgagtggggctccaacaagtgacctccagccaaaagtgctgaaggagtgagcttcaggttgtcctcgggccaccttttactgcttttgtttcttgctagggaatgagtgaagtctccagcggcccagtcctttccctctcggtttcccaccttcctacagcctccaacatattcctgtaagagcctgagggagggtggactactccagttaaatagat

SEQ ID NO: 60973 - DNA, 431 bp, Homo Sapiens
ctttttttttttttttgcttcacaaatgtcaattttattgacactagtgcacaactaaatacaataattgcaaaggaagtggaacatgtcaaacagaaatggtgacaatgagttagaactgcagttgtttcaaggtactacactattatttaaaaaaaaaaatcacaaaaagaaaaatgttatcactacaagtaggaattagaagagagaaattctggcagtctgtctagaggttaaaacatttcatgcatttgtgagttgctgttggagagttgttttttatttgtccaccgtaatctggcaacatccggggcttaccttcagctctcgcactgtgcgtgagatcgggtgaggcagttataagtgagagcatgctggacaccttgactttgcagtgacgtggaacagaaaaagcattcacctcatcattg

SEQ ID NO: 60974 - DNA, 561 bp, Homo Sapiens
tttctctccagggatttcatagattctgcactaccaatgcttgatgtttgtgacatttccaccaccaaaactggaggaacccttgttttgctggaacatacacaaagtacatttttctgagaagcagatgaacagtcggggcattttgtggattttttatctaagccactatcagccatttgtttaactctgcaacaaaagcaactttaaaaatgtttccactgtttgaggaagaaaaccaggccaaaaaggataagggtagttgatggtgaaaactgtaatttcgaactggtgaagtcctcaggttaaggatgcactagacacatattcacacgtgagagctgcagaaagaaaagaaataaccatttagagaaattcttaacctattaccatcctggaaatcagagaaaagctagcaactagcactagaagcatcctgtatagacatgaaaaggacaaaataggaccacaaaactggtgaaaagcatggtctaaaacagcatcttatcaaactgcgtagtgggttatgaaatccattttgtgggttgataccacttttta

SEQ ID NO: 60975 - DNA, 602 bp, Homo Sapiens
taaatacataaggatttatttatataggtttgaaattatctattataaaaaaatttctaaagaatagaaaaatacagaaaacaaaatatttcttaacatttgaatagatatgaaaaatcagactaccacaatcccatgggaaaaaccccctacttagaggcttttctgagacactgtcctaagctcttggccccacaggagatagggaagaggccagataggaaagtcagcaaggcccagctccttctgaagcttaagatatgccaacttgctgaaacccagaggaatgctggctgtgtatgacaaaagagcatctgtgattcaggtaatgacaagcagccccccgaggcctccccagtccccacctgcctttggaaaaccaccctctggggaaggccacactcaggccagaagcctcccactgagtctgcctggctgtcagcctgcctagctgctctgataattacgggggaaaaaaagctgattttgcatgtggacctcagtattacagaggagcagcagcagccccgtgtggacatctcggatacatttacgacccagtcagtgcagcctcgtgggcacagctaatgagccaggaagac

SEQ ID NO: 60976 - DNA, 408 bp, Homo Sapiens
  misc_feature (288)..(288): n is a, c, g, or t
  misc_feature (314)..(314): n is a, c, g, or t
  misc_feature (365)..(365): n is a, c, g, or t
  misc_feature (393)..(393): n is a, c, g, or t
ttttgtataactactaaagaaaaatccttgtagatctttgtgccttcaccatggctatctatacctgtacatgaaatgtgtttgtattgtgctgaagagcttaatgtcaacattacctgctgtttactctgaaaaaaggaatgaatggtagctgtagaatttaggatattttatcaggttggcactttataaaatactccctgatttaaaaaattgtaagttatacacgttaatcatccacattctatcgacaatgtaccaacatcacaagctgttgcaaccacctgnctgttacttctctgagctgttaaaancctggaacttcaatttcaggggggcacaaattggcaattctaatcttttcngggggaaccggggggattttttttctcnctctctaggaccaat

SEQ ID NO: 60977 - DNA, 597 bp, Homo Sapiens
ttttttttttttttgctataaaattatctgggtttaattattatcaatatcagaactatagaacattaacgtactaaacctgtatttacaattacatgtacaaaaaaaaatgttctttgtgaggagcaattttcagcaaatctgacaaacagcaagagtcattcctattttgggtttgaaaagagaaatggaaatttccaagacgcccccctcctccctctcactccagtgacccttgtgaacatcaatttgcaaaggcctgaggtagaaagggaggtattaacaatatcaggcactcattcttcccctcttatgaaagggatgaatttttaggaaccgttttccatcatttattatactgatgtgccatccatctgcatcattaggttcagtagttaccatgacaatatgatgcctacagcaatctaacttgatagccacatgccagaatgtgaaaaaataggaccagctaagaaagtgagagaaatataattaatctgaaccacattcaaaaaaatgtgcacaaaactaggaccaagagggaaactgctgaaatatcattgaagaggaaattataaagggcagcaataatcaagt

SEQ ID NO: 60978 - DNA, 537 bp, Homo Sapiens
accagtgaatgtgtttaatagttaaattatttaaataggcggtttatatttccatgggaaatcataatcgtatctgtttttgcaagagtaggaataaaaagagtgcacaccctttagagggaacgaagagctagcactgcacctgcacactgtcaccagtcactgctgggatgggagaggggtccccatggggccgggaagccatgaccatgggagaacatgggatgaactcagcacacacactttactcaggttggaagcagaacgaaaacccaacaccactggcgggcgatgtggaggggcagggaacttgagaacaacagctggaagaaagcaggcctcctgtggccgacgtcaggatggcaatgcagaactcaaaggatggagcagcagaagcacgggacagactcaggcttggcagttttgggtccacacactttgcttctcagagctgtgttcagttggtgtgcggggaggggagggtggtgctagagcccagtgagaggtggtacaggtggacatcaaagtcacattgtg

SEQ ID NO: 60979 - DNA, 586 bp, Homo Sapiens
ggaaaccgagtggggactttactgatagtgacagtgatgacttcggagaggctgacggccggtacttcagggtgtgtttcaaaaagctgcccctggagggaggtggtagggaggcggtggggagctgcactcaccccggcctgtcccctccagctcagccagcagtcacactgcccagatttctttcttttcctctgccgcctgctcagcccgctgctcaaggcctttgcacaggctgccgccttcctccgccagggccagctgcccgatactggtgaggcccttgttcccttgcagtcctcgaggcaggctgtgtctgtgctgggtgccaggtctaggtcttctctcttctgcagagttgggctacacagagcagctgttccagttcctgcaggccaccgcccaggaagaagggatcttcggtgagtcccaaccagtcagcccaggctcctgcaggcagtggtgtttgctggtggctgctgccccctgcaggacagtgacaacccaactctaggaaggcaggctgcagagtacagtcttctgtccagtcagagctctatccctccctgggcttctttaaacaaga

SEQ ID NO: 60980 - DNA, 606 bp, Homo Sapiens
aagtgcgaagattttattaggcggtacaattccaaggtggtaagggtgaaaggaaaggcgaaggcaggcaaatacattattgagctgaaaacaactttacattcaaggacagcttccagacaagccatgtagaaccagcatgccttgggactgtgtggatggcagggagacgagtttctatgctgaccacttcatgctttctgccccctttggggaaagtatgcctcacggacctctaactctcccacttctctgggggcagcacctgacccctcccggcaactgctaggcaagagcattctgttccttcaaatttctcacctgagtctgagtcagagcatcccatcatcagagcctctgtcagggaggcagtgctgaagcatgaccttcacctgggggaggctgtcgggagatggcactggaggccaggcctctaccctaagcgagaggtgcaggccggggtggaggtggacggtgggacagagtaaatccggggaagcacatcaaccgggtctggtagggcatagccttcttggacctgagccattcctactgctgatgtccactgcttctcaatcgagaaacagcacggattcagctctcaga

SEQ ID NO: 60981 - DNA, 554 bp, Homo Sapiens
ttccggtggctggtctccggcggccccgtccccgactgggccccgtgcccccccgcccccgcggccccccgccgccgggccagccgccaccatgaagaaattctttcaggagttcaaggccgacatcaagttcaagagcgcgggacccggtcagaagctcaaagagtccgtgggggaaaaggcccacaaagagaagcccaaccagccagcccccaggccgccccgccagggacccaccaatgaggcacagatggcagccgctgctgccctagcccggctggagcagaagcagtcccgggcctggggccccacatcgcaggacaccatccgaaaccaggtgagaaaggaacttcaagccgaagccaccgtcagcgggagccccgaggccccagggaccaacgtggtatctgagcccagagaggaaggctctgcccacctggctgtgcctggcgtgtacttcacctgtccgctcactggggccaccctgaggaaggaccagcgggacgcctgcatcaaggaggccattctcttgcacttctccaccgacccagtgg

SEQ ID NO: 60982 - DNA, 3166 bp, Homo Sapiens
ctcggaaaattttaatgaagaagagtgtttgccttgacagacattcctctgatgaacaaagtgccccagtgtttgggaaagctaagtacacaactcaaagaatgaagcacagttctcaaaagcataattcatcccatttcaaagaaagtggccataacaagttgagtagccctaagatacatattaaagaaactgaacagtgtgtcagatcttatgaaacagctgaaaatgaagaaagctgtttcccagattcaacaaaaagttctctgagttctctacaatgtcataagaaagaaaacaactctggtacttgtttggatagccctcttcctttacgccagagattaaaactaagattccaaagcacttgaaatttaaaacacttaggtataacttaactattttagtactatcagcaatagcagagacagagggaaggtatctagttcatgtgtggtaaaaattttaatgttctctgtgtcatgaaacacttgccattttaatcaaagttgtaatttttaaaaagtcacctaaaactctggttttaaaagatcctctgtattgaaaacttctgataatgtatgtcattatgtccttactattccttaattgtagttttaaaatattggtatagtacttgacagagtaaatacttcatctgattgttcatttttactttttcttccacaagcctctaaagtatttatattccagcttgttcccaagaggataattctttatacttctcttcattcttttaaggccttgcaaggccttccgttataactcgctttcctaaaagctattttctccctcagtgtgaagatacctttagtgtgctcttccactttggaaggccatgcaaggtgttccattataactctttttcctaagagttatattctccctcagtttgaagatacctttagtgtgctcttccacttttggtgtcttagtctcttttgaggggcaaaaatagaaaaggagagaagatgtcagtatgtttagtaaaaatcatgctcgtaatggctgaataaactgagcaaagtaactccttatgtatccccagaagttcacaggtatatcgggtggaaaaagatttggaaaatcaaatgtataaccaaaaggattagaaactagcccaggatcacgtagctaactaataatcctgtgggaatcagtttccttgcctgctaatttttttatttttctattttttccttctatagcacttttcccccttttgttttgaatctatgcaatattgactttaataccaccaaatattaagtcatgcattaatttaggtcgcactcaaaaattctagagaggcatccagattgaaaaggaaaacggtgtctgcagatgacaagattgtatgcatcaaaaattctaagaaatccactagaaaactattaaaactgataaagcgagttcatccaggtcgtagaatacaagaccaatgtgcaatgatcattgcattttgtttttgtttgtttgtttttttttgagacagagtctcactcttgtcgagactggggtgtagtggcgccatcttggctcactgcaacctctgcctcccaggttcacgcaattcacatgcctcagccacctgagtagcagggattacaggtgtgtgccaccatgcctggctaatttttagtatttttagtagagatgggattttcccttgttggtcaggctagtcatgaactcctggcctcaagcgatccacccatcttggcctcccagagtgctgggattacaggtgtgaatcaccatactcagcctcaattgtatttctgtacacctctaaataaatggaaatacattccatgttcatgaatcagaagacataagatgaccatactccccaaactgatctacaggttaaatgtaattcccattaattccagctggtttctttgctgattctaaaattcatatggaaatttcaggaacacagaatattaggaagaatcttgaaagagtttgaatgacccacccttcctgattttaagtatacagaactacagtaatgaatgtgttgtactggtataaaggtagacatataggtcaatatagatcaatggcatagaattgagaattcagaaaaaaagccttcacgtttatggtcagttgattttaaaccagagtgccaagacaattcaatgggaaaaggaaacagtctttgaaccaactgtcttctggatctattggatatctatgtaaaaaaagagtgacatttgattcctacttcacatgatatttaagaagtaacttaagatggatcaaatacctaaatgtaagctaaagctataaaactcttagaagaaaacatagacgtaaatctttgtgactttggattaggcaaggatttcttaaatatacccaaagcataggcaacaaaagagaatacacaaactggacttcatcaaaactaaaaactgttgtttgaaatgaccccatcaagaaagtgaaaagacagcttacagaatgggagagaatatttgcaaatcataaatgtgataagggacttgtatcttggtggtatataaagaactcgtaactcaattataaaaagacaactttgaaatgggcaaaatagctcaacaggcttttctgcaaagaagaaatacaaatgaccaagaagcacatttaaaaattttcagtactattactcatcaggaaaatgcaaatcaaaaccacaagacacccaatgtctacaatcaaaaagataataactagtattgatgaggatgtggagaaattgaaattctcataacatgctggtaggaatgtaaaatggggcagccactttggaaaaagtctggtagttcttcaaatggttaaatgtagagttacgatatgatccagcaattcctctcccaggtatatacccaagataaatgaaaacttatatccacataaaaacctgtgcacaaatgtccatagcagcgttattcataatagcctaaaagtggaaacaatcccagttccagaatgaggaaggggagaaactaatgtgtattagctattgtgtgctaagcattcaactagattatttacaaaccttgtatcatctcaactctttaaagactgtattgcaatgttttgaatattcagagagaaaaaagtcgttgctaaaaaaaaaaaaaaaaaaaaa

SEQ ID NO: 60983 - DNA, 468 bp, Homo Sapiens
ttttttccgcgtcaatgcatatttaatccatgatactgctgattggaaggacctgaacctgaagtttgtgctgcaggtttatcgggactattacctcacgggtgatcaaaacttcctgaaggacatgtggcctgtgtgtctagtaagggatgcacatgcagtggccagtgtgccaggggtatggttggtgtctgggaagagcctagctggttgttgcctttcctcggtacctaggtcttcaacatcttggtccctctctaggctgtgatggaatctgaaatgaagtttgacaaggaccatgatggactcattgaaaatggaggctatgcagaccagacctatgatggatgggtgaccacaggccccaggttagcggataggggtttccaggaggcctgaggtgagaaactgggcaacaagggattgtagggctcaagaaagaatgactcattgtctattacacggcat

SEQ ID NO: 60984 - DNA, 581 bp, Homo Sapiens
  misc_feature (577)..(577): n is a, c, g, or t
tttaacatgttgccaattatctccatgtttatttaaatattttgctctaaaggaagcaatcattcctttatacttctttaaatttagtattgacatttttattttgggaaaggaggtcttttttttttttaacatggatacaggaaaagaaaactctccaataaaaatattgtctaaaaagtttgttttgtctgcatgatttactaaatatgtacaatttcaattcacagcgaaggtaacaaagatttaaacagccaacatcacaaatgtctcaagttctaaaaaaaaatcactgtgcacagtttaacaatttaattgaaaaaaccaaagctaagccttcagtctgaatctttttctatgatgggcacaagccatgtattttcttcatctttgttacacgatgcatatttcagtgactaaaagccccttcccattttagtatattaggttatgtcagtacatacttaagagaggcataaattgcctcttggtacaccaatatgatttgtgatgtgttcacatatatgtcataatatttattaatatatagaatgatcagatgagtcacctgtgattnttct

SEQ ID NO: 60985 - DNA, 5257 bp, Homo Sapiens; identical to SEQ ID NO: 28703

SEQ ID NO: 60986 - DNA, 546 bp, Homo Sapiens
  misc_feature (390)..(390): n is a, c, g, or t
  misc_feature (402)..(402): n is a, c, g, or t
tttttttttaaagcaaacacagatttattactgagtgcaaaattcatacaaatttctgctgcttgagactattcccttaggtatcccaggagtttatgaatggtatcctttgctagaaggaaacttaggtagaaaaatgtgggtggcaactatcttaccctgtgccaggcactgaagatgtagagagtaagaactatgggccttgttgtaagcagctcattctccagagagaaaagcactcgtacacatactgagtacatgggccatcacaagggcatcccagcggggttgtgggaggtgctgtgtggacccaaagatgggactgggcagtcactcccccccaggtgtcctctgacacctcgcctaaacccccacctttctgcacatcgngggatcttgctngagttctccccgttctagtgtctttagggttcccacgggggcagcaactgtggagcatttctgcctgtgtctgagattgaagcaggaccctcatgaacaggcccagaccctcatgcatgtgcctgaaaaatgaggccactcaag

SEQ ID NO: 60987 - DNA, 688 bp, Homo Sapiens
  misc_feature (637)..(637): n is a, c, g, or t
tttttttttttttttttacttcttgaaaaaagcttctacagtggaattaggagaattggataagaaatgaagcacccagaaaacacatagttctgacaactcaaatatttcagtgacttctgaacaatgctcaaatagagcagagaatccaaagttcacagaagcaggaacagagtgtgataaaggaaatgggtaagctgtacgaaatggataaaatagtatggaaaaaaggaaagtatcagaaataagatgtggaaggcattcaggattacaaatcatcattttgtgcctatattcatgtgggaaaggttgcattttgtttcatagcctttttttccaaccttccattaatctcaatttgctgctggattatcaagcttaaaatacagaattgatactactatattaaacaactgcagtaaaaacaaagtaaatgctctttatagctgacaaagatataggctttctgaggttatgaagaaactgtgtgaatcatatttttcttgaacattagaaaatattattcctagaaacatttatatgtcccttacttcctctaatatgttcatatttcatctacaaagctcagctttagaaaagtgattttccatctaactgacagcttttcttagcttanaactattagtatatttttcttaagtagaattaagcctcgtgccgaattctt

SEQ ID NO: 60988 - DNA, 543 bp, Homo Sapiens
gccatgaattcctttttactgaaataccgtaggactcactaccacaataagtacttaagctgaaagagtttctaatgggagccaagtaaattcagctctccactgtgcaaagcatcttgtcatttctataataaaagtctttccatgttcagtccactttggctctggaacctggatgagtcatgcttggggcccagggtgcctgtgaggatgctgcatgagaatttcagctgcggtggcagtgtctgggagtcccactgactcagggggaggccaggctagatgagctggaacttttaggggagagctggcacttagggacatcattgattgtgcttttcttagcctagttctgtcctgcaatttatttttcttatcatgtgactgtcggctgaagtcttgggtcatttggtttctttttcttcttccttgctggacagtcttcatggggtcacggttgtctaggtaattaaaacgaatgatatctgttgggtgcttatcagaagatccccagggtggaagtgccttttcccctgaaatatt

SEQ ID NO: 60989 - DNA, 587 bp, Homo Sapiens
ttttttataatgataatttttatacttttattacttagaaaataatttatatttttccatcatttaaacaaagagtaggcctgagtctcatgccttttgcacagcttttaccttcaaagaaagttatctgggtaagataggcaggaaatatggggaaactgcaaattaacagtctacatacatctaatatgaacagtctgtaagatattccttttctttcgttttactgggattgcaacggaaagatttgttctgggttttaaccaaaatagacagaatcgggaattctatttttaggaagtaaatactttcttgaacataatatgagaaaatttcttcattcatcagatgaagactaatatagatatatccctgtacagagctactgtcttcatcttttattgagagccaaaccaggtcttatctaaatgacaaaaaatattacagctaacaaaagcaaaagtggtgcttttatcaaggaaaccaatattttaaaggttaatttagatagatatataaccggaaagacatttattagcatgctgaaaataacactgatgacactcagaatacacctggtctcttac

SEQ ID NO: 60990 - DNA, 536 bp, Homo Sapiens
tttaaacagccctttaaaaacccaaattaatcaaatgaaagaagcggcaaaagatctaacctagctggcactctgcaagtgtctctcctctgtggaaacgaaatcctgccctgagcacaattcttgacataactgccttctgcctcttgagataaaaatgacctgaccgatggctggcaccctcagccagagctaagaagatggattcctaccttgttaagtaccacatttgcatgtagacccaaaacgtttaagagccacttaaatattcaagacaaatgaaatatgtgagaataaggttttaaaaaaccctttagaagatgttcaagagatattgcctcgcctaacgtgatgtttccaatcttcaaacgtgagtaggtcccaagaggaaaagcacacctcactcagattgatcaaaagtttaagggtgtaccagcatgtttttatagaacaatgtgctcactttgagaaatgagaaacatgaattgcaaaagaatatctcatatcctccatgtttcaatctgaagcagcacaca

SEQ ID NO: 60991 - DNA, 584 bp, Homo Sapiens
tttaatatccttcttccctcccccaccccattgggaaaaggctaaaacaatctggatgggtttaattacaaattaatacatactgtcattgtgtaaagtaaatcaacattgtggcaacaagggactattcttggaaaaagtgaaacccatattaacaaaatatgtcatggaagaaccccacttagtgatttcactggctgcttgaaagacagtcaatggaaaggtcaatgttctgcatgttctctggggcttgtccatgcctcggaagaaggtcttgcccggactcagccaagcctagttagctccaaacaggccctagaccaaaaaagcaagggaagagggcatcctttcaataggacaagggtagaaagggcagattgaaagataaaatcctgcagcttcacttaaaagcccacggggaaaaaaaaggcaggaagttactgggaaggcttaaagaaagacgcagcattttttcaacgttaaaaaaatgttaaaaaattaaaaaacaaacaaatcaactgcaagatcattggagaggaagaaaaaaggaatagaacttcattgttttcagtgagtttgaacac

SEQ ID NO: 60992 - DNA, 514 bp, Homo Sapiens
caattttaatacatttattaaggccgcatgttcaaagtcttcaatggacagcaacaaaacagaaagccaaaaaatgactagggcttctaataagtgttttttctttcttttttgcttcttcttctcctctttctttttaaaggatttgattttcagtgcacaggttcaagccatagatttaaattggtaatagaggcagaattggacagtctaagatttgggccaagcccaagctcttgaaagtggagaaataaagtgcctacagaaacccccaactccaggaatgagtaacacggagtttctttaataagctaccagtctccaggtcaataactaagttatcaacaattcatttgtttatacacttttgtttcaaacacccacatttcaaccccctcccccataaatccctccacattttcagtgtggttgattaatctcccagctgttgatgggttcaggcaaaacagacctctcgccagttcatctttcattgaacggtggggagggggcg

SEQ ID NO: 60993 - DNA, 446 bp, Homo Sapiens
aaaaacagacatagtctcactgttgtccagattggagtacagtgacacaatcatagctcactgcagcctcaaactaatgggatcaagtgatcctcctgcctcagcctcccaagtagctaagcctactggagtgcactactatgcccagctcacacagaaggtttctgagtaatctgttgctctttttccctacaatttgtcttccatataactcaaactgacaaggctatggcttacataaagaaatatattataaatcaacaacactcatgataagtttacataagacatgagaatacacctgaatcaccaaccgggaaaaatgattgaagagcttgaaattaagcctaagtgtaagtctctgttaagcttacaacattacaatagttaaatcgaaggttagaaagaaaatggtagacattgctccttttcctgtacttaccacc

SEQ ID NO: 60994 - DNA, 551 bp, Homo Sapiens
cctgttaatggttaagcatttcaatacacaagggtgttggtgaaattcttacaaataatctgaatgtcttcactgcataacagaacctttggaaatatcttctatgtagtcaccatagaagacagtcaactctcagttactcaagaagtggtacctggtatgaaggatttggccaagaaattctctccttctaccagtctttttggtcatgccactgcttattcagaggtggacagacaacatgaaataaaattatgtatttattgtgttacagatcagccacaagtcagtggcagaaaaggtccaaaagcttctgatgacaaggatacttggggatcatctgtgaatgttatatctcaatggaaagctgactgtcagtcacataaaggaagtaacgtacactgacatcagtcagagtcaaactaatttaaggcagtactgctcctcacaaacagtgctggcataaagtgcaggtctcattgtaaaagtgactctgtagtagtaagattttctcagtttactctttctttcttgacttctctacaattaaa

SEQ ID NO: 60995 - DNA, 581 bp, Homo Sapiens
ttttttttttttttttatcaagacaaaggtaacatttttattgtgttaaaaaaatccttaaacataagtagatgtaatacagtttcttatacagtaaggcttatgaaatatggatactgatcaaacagccctaataatttaagcttactgatgaaaaactcatccacttgccttagtgaataaccaaagaccaatactttctttttccttgtgggtaaggaaagcagtttgttcaggtttgttagtataaccaatactatttatcaagtacttcttaccaagaacattatatcccaggctatacccctcaatagttctacatcagagggctaaaactgagattaaaactcagatgtctggctctttccaagatagtacattgccttttaatctggtatcttttattaaacatgccacttacaggtgtccttcataatgaagttaaagtgagtatactgtggagaggacttccaaatgtggttacctcagctatatcactgcccaacatcagaaaacctgacggctatgattactatgccttttctaaaggtaaggtattaactaacagtttcccaaggagg

SEQ ID NO: 60996 - DNA, 569 bp, Homo Sapiens
tttggctttccctttacatgtttatttaaaaatgtgtttgaggaacaaaaatgtgtttgaggaataaaaatttctattacaatttattttattgatcagggattctaagtatatataattactaggccagtaatatatataattgatatgtcccattcttgtggatagtaataatagctaacatctatacagttataacaaaaacaacaatagcaaagatagagttttactgtgtgccagacactgttctaagattacacgtatctacttactgaatcctcagactaactctatgaagcaaattctgttatccttatttataagtaaaggaagaaaggcacagaaaggttgagaaacttgcccaagatcacatagctagtcagcggtagagcaagatttggggaagagtcccagaagataccctggctgttaaactagccctgctgggcaaatgaaaaggcacctacatttctagcacaagtacaagtttgtggtgcccagaccttttctctctactttgtcactgtatgctgattctgggaggtaaatggaaccaagtcaatttatag

SEQ ID NO: 60997 - DNA, 553 bp, Homo Sapiens
tttttttttcaaactgctacaatttatttaactctttctttcacaggaaatataagtatgtaatgtaaacaccgacacgtgaaataaagtacaaggatcaggaagacaagtgaattggacaatactcttgctttaacactttactgcttcctgatttcatttgcagcatgaatcacctggttatacagactggcagaaggcaacattcagatttacagatacaccagaaagcctctgaaatccaacgatgccatacggaagtctgatctttctgttgcaaaaaaaattaaagctgggcacatgtccatttatccatttacccaaggcatttaatgtaggagcataagaatgcactgattaacacgtgagctttaatatgcttgtggaggccaagattaaattgtacctcttctccctcttcagagaaaataaaattaaccaaattaaaagcagagctgcctgatactagccagaagactacataatcacagtgaattcttatttcaataaatcccaggaaatgcaaaacacaataaatgattgccactggagc

SEQ ID NO: 60998 - DNA, 436 bp, Homo Sapiens
tttgaatcacaactaccattttattgttctgattattggggtacagaattgtccatgtgctccaggactagttgggctatgacagacaccacagattgctctgcaacttccggggaacattatctgagtcacatgcttctctggtcatgtttttccaacatcaaaatgaaacacttttctccatggaatgtggagtgacaaattatctcaaaccaaagtcatccttcatcatgacggcatgtaccaaccaggccacacaacagcatagaactgaggggaccaagcttctttctataaacaaagctccttggcaacactggacttgtgtgtacatttatcactgtaagtaggctgacagaggcacaaagcgaaccaggtcagattttgacttatgagtacaaatattgtaatgaacttttatttgatgtataatact

SEQ ID NO: 60999 - DNA, 572 bp, Homo Sapiens
gtggttatcaattttagtatttattgaatgatggaagacaaggaaaatatctctcaaactccaaaaacaaatgttgcacctttgctaaatgtaaaatgaattttgagatatttgttttacatgacaatgaacctgtccaaaaaataatgcaaatttacccaaacggtgctagtttattatttacaaaaatgctcttatctgccataagtatttgggaaaaaactgttttacactcaggaacactaatgaaataccttaacgacaacttaaaaaataaaatcttccctaccctcaatgaccaccactcgagaaaagttacagaatgcattaaaaatgaatatatgcggaaacaaacataattatttcccacaaacatacacacacaaaaacaggcacatgcacacacacaaatacagtgttgtgcaaaatcaacttaatgtttatttaaggtcaacagccttggtgacaaggaagataatgaatatggcttcagtaaagtttgcaagtaaatatcacaaatgttaattcttttgctagctaaccagctatcctgagtatggaatacgtattat

SEQ ID NO: 61000 - DNA, 498 bp, Homo Sapiens
gctttgaaaatcataaattataatttaatgccaataataatttacaacaaatggctgtttacaataaactaacacaaaacaaacaaggaaaagggcctgtgttttacttattagagaaacttcacacactcacatggatagcacttgcaagaggaagaaaatcaacaacaaccgacaaaacctcgaactaaaggtcagcaatactgtgccgtaagaacatacttgtatttatatatgtatatatctacagaaataagtgagagtcagatggagaactctgcacaaatcagattttactggtctgcatgtattgactggatctgaatattaacgtttaatacactttacaaaattatccctgttctttcacctccctcactagtcctcccccccccccaccaattagaattaaaccacaacatgatgaagtactggcggtgggggggtgggttggaaaccttgaataagaacaaaattgcaagctcccagcaccgagct

SEQ ID NO: 61001 - DNA, 5842 bp, Homo Sapiens
attctcttgctccccgccccgtcgggatcagtcagtgtgatccgaagcgggggagggggggggcggcggccgaacgatgtgcgagaactgcgcagacctggtggaggtgttaaatgaaatatcagatgtagaaggtggtgatggactgcagctcagaaaggaacatactctcaaaatatttacttacatcaattcctggacacagaggcaatgtctatgctgcttcaaggaatataagcatttggagatttttaatcaagtagtgtgtgcacttattaacttagtgattgcccaagttcaagtgctccgggaccagctttgtaaacattgtactaccattaacatagattccacgtggcaagatgagagtaatcaagcagaagaaccactgaatatagatagagagtgtaatgaaggaagtacagaaagacaaaaatcaatagaaaaaaaatcaaactctacaagaatttgtaatctgactgaggaggaatcttcaaagagttctgatccttttagtttatggagtacagatgagaaggaaaaactcttactatgtgtggcaaaaaatttttcaaattcagtttcccttatatactgcttacaagcataatactcaccctactattgaggatatatcaactcaagaaagtaacatattaggggcattctgtgatatgaatgatgtagaagtaccattgcatttgcttcgttatgtatgtttgttttgtgggaaaaatggcctttctctcatgaaggattgctttgaatatggaactcctgaaactttgccatttcttatagcacatgcgtttattacagttgtgtctaatattagaatatggctacatattcccgctgtcatgcagcacattataccttttaggacctatgttattaggtatttatgcaagctctcggatcaggagttacgacagagtgcagctcgtaacatggctgacttaatgtggagcacagtcaaagaaccattggatacaacattatgctttgataaagaaagcctagatcttgcatttaagtactttatgtcacctactttgactatgaggttggctggattgagtcagataacaaatcaactccataccttcaatgatgtgtgcaataatgaatcattagtatcggacacagaaacgtccattgcaaaagaacttgcagactggcttattagcaacaatgtggtggagcatatatttggaccaaatttacatattgagattatcaaacagtgccaagtgattttgaattttttggcagcagaagggcgactgagtactcaacatattgactgtatttgggctgcagcacagttgaaacattgtagtcggtatatacatgacttatttccttcactcatcaagaatttggatcccgtaccacttagacatctacttaatctggtctcagctcttgagccaagtgttcatactgaacagacactgtacttggcatccatgttaattaaagcactgtggaataacgcactagcagctaaggctcagttatctaaacagagttcttttgcatctttattaaatactaatattcccattggaaataagaaagaggaagaagagcttagaagaacagctccatcaccttggtcacctgcagctagtcctcaaagcagtgataatagcgatacacatcaaagtggaggtagtgacattgaaatggatgagcaacttattaatagaaccaaacatgtgcaacaacgactttcagacacagaggaatccatgcagggaagttctgacgaaactgccaacagtggtgaagatggaagcagtggtcctggtagcagtagtgggcatagtgatggatctagcaatgaggttaattctagccacgcaagccagtcagctgggagccctggcagtgaggtacagtcagaagacattgcagatattgaagccctcaaagaggaagatgaagacgatgatcatggtcataatcctcccaaaagcagttgtggtacagatcttcggaatagaaagttagagagtcaagcaggcatttgcctgggggactcccaaggcacgtcagaaagaaatgggacaagcagcggaacaggaaaggacctggtttttaacactgaatcattgccatcagtagataatcgaatgcgaatgctggatgcttgttcacactctgaagacccagaacatgatatttcaggggaaatgaatgctactcatatagcacaagggtctcaggagtcttgtatcacacgaactggggacttccttggggagactattgggaatgaattatttaattgtcgacaatttattggtccacagcatcaccaccaccaccaccaccatcaccaccaccacgatgggcatatggttgatgatatgctaagtgcagatgatgtcagttgtagtagctcccaggttagtgcaaaatcagaaaaaaatatggctgattttgatggtgaagaatctggatgtgaagaggagctagttcagattaattcacatgcggaactgacatctcacctccaacaacatcttcccaatttagcttccatttaccatgaacatcttagtcaaggacctgtagttcataaacatcaattcaacagtaatgctgttacagacattaatttggataatgtttgcaagaaaggaaatactttgttgtgggatatagtccaagatgaagatgcagttaatctttctgaaggattaataaatgaagcagagaaacttctttgttcgttagtatgttggtttacagatagacaaattcgaatgagattcattgaaggttgccttgaaaacttgggaaacaacagatcagtagtaatttcacttcgtcttcttccaaaactatttggtacttttcagcagtttgggagcagttacgatacacactggataacaatgtgggcagaaaaagaactgaacatgatgaagcttttctttgataatttggtatactacattcaaactgtgagagaaggaagacaaaaacatgcactgtacagccatagtgctgaagttcaagttcgtcttcaattcttgacttgtgtattttcaactctgggatcacctgatcatttcaggttaagtttagagcaagttgacatcttatggcattgtttagtagaagattctgaatgttatgatgatgcactccattggtttttaaatcaagttcgaagtaaagatcaacatgctatgggtatggaaacctacaaacatcttttcctggagaagatgccccagctaaaacctgaaacaattagcatgactggcttaaacctgtttcagcatctctgtaacttggctcgattggctaccagtgcctatgatggttgttcaaattctgagctgtgtggtatggaccaattttggggcattgctttaagagcacaatctggtgatgtcagtcgagcagctatccagtatattaactcctattatattaatggtaaaacaggtttggagaaggagcaagaatttattagtaagtgcatggagagtcttatgatagcttctagcagtcttgaacaggaatcacactcaagtctcatggttatagaaagaggactccttatgctgaagacacatctggaagcgtttaggagaaggtttgcatatcatctgagacagtggcaaattgaaggcactggtattagtagtcatttgaaagcactgagtgacaaacagtctctgccgctaagggttgtatgccagccagctggacttcctgacaagatgactattgaaatgtatcctagtgaccaggtagcagatcttagggctgaagtaactcattggtatgaaaatttacagaaagaacaaataaatcaacaagctcagcttcaggagtttggtcaaagcaaccgaaaaggagagtttcctggaggcctcatgggacctgtcaggatgatttcatctggacacgagttaacaacagattatgatgaaaaagcacttcatgagcttggttttaaggatatgcagatggtatttgtatctttgggtgcaccaaggagagagcggaaaggggaaggtgttcagctgccagcatcttgcctcccaccccctcagaaggacaacattccaatgcttttgcttttacaagagcctcatttaactactctttttgatttattagagatgcttgcatcatttaaaccaccctcaggaaaagtggcagtggatgatagtgagagcttacgatgtgaagaacttcatcttcatgcagaaaatctgtctaggcgggtctgggagctactgatgcttcttcctacatgtcctaatatgttgatggcattccagaatatctcagatgagcagagttttaaaagctcagtctgatcacaggtctagacatgaagtttcacattattcaatgtggctcttggtgagttgggctcattgctgttctttagtgaaatctagccttgctgatagcgatcatttacaagattggctaaagaaattgactctccttattcctgagactgcagtttgtcatgaatcatgcagtggtctctataagttatccctgtcagggctggatggaggagactcaatcaatcgttcttttctgctattggctgcctcaacattattgaaatttcttcctgatgctcaagcactcaaacctattaggatagatgattatgaggaagaaccaatattaaaaccaggatgtaaagagtatttttggttgttatgcaaattagttgacaacatacatataaaggacgctagtcagacaacgctcctcgacttagatgccttggcaagacatttggctgactgtattcgaagtagggagatccttgatcatcaggatggtaatgtagaagatgatgggcttacaggactcctaaggcttgcaacaagtgttgttaaacacaaaccaccctttaaattttcaagggaaggacaggtaagtgttaagataatcaaatgtttctatgaaatgtgattgaaattttttgttgttacattgtgtattagtccgtttttacactgctcataaaggcatacccgagactgggcagtttacaaaagaaaagggtttaattcgactcagagttccatgtggctggggaggcctcacaatcgtgccggaaggcaagtccgggcaagtccgagcaagtcgcatcttatgtgaatggcggcaggcaaaaaaagaatgagaaccaagcgaaagcggtttctccttataaaaccatcagatctcaagagacttattcacttatcacaagaacagtatgggggaaaccgccgccatgattcagtcatctcccaccaggtccctcccacaacaatgggaattataggcaatataattcaagatgagatttgggtggagacacggccaaactgtatcacattgtatgtggatatgttaatttttttaaacatacagacataaaaattgctagaaattaccgacaagaaaagcaaattttgaataaattgaattctggaaatataaaacgggcttgtttttagaatacaaaatcagatgttaattcctgtgactgactgaatatagaaaggtaacctaaggctgggcacggtggctcgtgcctatagtcctggcactttgagtggctgaggtgggtggattgcttgaaaccaggagttcgagaccagccaaggcaacatggtgaaacctcatccctacagaaaatacaaaaatttgctgggtgtggtggcacacacctgtagtctcagctactcgggaggctgaggtgggaggattgcttgagctcaggaggtcgaggcttcagtgagccatgatcacaccactgcactgtagcctaggtgacagaaggagaacgtgtctc

SEQ ID NO: 61002 - DNA, 505 bp, Homo Sapiens
agagactctgttgcccagactagggtgcagtgatgcgatcatggctcactgcagcctcgaactcctgggctatatgcgatcctgccacctcagcctcccaagctgagactatagacccacaccatcacgcctggctaattctttttttctaatacatggggttttcttacattgtcctggccgatctgcaactcctgggctcaagcaatccttccgaaagtcctgggactacaggtgtgagccaccacgctcagcctttttttccttattactgtactagggacatttgtggcttttccacaatgagacttagtagagaaatgacagcttcccttggccctatcctgaaatacactaactagctcttctctgccagggctaccgttttctccctaacctttgcagatgtatgtatccatataaatgtttctatttcaacaaactgtagaaagtatacagtctgtacagctccccttataatgctattacctgatgatcctgacta

SEQ ID NO: 61003 - DNA, 680 bp, Homo Sapiens
  misc_feature (410)..(410): n is a, c, g, or t
ttttttttaaagaaagccaatatacgtgttttgttcataattgaggaatcccacacacttctcaactaggtttaattaaatgcctacagggaatgaagatttttctgttatgaacctgtaaaaggattccaagaaatcaacatctttgctatttttttttcccagaaaccttaaccagaagacttaatccttggtaattaattaaattttcttgagtcctgacaggagagtctgaatcagaattaaattagaggccaaaccacctttaaattcaggaacaattataccttaacaatggaggcagaatgttagccataaaggataattagatatagaaatatctgatatgtggctaaaactgttcgtttttttgtttttttttttcaaaaagaccatgcccctgaaagganctcggtgttcacatgaataaaagcctcttaaactgatattataaaatataacttgtgatgaaataccttaatggttcagaaaagctgacttcagaccaggagagtaatagcgaatattagtgatgtgttttcatgaagagtttcttaccagtttcctatcagaagccaggccttttggctagagtaaatgaagacacgtttacagtgatttacttacagagggtcctgggggacaagtccgtccagcagcaccagggaaccagtcatacc

SEQ ID NO: 61004 - DNA, 429 bp, Homo Sapiens
tttttttttttttttttggccctccagtcattctttattcaggaaaagcacacaatcgtaaacaacggagagtgaagacagtaacaactggtttgatattgaatttttaaaatcttgattcaaatggaattttcataatctaccacttaaaatttatttttaattagaagaaaactatgtaactgtgaagagaagcacatttcagcctctcagtcagccccatcgtgcctctgcttcacatccaggaagaagcgagtcctcggggcagccacgcaaatgcaaggacagagagtccagagaataccacttggcctccaggtgcatgccttccaagtctactctgcagacgcaaatgtcatgtgggtttttgccaaaatctcaatggaaacatttctatttgctttaatttatttttaaagtcaaacacca

SEQ ID NO: 61005 - DNA, 526 bp, Homo Sapiens
tttaacttttaattgtattgttttgttttaatgcccagatagcacagcattcctcctttacttgccttttcacaagcccgtaatcaatatctgtaaaagttaaaattagtttccacagaaacattgatttcaaagcaaacactatcttaatgagcctaactctggtaaattaaaaatataaatggcactattaagagaggccaaggaaacaatacgtaatatttagcaggatctctaatattctaatttcagaagtgttaaactgtgtaacagttacaggacctatctttcataggcaaaaacagatccgtgcctcagtttccacatttatgaaatgtggctgaaaaattattttaagatcattgtagttctctaattcacttaatttttatgtcattaagatggagtaaaaagaggatttggggcattattaggtttcctcttttgtggggaggcattatttggtgagaatcaccatttaaaaatgcaaaatattgtgtcactggcttaagctgcagattcctag

SEQ ID NO: 61006 - DNA, 1904 bp, Homo Sapiens
gtctgctccgggacttggaacaaaagggggaactctgatgaactctctttcctcccctctcccccggacgccggggtatctccctctcgcaactttgccgccccgactttctctgctgtcaggccgggaaaaagtgtccgaacgcctcgtggactgcagcgggggaaatgtcccttaaaagtgcgacgaagtggggaagaaggtgtaattactattatcagcatctagaaagcatcatgaatttgctggagtacttcctagcactgacctccttcattctgcgttgttcttactggatctttccatcagccaacaatatggaagtaccaatacaaggtcaaatcattcctggattcatctggagttgcttaaaagttaaatcattggaatttttgatgataccttttctatatggattacaatttgatcgctgggaattctccaccttaaagaagtaccctcaggtgactacagatgtgttaacacccagcatgttccggtaggagactttctggatggggaagatttccaggaattggcaacaagctcatttcactggtgggtttgctgaagcattatcacaagacagtcagaatgactgatgagtgctcttcaggtgtgaatcatggcaatacagtgaaagacagtgatttactgcttttgagggcgtgcatgtatatgattaacggatggaagtgcaggactccaagatttacttccttccctttccagcagaattacctgagacgagtaaaatctactggtggagtcactccattattcttatctgtggagatctagatcttgatttgaaagtttctgagaaaatcttcagctcagacttgagggtcaactttaccagctgaaggatctgcatttactgctcaaccacatctaatttgatgtcctctgcagatttaaaatgtgtgccttctcttccgtcaccaagtcatccctgggttactactgaacatccttctcaattccccccgacccatggatggctgttctccattgtctgtttcaccagatgtcctcaaaacaaacagacagaagaaggaagtggctaatggagctgtggagtccaagtgtgactgccaagaggaatccagcaaagccaaaaagcccaagcatgtagccctgcccgaagcacgccacacgcatggaaaacccagaggaaatgagtgaggatcaatgggaagaagagagccagccaggaagttgaagatttgtccaggagcagatagctgaagagagagagagagaagagagaacggcttacagctcaggtcctctctccatgcttaggaaccactacaaatgctactgccttgagtctcattttgtttccctctggaaaccacatgtgtaccttgtttgcaacagtatgggctcacaggcagaaggaattttccttgtcttggatgagacttttgacttggacttttgggttaagttctggagaccagaaggccaaaatcaaaagtatgggcaggcttgatttctttagaagactccagcggagaactgtgtctccttgcttctgattctacatctccatccatgggccactgtttcagcaacctcagccagtgcaacacaacctcagccaagaagagtatgcagagaaaggagtcccctacctgccacaaaactgttgtctgaaaactgtctcatattgtctcaagttgtcattcattgtgaattagacctgtttaacatgtaatctgcaacatgcttcactgtctaattttccagagcccctcatataaggaactgtattattggtataatcatcatggtgaagaagttggtatgtgggggagagatgacagaaacagagagtaagtcagagctggctgcctgacagataaaaaggaaatgaccaaaaaaaaaaaaaaaaa

SEQ ID NO: 61007 - DNA, 479 bp, Homo Sapiens
aagccgcttctctgcccgagttaggtttcgcccagcgcaatttctttctctatgtactttgcgaataagtttcggagcatcggttaacagcctatgggtgaaatttggctttcattcatgaatgagaaattattcttgacagaagtattttaaaagaaaaatctttacgatggcctcagcagtacttagttctgttcccaccaccgcttctcgttttgccctgttacaagtggatagtggcagtggctctgattctgaacctggaaaaggtaaaggtcgaaatactggaaagtctcaaactttaggaagcaagtcaactacaaatgagaaaaaaagagagaaaagaagaaaaaagaaggaacagcaacagagtgaagcaaatgagctcaggaatcttgcttttaagaaaattccccagaaatcctcccatgctgtttgtaacgctcaacatgatcttccattgtcaaacccagtacaga

SEQ ID NO: 61008 - DNA, 5726 bp, Homo Sapiens
cggcacgtggactccctttaatccagtgactgtcaggtcgatcatatgccgaggacgatgatcccgccgggggagtgcacgtacgcgggccggaagcggaggaggcccctgcagaaacagaggcccgccgtgggggcagagaagtccaacccctccaagcgacaccgggaccgcctcaacgccgagttggaccacctggccagcctgctgccgttcccgcctgacatcatctccaagctggacaagctttctgtcctgcgcctcagtgtcagttacctccgggtgaagagcttcttccaagtcgtgcaggagcagagctcacggcagcctgcggccggcgccccctcgcccggagacagctgtcctcttgcagggtctgccgtgctggagggaaggctgctgttggagtctcttaatggctttgctctggtcgtgagtgcagaagggacgatattttatgcatcagcaacgatcgtggactatctgggcttccatcagacggatgtaatgcaccagaacatttatgactacatccacgtggacgaccgccaggacttctgccggcagctccactgggccatggaccctccccaggtggtgtttgggcaggccccgcccttggagacaggagatgatgctatcctggggaggctgctcagggcccaggagtggggcacaggcacgcccaccgagtactcggccttcctgacccgctgcttcatctgccgtgtgcgctgcctgctggacagcacctcgggcttcctggcccgggggtcacaggcttggcagctgcggctctgctgtcccgagccactcatgacgatgcagtttcaaggaaaactaaaattcctgtttggacagaagaagaaggcgccgtcaggagccatgctcccgccgcggctgtcgctgttctgcattgcggcacccgttctcctcccctccgcagcggagatgaaaatgaggagcgcgctcctgagggcaaaacccagagcagacaccgcagccaccgcggatgcaaaagtaaaagccaccaccagtctgtgcgaatcggaactgcatggaaaacccaattactcagcaggaaggagcagcagagagagcggcgttttggtgctcagggaacagactgacgctggccgatgggcacaggttcccgccagggccccatgcctgtgcctccggggtggccctgaccttgtccttgaccccaaggggggctcaggggacagggaggaggagcagcacaggatgctgagcagggcctctggagtgacagggcggagggagactccaggacccacaaagcccctgccctggacagcgggaaagcacagtgaggatggtgccaggccgaggctgcagcccagcaagaatgacccgccctccctgcgccccatgccccgcggctcctgcctgccctgcccgtgtgtccagggcactttcaggaactcgcccatctctcacccgccgagcccgtcccccagtgcctactccagccggaccagcagacccatgcgggatgtcggtgaggaccaggtgcaccctcccctctgccactttccccagaggagcctgcagcaccagctccctcagcctggagctcagcgttttgccacgaggggctatcccatggaggacatgaagctgcaaggtgtaccgatgcctccgggggacctgtgtggtccgacgctgctgctagatgtgtccatcaagatggagaaggactctgggtgtgagggtgctgcagacggctgtgtgcccagccaggtgtggctgggggccagtgacaggagccacccagccaccttccctaccaggatgcacctgaaaacagagccagactctcggcaacaggtgtacatctcgcacctggggcacggcgtgcggggggctcagccccatgggagggccactgctgggcgcagcagggagctgacccctttccaccctgcacactgtgcctgcctggagcccacagacggccttccccagtcggagcctccccaccagctctgtgcacggggccgaggtgaacagtcctgcacctgcagagctgctgaggccgcccctgtggtcaagcgggagcccttggactcaccccagtgggctactcacagccagggaatggtgcccgggatgttgcccaaaagtgccttggccacgctggtcccgccccaagcttcggggtgcacattcctgccatagcgcagtgaccaccatccaagctcagatctgtctgtctacgctcagatgcgtcggtggctgggctgccctgctcctggtcaggccggagcccgtcctaagacacactctttgcagagctgtgcatgcgcagtctgctagtgtgtgtgtgcagcatacgcaggagcctatcctgaattttgtaaaatatcccaacagttcttaaatgaaaactggccttaagtctattcaagcatgacagcatttctctttgaggaattaaaatctttaggaaagtgatcatggctggacagcttcatgccccagaggcagcgagcacccgtcccatggctgccaagtccacagtcggggatgaagcagtcgggtgatgctcccaagtccgcagtcggggatgaagcggtcgggtgatgctcccaagtccgcagtcggggatgaagcggtcgggtgacacacctagctcagccctcccaggccacctgcagctcccagcctgtgctgtgcaggcagggtcagcccatcgccacagtgcactgtagaggccagcacacggcaaattagaaatacaacacgcggagaaaggggtccgtgagcccactcatagaggaatctagaatgttccaggcagcagaggctggcagcgtgggtcccacactgccccacaccgtgcggcaggtgctccatggcgccatgacagagtctgaggccagacctggactggaattgacagcataacccctgttccttctggacatctcccgagttctcagtgggtctctgcggacggttcttcctaatctgcctcttggtacatcacgtaatacagagttcacagactccgggtttggaagtacagagaaacacacaacgtagagagaagacacaggaaactgcgctgcctgtgggggtttctctctggctggctgtacagttcactcaaatgagggttcccattgccatcctaggagaataattagggacaagacagacaagtattaatagcattaaaacagttgtaaaggcgatattttctgagagtaggaaatttggatacaaaagcataagtcagaaagtgaaggtcaccaatccaccaacccgagaacctacagctgatggtgcatttcaggcttcttccacggtctggcctggaaccccacccggctggtgcaggcatcagatcagggtgtagaagtcaccccaagcaagaggaagccaggcagtgaggccctggggtgtggctgcagctgggcccacctgtgcgggggtgggaaggccccatcctcagggagagggcatcggcgccctgacgtcagctccactgggagtggcaggagctgtgggagcccatgggtgagggacccaccaccccgctgcactgtgcattgtgcctcccgtgtggacgccctctctgttgttggcccgcgggtgagggacccaccaccccgctgcactgtgcattgtgcctcccgtgtggacgccctctctgttgttggcccgcgggtgagggacccaccacccctagggacccaccaccccgccgcactgtgcattctgcctcctgtgtggacgccctctctgttgtcagtggctttgaggtgtcagtgcttacttagatgctggtttaatgctggacccatttgttaaacgcaccttcactttgtcaaaacccaggtttggttggcaggactgggtcttctgcccaatgccaggtgcctgcgcctctcagtggcctggttcttggacagtttgcccccatgtggcagggatagggataaggatctcctctcagtactggaggagaacagccaaccatctgagcccagagtcacagatccatcgtggccccctatgacccccaagccctaccgagggggcactcactctctgcttagccagggggcgtctttcaaaaggtgacctccatgctgtgctgtcgtgggtgtgagacgtgctcatggccttccactgccatctctcccttatctgatgcctaaagtcacgatggggacagagctacccaggggccagccatggggtgaccagccacctgagggtcagtcacctgtggagagcaggcacctgtgaagaccaggcacctgaggactggcgcctacttcccactttggccctacactggcacagagcccctctttattcatttctcatgctgagcatggcacacttctggcctctgggcatttatggatttaagaccaggatggtatttcagaagcttcccacttccttcctattctaaccgagtgcccagctcctttgctgatcatggaaagacccttaataattaggcctgcaggccaggcgcagtggctcatgcctataatcccagcactttaggaggtcaaggtaggaggatcgcttaagcccaggagttcaagaccagcctgggcaacacaggaagaatgtgtctctacaaaaaataattaaaaatcagatctgctgtatccctgaaaaagtctcaatcaacatgcatgttccactcttggagttccctgttctgagggccagccacgtcctgtgtcctggagcttagccctcagcagctcccttcagcctgggcgccgcctgggtcccaaacgtggcagctgctcttccagtctcggggccgaggagggcagggagctcagtgactgagagtcttgtgtatcacatgtcttgagtgtcctggagccaacggctgtcactgggaaaaacaccaggccccaaagatcgaatcagagacgtggctgcgtgtttgcgattgtagccaggcccttcagtgtcatcaaaggagcactggggcctccttaagcacagacggcagcccctgcccaggaggcttcttcaccacgtcctgccctgcagcctcccagacctttagatgcgcccctgcccaaggccctcctggtgacaggtgccagattgagtggtgggttgctgccaggcaggccacgctgtgttgacgctgcactcagcacgtgggtgttggctctgccggttttgtggtgtggggaccctacaggaggctgcggccctgagagcctgggatcagcgaggtgtccgacatcccttcctcaacggcaacaaaaactccccaagtcagcactttggttattttatagccacaaccctcttggaaaacagtggggaagactatggaacatagaaagtgtggatgtatcacttctctctaaaatgtcattgttagcactaattacaggttcatgtttttctgtttatgtagcttttccctatatagctgaaaaagtattaaagtcaaatataaggtgggaatgggatggaagggaggagatcaatacaacttatatttttgcagtttctactggaagaaaaaagttttcaatacctagaccaacttgttgaatttttaaaacttatgcactataaatgcaactttctctactgctttctcagtgcctttaggaagctttcaaatttttttgtactgtggtttgtattaaatttgcaatattgatgtaaaatacatgacatgctagtacatgtttaac

SEQ ID NO: 61009 - DNA, 264 bp, Homo Sapiens
tgaacagaaaagtaaactttattaaatatgaggaggggcagggcagtcctgcaaacagcttccctgccacagcttgtggaccagccactccaccctgtaccgtttgcctgtaccctcaaatacacaggttacactgctgccaccagcaaattccacggctgaacaacacctcctgcccctaaacacactgaatgatgtcggagtttgagggttgcaggcacccgcttttaactcaagccctttcctccctccttgcgccacccc

SEQ ID NO: 61010 - DNA, 444 bp, Homo Sapiens
tttttagatctctaattttaatagtccacaggaaggttataaaataaaacagacaacacagagcttcatgacggcctcggattggcagtcaacccagggatacagaaatgtaaacaaaaacagagcttccagataacattactgtgtgctatgtgactttcagaatacagcagcgtcccagacactctaaagtcaagtgaaacaagagattttagaatcaatctatacacatttcagagggcagtccacgaaggagccttcctctcaggtcagcccagggctgggcctgagcctgagcccggggacgtgtagacactacccattttgggcccgggaggccaaagtggttctgcttcaggtggaaaagtcagaaaaaaggcaacagatacaatttggtagccatcaaatcctctcctccctctggaagtttctgaggtgctggtc

SEQ ID NO: 61011 - DNA, 661 bp, Homo Sapiens
tttttaacatgaaaaaactcattttattgcacttaagttataagaaaataaaatttctaagtgaatcaaaccatagacacaatccctttaaaggttgttttcctccatcatgtcaggttgttacataactaaaattaaccaacttgaatctgattgttttaaatcagactataaataaaacaaacaaaaaaattaacagaaggaggaaaaaagatcgcctaggatacagtgttaaaccactttcacagttcagcttgagttgtggctcttggagaatgaggcaaaccatttgactgtttcattcattttgtttgtttgcatgtgacgcctttactacaaaaactgaatagtttctgctttgtcagttactcagagcaataaaactgtaacagttgttttcccaaatactgtaaaacactaagactgaccagcaactttattttaattttgtgttttatatatttttaaaatattttgtcagttttacgatgtacgttcatccattcaccacagccctcagaaagaaaagtttcttcacagaacaggcaagtaatagctctgttccaaggaatgtgttttaatgtttgcccagaataaagaaaataagctttgcacacactctcaattctttacttgcaggcaaacttcactctttattatc

SEQ ID NO: 61012 - DNA, 1882 bp, Homo Sapiens
gaattcgggcgtgggcgcgggggcgcggcgtgcggcacgctgcagggctgaagcggcggcggcggtggggactgcacgtagcccggcgctcggcatggctctcctggtgctcggtctggtgagctgtaccttctttctggcagtgaatggtctgtattcctctagtgatgatgtgatcgaattaactccatcaaatttcaaccgagaagttattcagagtgatagtttgtggcttgtagaattctatgctccatggtgtggtcactgtcaaagattaacaccagaatggaagaaagcagcaactgcattaaaagatgttgtcaaagttggtgcagttgatgcagataagcatcattccctaggaggtcagtatggtgttcagggatttcctaccattaagatttttggatccaacaaaaacagaccagaagattaccaaggtggcagaactggtgaagccattgtagatgctgcgctgagtgctctgcgccagctcgtgaaggatcgcctcgggggacggagcggaggatacagttctggaaaacaaggcagaagtgatagttcaagtaagaaggatgtgattgagctgacagacgacagctttgataagaatgttctggacagtgaagatgtttggatggttgagttctatgctccttggtgtggacactgcaaaaacctagagccagagtgggctgccgcagcttcagaagtaaaagagcagacgaaaggaaaagtgaaactggcagctgtggatgctacagtcaatcaggttctggcctcccgatacgggattagaggatttcctacaatcaagatatttcagaaaggcgagtctcctgtggattatgacggtgggcggacaagatccgacatcgtgtcccgggcccttgatttgttttctgataacgccccacctcctgagctgcttgagattatcaacgaggacattgccaagaggacgtgtgaggagcaccagctctgtgttgtggctgtgctgccccatatccttgatactggagctgcaggcagaaattcttatctggaagttcttctgaagttggcagacaaatacaaaaagaaaatgtgggggtggctgtggacagaagctggagcccagtctgaacttgagaccgcgttggggattggagggtttgggtaccccgccatggccgccatcaatgcacgcaagatgaaatttgctctgctaaaaggctccttcagtgagcaaggcatcaacgagtttctcagggagctctcttttgggcgtggctccacggcacctgtaggaggcggggctttccctaccatcgttgagagagagccttgggacggcagggatggcgagcttcccgtggaggatgacattgacctcagtgatgtggagcttgatgacttagggaaagatgagttgtgagagccacaacagaggcttcagaccattttcttttcttgggagccagtggatttttccagcagtgaagggacattctctactttcttttcttgggagccagtggatttttccagcagtgaagggacattctctacactcagatgactctaccagtggccttttaaccaagaagtagtacttgattggtcatttgaaaacactgcaacagtgaacttttgcatctcaagaaaacattgaaaaattctatgaattgttgtagccggtgaattgagtcgtattctgtcacataatattttgaagaaaacttggctgtcgaaacatttttctctctgactgctgcttgaatgttcttggaggctgtttcttatgtatgggttttttttaatgtgatcccttcatttgaatattaatggctttttccattaaagaataaattggaaaaaagaaaaaaaaaaaaaggaattc

SEQ ID NO: 61013 - DNA, 444 bp, Homo Sapiens
ttttttttttttttttaacaggattcatctcctttattcataaaatttgaaagttaaaatgtatttaacagtttgataactaaaagatcataaaagatcagcctcaaaatcacaatgaaataactgattttttttctgagatttgattgtgttaagtgtctgtgggtccctcagattaatcctttaaaatggatacttttaccaatttaatggatattgtatgaattttgatgcatttaagcatatgacatagaagtctgtttctgcagattaaccttataatagcaatgcttttatagcaggaagtgtgaaggtagggagtctaggccccttctatttttttgctccatcatctttataggaaagcttttatcttcttgcttgtcaaatagcagcaagatgtcttctctttcatcagctgtgctgtaggattacatggccatg

SEQ ID NO: 61014 - DNA, 1936 bp, Homo Sapiens
ggtcctctgtggtgcacagcccaccccccagccatgcgctctctccttctgggcaccttatgcctcctggctgtggccctggcagccgaggtgaagaaacctgtagaggccgcagcccctggtactgcggagaagctgagttccaaggcgaccacactggcagagcccagcacaggcctggccttcagcctgtatcaggcaatggccaaggaccaggcagtggagaacatcctggtgtcacccgtggtggtggcctcgtcgctgggtctcgtgtcgctgggcggcaaggcgaccacggcgtcgcaggccaaggcagtgctgagcgccgagcagctgcgcgacgaggaggtgcacgccggcctgggtgagctgctgcgctcactcagcaactcgacggcgcgcaacgtgacctggaagctgggcagccgactgtacggacccagctcagtgagcttcgctgatgacttcgtgcgcagcagcaagcagcactacaactgcgagcactccaagatcaacttcccggacaagcgcagcgcgctgcagtccatcaacgagtgggccgcgcagaccaccgacggcaagctgcccgaggtcaccaaggacgtggagcgcacggacggcgccctgctagtcaacgccatgttcttcaagccacactgggatgagaaattccaccacaagatggtggacaaccgtggcttcatggtgactcggtcctatactgtgggtgttacgatgatgcaccggacaggcctctacaactactacgacgacgagaaggagaagctgcagctggtggagatgcccctggctcacaagctctccagcctcatcatcctcatgccccatcacgtggagcctctcgagcgccttgaaaagctgctaaccaaagagcagctgaagatctggatggggaagatgcagaagaaggctgttgccatctccttgcccaagggtgtggtggaggtgacccatgacctgcagaaacacctggctgggctgggcctgactgaggccattgacaagaacaaggccgacttatcacgcatgtctggcaagaaggatctgtacctggccagtgtgttccacgccaccgcctttgagttggacacagatggcaacccctttgaccaggacatctacgggcgcgaggagctgcgcagccccaagctgttctacgccgaccaccccttcatcttcctggtgcgggacacccaaagcggctccctgctattcattgggcgcctggtccggctcaagggtgacaagatgcgagacgagttatagggcctcagggtgcacacaggatggcaggaggcatccaaaggctcctgagacacatgggtgctattggggttgggggggaggtgaggtaccagccttggatactccatggaattcgagctccacttggacatgggccccagataccatgatgctgagcccggaaactccacatcctgtgggacctgggccatagtcattctgcctgccctgaaagtcccagatcaagcctgcctcaatcagtattcatatttatagccaggtaccttctcacctgtgagaccaaattgagctcggggggtcagccagccctcttctgacactaaaacacctcagctgcctccccagctctatcccaacctctcccaactataaaactaggtgctgcagcctgggaccaggcacccccagaatgacctggccgcagtgaggcgattgagaaggagctcccaggaggggcttctgggaagaccctggtcaagaagcatcgtctggcgttgtggggatgaactttttgttttgtttcttccttttttagttcttcaaggaatggggggccaggggggcaatgagcctttgttgctaatcaaatccgggacttgtttgtacgtttttttttctcactgaaaccttttccagtgccaaaaaaaaa

SEQ ID NO: 61015 - DNA, 543 bp, Homo Sapiens
ggttttctccatggtcatattttattcattattctactttctgcacactgtatatgcttgagataaaacaataaccaagatgataaatacataaagactgttagttgtagtctgggagcctaaatcagaggagtattcttgcttaatgtcccatggttctagcttttctccacagagcaggatttagacgttttcattactacacgaagaagtcatcatttgtcctaagatagacaaatgggaatttaaaagttatacaaaagacatctttttcttgggttagagatgtctaatacatcatttctacaggattaatttttttaatcatatgagcaacctgacccattgcattatatggattagaaaactctctaagaagcaagaatatcaaatcactctgtggttggtttttgtgaaattgtctgtcgtaaattgagtactcactagtattcatgttggcatttgcaaaattaccactatgttaaaactcgctcccagttgtacctgtgactgtgtttatctgacttcagttttactgtccac

SEQ ID NO: 61016 - DNA, 6256 bp, Homo Sapiens; identical to SEQ ID NO: 22448

SEQ ID NO: 61017 - DNA, 1488 bp, Homo Sapiens
gatgctcgtatgtgataggccagaaagagagcaactgaaaatgcttctcttggctgtgttgaacttcacagccttgctcattgagtacagcttttcccggcatctgtacagttccatagagcatttgacaactttattggcttcctctgatatgcaagtggtgctggcagtcctcaatctcctatatgtatttagcaaaagatcaaactacatcactcgtctgggatctgacaagaggaccccgctgctaactcggctacaacatttggcagagagctggggtggaaaggagaatggctttggacttgcagaatgttgcagagacttgcatatgatgaaatatccacccagtgcaactacactacactttgaattctatgcagatcctggggccgaggtcaaaattgagaaaaggacaactagtaacacactacattatattcacatagagcaacttgacaagatttcagaaagcccttctgaaatcatggaatctcttaccaaaatgtacagcattcctaaggataagcagatgctgttatttacacacatacgactggcccatggcttttctaatcacaggaagcgattgcaggcagttcaggccagactgcatgcaatatctatattagtgtattccaatgccttgcaggaatcagcaaacagtatcttgtataatggcttgatagaggagttggtagatgtccttcagataacggataagcagcttatggagattaaagcagcttctttacgaacattaacatcaattgtccacttggagagaactcccaaactcagcagtattattgactgtactggaactgcctcctaccatggatttttgccagtgcttgtaaggaactgtatccaggccatgattgatccttccatggatccataccctcaccagtttgccactgctctcttctcttttttataccatctggccagctacgatgctggtggtgaagccttggtctcctgtggaatgatggaagccttattgaaggtcataaagtttcttggcgatgaacagagaccagaaagagtaaaaccttttatgacaggggctgcagaacaaatcaagcacatccttgctaatttcaaaaactaccagttctttattggtgaaaacatgaatccagatggcatggttgctctattggactaccgtgaggatggtgtgaccccatatatgattttctttaaggatggtttagaaatggaaaaatgttaacaaatgtggcaattattttggatctatcacctgtcatcataactggcttctgcttgtcatccacacaacaccaggacttaagacaaacgggactgatgtcatcttgagctcttcatttattttgactgtgatttatttggagtggaggcattgtttttaagaaaaacatgtcatgtaggttgtctaaaaataaaatgcatttaaactcaaaaaaaaaaaaaaaaaaaaaaaaaaaaaaaaaaaaaaaa

SEQ ID NO: 61018 - DNA, 513 bp, Homo Sapiens
gctttcaatacatgtttattgcaaaaccacaagcacagtaaccataatgtcaacataaccgtatttcctaacggaacaggagatcgccatgcctaagtgcgtgcgttttccaaagaaatggcggcttatttggaagctcacacgctgcaagtgatgacgagaagccctgttgtgaactaggagttctaaaccattaaacatttaattaccactttggcaaagcaatgcacattaccatttctacaatggaacagcacagagattttaaatgcatctttattttttagaatcttcagtattcacaatgtgtaaaatgaagcagcattttaagtaaagctctatgccaaaacagtttcttaaaaagtctggattaaaaagaaggaaaaccacacatgaataatatttatcagtgctcacagttgacactaactatagttttttaaaagaataaaaatactcaagacttcaacatttccttacaaaagtatacttggccataaaataaaaatctat

SEQ ID NO: 61019 - DNA, 630 bp, Homo Sapiens
tgtatatcccctaaactcctcacctatatcacaaaaacctgccaaggcagaatacattcccaagggaaaggagctttggccgcaagcaggcatcgggtcccatctgacaccagcgtgatcgccacaggagccatctaggaaaggggaatggaaactgagatgctggcactttggccctgccaatgagctaaagcagtgtataattaaggaattgcacaggcttccttccccaggacaaagcagcgcacagtcttcttggattactgtcctcttacagcaataattacctgtggataatagattatattattggaagggcacacacgcttgctgccagccacgttcttcttggtgggctgcccacttctgctgcagaactgatgagcatcatgccagcggagaagagcttgagcctaggaacacaatgatgggcctggtgtcatttggagagaatgcggggctcatctttaacagaactgggcctagtgtctggaacaactcacagaaaaatgccaatctctttacagctcacgtaatttaaatggttactgtttaaatttcaggacaagtaaactaactgaacatattcctctgacatcagaaatctgaataaaagaaagcatattttta

SEQ ID NO: 61020 - DNA, 2438 bp, Homo Sapiens
attccggagtttctttgtgggatgcggtggaaggtcggccgatccccccttcggagtcattaattcaaacgtgtacccgcgaacgtttcccggactcccgtgtgcaattatcggcgctaggccgtggggatacggcccactatggaccgagcacggtggccgagctcagtttgatgggttaccccagaggggcggatacgggaaggttaagtttgttggaggagaaacgtggagtaggctttttgtcttgattccgcatgaactgtgcctgaaatgtacttttaaatggggaaggtgctctgaagatttgagccgaaacgccctctcctcgagatttaactaattgttctctcctctctctggctgttggacgcgcacctttccggaggatgggggaggtaaccgaggtcctgagccggtacctgaacttgggctgctctttggcgtaaattgcaatcgattagggatcgtttctcagaatcaagttagaagtgagagttcagataagtgaggccgccattgctgctttgaacacctcagaaggggagaatggatttatcaggagtgaaaaagaagagcttgctaggagtcaaagaaaataataaaaagtccagcactagggctccttcacctaccaaacgcaaagaccgctcagatgagaagtccaaggatcgctcaaaagataaaggggccaccaaggagtcgagtgagaaggatcgcggccgggacaaaacccgaaagaggcgcagcgcttccagtggtagcagcagtaccaggtctcggtccagctcgacttccagctcaggctccagcaccagcactggctcaagcagtggctccagctcttcctcagcatccagccgctcaggaagctccagcacctcccgcagctccagctctagcagctcttctggctctccaagtccttctcggcgcagacacgacaacaggaggcgctcccgctccaaatccaaaccacctaaaagagatgaaaaggagaggaaaaggcggagcccatctcctaagcccaccaaagtgcacattgggagactcacccggaatgtgacaaaggatcacatcatggagatattttccacctatgggaaaattaaaatgattgacatgcccgtggaaaggatgcatccccatctgtccaaaggctatgcgtacgtagagtttgagaatccagatgaagccgagaaggcgctgaagcacatggatggaggacaaattgatggccaggagatcactgccaccgccgtgctggccccctggcctaggccaccccccaggagattcagccctcccaggagaatgttgccaccaccgcctatgtggcgcaggtctcccccacggatgaggagaaggtcccgctccccgaggcgcaggtcccccgtgcgccggagatcacggtccccgggccgccgccgccacaggagccgctccagctccaactcctcccgataaacaggccactgaagctctcgcccctgtaacttataccccacccagctcagttttgtcacttttctagccaaaggaagaccagtaggaaagcaaacccttgactctggcaggatttgcaggcagcaggcagcacccctctgccagccgggccccggctgcagaagtgctgttggtttggatgctgtgtgcctgtcaagattccctccggttttctggctagaaaggctcatccgtttccggtttctaagagtcagttcagtggcagagccaccagggaaaagtgaggctcttgggggtggtttgaccctcttacctgggagcacacttttcccttccccgatgacctgggatggtggccaggccgtgcccttgctgttgctgggcagtgtccttttggaaagggagctgccccaggctttagtgcagctgccaaccctgttaggcctggcctctcgaggcctcttctaatctcaagggtcacaccccctcaaagatcctctcacccatggtagttgctgctcgtggttctgtctgtccgtgcaccgatgcacacaccgcaccccaccactgtactctgaaattggcgagtgagtggagagccagctctgcggagtcatcacgcagccatggtgtgcctgccgttcatggtggtctttcaggttatcttggcaacatgtacattgcttttattttttttcttttttgctttcattgtacagtcagtactataaaatttctcttttgagttttatacctttgtagcattttagatgacattgtgtttgtactttgttgtgtagagtggaagaattgtgttgaataaacccaagatcatctgagatgaatattaattttattctcattttatagatgaggaaatgggagttttaaagacattcaataactttggccaaggtcattcagctattaaattttaagaccataaaccaattggattcctggaggaattc

SEQ ID NO: 61021 - DNA, 2173 bp, Homo Sapiens
atgatataaattatgcatagattccctggaaagccctcaaaagtctgctaaattcctgttgccaccaaatattgtttctttggggaaatatattctgattcctaacaaccaacaataatcataagttttaaatctctcctctctcctctcatgcagtttatgaaacgggctgcttttctgtttgtagctgaggccacaggagctggagggattgcaaagacctttattagagcatccatctggtgaccctggcagggaaacttaggatctaaccctaggatctggctagggctctgtaactgactgttagccagccctgcctctccaggataattatatttatagtggctttgcctcaggaggtttctggaggttgatgaccatgccaattattaactccttagcttcctaatgtagaacatttaggagtgacaggagttgttttctttgcttctcaacaggtgcctacctattgggccgcctttgtaccttgagttttcagttagcaaaatgtgaattgtatgaactaattcttccttgacctcacaggtggtggtaaggattcttgaaaagtgggtaagatccttagaaaaaagatgttcataaagtgtgactcctaggacaggatacaagataaattctgtcccacaaagcacctcatattttgtataattaactatcttcatggcatttgcattttctacagttcactgattttacctcttcagctttatttactatgctgcttttttgtgttaaagtgaattagtgtgtcagcttaaaacacttgtggtgaataattcatatcattcaataagcattaactcttaaatgtgaagtcttatcagccagggctgtgaaatataattgtcaatggtgataaacaattatgctttggtttttagtgaatgaaaaaattaagaatgagggaaccttaacatttttaacctaaaagattgtattttgccaactttccttgggcaatttgtgaatactgcaaatctcaggcatatgtcatcagtgattctaaagggattgtatttgttcctgcatttgttcttgagggtaaaatagcttttcatttgaatgatgcttttgagttggcagcaggacagggatcagataatttgttgttgtttacagattatgttttactttattgtgatgtaattatagatcataattctcatgtttgtccttctcttttttcccttcctttttctagtacttcctcctgtgctggttccaagacacagcgaatataatcctcagcacagcctcttagctcagttccgtaacttaggacaaaatgagcctcacatgccactcaacgccacttttccagattctttccagcaacccaacagccacccgtttcctcactctcccaatagcagttacccaaactctcctgggagcagcagcagcacctaccctcactctcccaccagctcagacccaggaagccctttccagatgccaggtaggttggaatgttcagtgatgttctgtagtcatatcagacagtgttatcacagtgtcacggaaaagctgggtcaacctgcagtggagggaggttttcagccctggtatatgacatagtgctctcgcacttttaggatacaacttttggtgaaaggagacctcatagtcaagtaagcaaatgtcttattttatttgtcaggcacagatgcttgaataagctatattttccccttgtttttaaaaggttttgaaacagctgcatccttctgggagtggcataattgttacagtctttactcttgataaaaagaaaaataccgtgttacacacatttgctcttatgagaacacaacctcaatcagcatcgttttcatacatggaaaaaactcctgttgcaagtgcaacctcagaaaaaatatttcctgagggatcccaccccctacttaattaaattcattcaaatgatgatgtaatcccaagaaacgtatactttaacaacaaaggaattacaacagaagtactggaaaccatctgcttgttcaacttagcaaagacaaaaaacaattatcctctttttctagacataactgttggtgtaatggttatcaaaataaatgattaataaggacattatatatttttaagttacaggttaatgagcaagcatctccaaaaaaaaaaaaaaaaa

SEQ ID NO: 61022 - DNA, 561 bp, Homo Sapiens
  misc_feature (539)..(539): n is a, c, g, or t
ttttttcatttaattgatcagtttattgaattttagtaagggaagttgagatcatgaaacatacaatctaattcaaaagaagaatcataggtaccaattcaacaccattagcactactttcacaatagtgacaccccacttataacactcttttttgggtctctgactgtgaacaagattgtggaaggttggttgaggttaggcctaggcattacggttaagaaataacagatgctaattagttagtggggaagtgaagctcatgtttaggccttttcataatgtctttatgctaaataaattaaatgaagtaaacagccatggctattgaactacagaatacataaaaatacattctgtgattcacctataaacaaaagagtaaagcagaatgtgtcaaattttccatagcaggtaaagcatagaaaaaaaatctagctgatatagttgttatgtttcaacaacataaaatgaaatgtttctaggatagaagaaattggtaccactaacattcggatggttatggtaccataacattntgatataatatgcaaaatgctg

SEQ ID NO: 61023 - DNA, 3301 bp, Homo Sapiens
  misc_feature (2966)..(2972): n is a, c, g, or t
gaattctgcggagcctgcgggacggcggcgggttggcccgtaggcagccgggacagtgttgtacagtgttttgggcatgcacgtgatactcacacagtggcttctgctcaccaacagatgaagacagatgcaccaacgagggtctggaatggtctggagtggtctggaaagcagggtcagatacccctggaaaactgaagcccgtggagcaatgatctctacaggactgcttcaaggctgatgggaaccaccctgtagaggtccatctgcgttcagacccagacgatgccagagctatgactgggcctgcaggtgtggcgccgaggggagatcagccatggagcagccacaggaggaagcccctgaggtccgggaagaggaggagaaagaggaagtggcagaggcagaaggagccccagagctcaatgggggaccacagcatgcacttccttccagcagctacacagacctctcccggagctcctcgccaccctcactgctggaccaactgcagatgggctgtgacggggcctcatgcggcagcctcaacatggagtgccgggtgtgcggggacaaggcatcgggcttccactacggtgttcatgcatgtgaggggtgcaagggcttcttccgtcgtacgatccgcatgaagctggagtacgagaagtgtgagcgcagctgcaagattcagaagaagaaccgcaacaagtgccagtactgccgcttccagaagtgcctggcactgggcatgtcacacaacgctatccgttttggtcggatgccggaggctgagaagaggaagctggtggcagggctgactgcaaacgaggggagccagtacaacccacaggtggccgacctgaaggccttctccaagcacatctacaatgcctacctgaaaaacttcaacatgaccaaaaagaaggcccgcagcatcctcaccggcaaagccagccacacggcgccctttgtgatccacgacatcgagacattgtggcaggcagagaaggggctggtgtggaagcagttggtgaatggcctgcctccctacaaggagatcagcgtgcacgtcttctaccgctgccagtgcaccacagtggagaccgtgcgggagctcactgagttcgccaagagcatccccagcttcagcagcctcttcctcaacgaccaggttacccttctcaagtatggcgtgcacgaggccatcttcgccatgctggcctctatcgtcaacaaggacgggctgctggtagccaacggcagtggctttgtcacccgtgagttcctgcgcagcctccgcaaacccttcagtgatatcattgagcctaagtttgaatttgctgtcaagttcaacgccctggaacttgatgacagtgacctggccctattcattgcggccatcattctgtgtggagaccggccaggcctcatgaacgttccacgggtggaggctatccaggacaccatcctgcgtgccctcgaattccacctgcaggccaaccaccctgatgcccagtacctcttccccaagctgctgcagaagatggctgacctgcggcaactggtcaccgagcacgcccagatgatgcagcggatcaagaagaccgaaaccgagacctcgctgcaccctctgctccaggagatctacaaggacatgtactaacggcggcacccaggcctccctgcagactccaatggggccagcactggaggggcccacccacatgacttttccattgaccagctctcttcctgtctttgttgtctccctctttctcagttcctctttcttttctaattcctgttgctctgtttcttcctttctgtaggtttctctcttcccttctcccttctcccttgccctccctttctctctcctatccccacgtctgtcctcctttcttattctgtgagatgttttgtattatttcaccagcagcatagaacaggacctctgcttttgcacaccttttccccaggagcagaagagagtgggcctgccctctgccccatcattgcacctgcaggcttaggtcctcacttctgtctcctgtcttcagagcaaaagacttgagccatccaaagaaacactaagctctctgggcctgggttccagggaaggctaagcatggcctggactgactgcagccccctatagtcatggggtccctgctgcaaaggacagtggcagaccccggcagtagagccgagatgcctccccaagactgtcattgcccctccgatcgtgaggccacccactgacccaatgatcctctccagcagcacacctcagccccactgacacccagtgtccttccatcttcacactggtttgccaggccaatgttgctgatggcccctccagcacacacacataagcactgaaatcactttacctgcaggcaccatgcacctcccttccctccctgaggcaggtgagaacccagagagaggggcctgcaggtgagcaggcagggctgggccaggtctccggggaggcaggggtcctgcaggtcctggtgggtcagcccagcacctcgcccagtgggagcttcccgggataaactgagcctgttcattctgatgtccatttgtcccaatagctctactgccctccccttcccctttactcagcccagctggccacctagaagtctccctgcacagcctctagtgtccggggaccttgtgggaccagtcccacaccgctggtccctgccctcccctgctcccaggttgaggtgcgctcacctcagagcagggccaaagcacagctgggcatgccatgtctgagcggcgcagagccctccaggcctgcaggggcaaggggctggctggagtctcagagcacagaggtaggagaactggggttcaagcccaggcttcctgggtcctgcctggtcctccctcccaaggagccattctatgtgactctgggtggaagtgcccagcccctgcctgacggnnnnnnngatcactctctgctggcaggattcttcccgctccccacctacccagctgatgggggttggggtgcttctttcagccaaggctatgaagggacagctgctgggacccacctccccccttccccggccacatgccgcgtccctgcccccacccgggtctggtgctgaggatacagctcttctcagtgtctgaacaatctccaaaattgaaatgtatatttttgctaggagccccagcttcctgtgtttttaatataaatagtgtacacagactgacgaaactttaaataaatgggaattaaatatttaaaaaaaaaagcggccgcgaattc

SEQ ID NO: 61024 - DNA, 456 bp, Homo Sapiens
actaccagcgtgaacaaccagcatttttattgcatttgagaatgcttataatgtcagtaattagtactgactacacaacattttttttattgtctgtatccgcagacatggaatgatggaattacagttgatgtcaaggaatgagtttcttttatgccttatcaaaacaaaacaaaacaaaacaaaaaaattcttgttactggcagcacatatacatgaagcaccatgctcacagtccggactgtatcatcttcatcaaggcttatgggtagcagagattgcgtgagctacactgggcccaagaaatgccttcagcattgtaaatctgattttcaggataaagaagcaaaactgactttgaagacatccagaatttcaggaggctatgtcattaaccaaaaggtaccaaaaagattcaaaatctgaataagcacactcttctttgtgcctttggaa

SEQ ID NO: 61025 - DNA, 566 bp, Homo Sapiens
  misc_feature (480)..(480): n is a, c, g, or t
  misc_feature (524)..(524): n is a, c, g, or t
  misc_feature (527)..(527): n is a, c, g, or t
  misc_feature (545)..(545): n is a, c, g, or t
  misc_feature (557)..(557): n is a, c, g, or t
  misc_feature (561)..(561): n is a, c, g, or t
gaaaagatgaaagctgaaaaaagttaggtttggtgtaggttacaccatggatgttggtgcctcctactggtcctaacaaaaatataagtggtaccagcaggcactacttcgcataccaatgtgaagtaaaaattccctttcatctgtggtcaagtatggaaaaattatgaaggtcctcattaaatccacattttttaacccattaaattatccttataaaaattcagataaactactgtcataaatgcaactgcactgcctcaaggacctaaaaactgttttcctaatcaactagatggcataatcaggtaacagcagaaacagatagtctagtgaatttccgagagtcaaaatatgctactttgatgcttattaaacactgaaaactttcacaatactaactccagttaagttggtgaggttaaaaatgactaaactaaaaataatggtcaattaaaacatcccacagggatctactgnaaataatagctgcaaccaagttctggtacctcaagacttgaagnccnaagatttccccagtaggnggcttataaagnaatnttttg

SEQ ID NO: 61026 - DNA, 3686 bp, Homo Sapiens
aggacagtacagtgccttacttgcaagatgtgcaagcacacaagacctatgaagaactgtctcccaacaaaggatacatgcagaaggagaaaaaactctcttaaacaaaaagaggcagagccggcagggaccgagcgggtgcctcagtctccttcccctcccctcgcctgtcctcgccatcttcttctcacagccggaccggaactatgtgatcccggaagttccgggtcctttggccctatatgatcccggaagttccggggcttttggacctctgtgattccggaagttccggggcgttccggggcgttctggggcctttggagcgtgggataagcagtaatggcggaggctgcagctcccggaacaacagtcacaacatcgggagcaggagcagcagcggcggaggcggcggagacggcggaagcagtctccccgactccgatccccacagtcaccgccccgtccccgagggcgggcggaggggtcggcggcagcgacggcagcgacggtagtggcggcaggggcgacagtggcgcgtatgacggcagcggtgcgtgcggcggcagcgacgcgtgcgatggcagcggcgacagcagcggcgacagctggactaaacaggtcacttgtagatattttaagtatgggatttgtaaggaaggagataactgtcgctactcgcatgacctctctgaccgtctgtgtggtgtagtgtgcaagtattttcagcgagggtgctgtgtttatggagaccgctgcagatgtgaacatagcaagccattgaaacaggaagaagcaactgctacagagctaactacaaagtcatcccttgctgcttcctcaagtctctcatcaatagttggaccacttgttgaaatgaatacaaacgaagctgagtcaagaaattcaaattttgcaactgtagtagcaggttcagaggactgggcgaatgccattgagtttgttcctgggcaaccctactgtggccgtactgtgccttcctgcactgaagcacccctgcagggctcagtgaccaaggaagaatcagaggaagagcaaaccgccgtggaaacaaagaagcagctgtgcccctatgctgcagtgggacagtgccgatatggggagaactgtgtgtatctccacggagatttatgtgacatgtgtgggctgcaggtcctgcatccgatggatgctgcccagagatcacagcatatacaagcgtgcattgaagcccatgagaaagacatggagttctcatttgctgtgcagcgcagcaaggacaaggtgtgtgggatctgcatggaggtggtctatgagaaagccaaccccaacgagcaccgcttcgggatcctctccaactgcaaccacaccttctgtctcaagtgcattcgcaagtggaggagtgctaaggaatttgagagcaggatcgtcaagtcctgcccacaatgccgaatcacatctaactttgtcattccaagtgagtactgggtggaggagaaagaagagaagcagaaactcattcagaaatacaaggaggcaatgagcaacaaggcatgcaagtattttgatgaaggacgtgggagctgcccatttggagagaactgtttttacaagcatatgtaccctgatggccgcagagaggagccacagagacagcaagtgggaacatcaagcagaaacccaggccaacaaaggaaccacttctgggaattctttgaggaaggagcgaacagcaacccctttgacgatgaagaagaggctgtcacctttgagctgggtgagatgttgcttatgctttaggctgcaggtggggacgacaaactgacagactctgaaaatgagtgggacttgttttgtgatgaagaattttatgtcttagatctatagaaaccttgcgtagtgtgtgagctggtctgctgaccccagatagcagctgtcccctgtggtggtgtggcagtgcctatgttctctcctaggcagacctatcaactccaggtgctgcggttaagaatatgtacccagggcctgtcttgtcaacccctcacctttccccaaggagtgtgttgttttccctgttggaaaaagttacaaaaataaatgttaaaggttttttttgttttttgttttattgagacagagtcccactctgtcacccaggctggagtgcagtggtgcaatcttggctcactgcaacctccgtcttccgggttcaagccattctcctgtctcagcctcccaagttgctgggactacaggtgcatgctacaatgcccagctaatttttctcatttttagtagaaacggggtttcaccatattggtcaggctggtctcgaactcctgacctcaggtgatccacctgccactaccttccaaagtgctgggattacaggcgtcagccaccatgcccagccttaaagttagttttttgtaacaggcatgagccaccgcgcctggctttaaagttcgttttttgtaacaggcataagccactgtgcctggccttaaagttagtttttttgtaacacgaatttaactgttggacagttagtttagatgtgttgcatcatctgttttcaaccagattgtgtttatggacttttcacacactaattttgaggaccccaggttcaaaagtaaaagcagtggccctgctttggggtccaataataggagtgatgggtgaagggacctaagctggccagtagccttctgctccagacatgggacgcggatccttgaggtttctggttaaatctgcacatctgtgtttttatatctgttccctacccctgtaatccctaccgcatgcactagttctgtagttttggtctctcgtttaattgtatgcaagtagtactactgggtaaccagagccaagcgtgaatgtgttcagatttctactgttttgcatgataggaaaattgagaaagaatacatataaaagatatagaggcataacatcaatgcagagttggaagttgacctccacggggtgacatggtgtgtgtgagtgtgggtgtgtgagtgtgggtgtgtgataagcttctcaaacctgcatagatgcagtattcttggctttggtagaaagccttggtttaaggctgggcgcggtggctcacgcctgtaatcccagcactttgggaggctgaggcggccggatcacaaggccaggagatcgagaccatcctgtgaatggcgaaaccctgtctctactaaaaatacaaaaaattagccgggcgtagtggcgggcgcctgtagtcccagctactctggaggctgaggcgggagaatggtgtgaacctgggaggcggagcttgcaatgaactgagaatgtgccactggactcccagcctgggtgacagagcgagactctgtctcaaacaaaaaaaaacaaaaacggaaacccttggtttaggggtttaagtcttatgtggtggttaagatcttaaaggacaaagcagtatattggtagttatcaatatagcagtactagctctgtttatataaatagagaaatggagttagccatagaggttaaaactacctggttatcccatatattaacccaaactgggtcttggatacacagttgtatttaatgttttacgatctagcctttccagtataggcacttcctgaaaaacctttgtcctcatttggggcattttgttgttgggtttcgcc

SEQ ID NO: 61027 - DNA, 545 bp, Homo Sapiens
ttattagggattcctgccaccttattaacatataaaacaatctggatgttgacatagaaatgcaaatttcactatacaaaggtaaggctccaagcacagtaacatggcccccatatctttagtatttcaatgaaataaacttattggggattcaccccgagttgtgtttataaatattagacaaaccacaaaatatattccaaatacataacattttacaatatttttcaagcacagacaaatacatactttactttacctacattgttttcatgatccaacttgcattagcactaaaggcaatattgtgtgtgtatatgtatttgccatatgtgtgtgtgtattatatatatttatttatatccacaaatgtacactcagtggcatttatggaaaatttaaccctttcaggctgtgggttttacccaccatagtatctgagagggagaagaaccaataatacatctcaaattcctcaattagggcaaaataagcacaattatgcatgaggggcatatatgttgtgtctattcaaagacacacat

SEQ ID NO: 61028 - DNA, 536 bp, Homo Sapiens
  misc_feature (7)..(7): n is a, c, g, or t
  misc_feature (48)..(48): n is a, c, g, or t
  misc_feature (85)..(85): n is a, c, g, or t
  misc_feature (113)..(113): n is a, c, g, or t
  misc_feature (120)..(120): n is a, c, g, or t
  misc_feature (468)..(468): n is a, c, g, or t
  misc_feature (492)..(492): n is a, c, g, or t
  misc_feature (523)..(523): n is a, c, g, or t
  misc_feature (531)..(531): n is a, c, g, or t
ttttttnctgtttttcatcattcagctagaaagtgagaagttttatcntccatagtccttttaaatcttatgttagaactagcangacgtaggtggaaagatgaagaaataancttgtcnagactaaagaaaggaaagcaggttataaaagccatagtagccagtccagttcattctgcagatggccccataccaatcgctgttagagtttgccacctccactttcccactgagaactgcagcaattttaaaggatatgagaaagccaagactcaagagatgagaagacccccttggcgaaatatagtgtactcttcactgccactgccaccaccaaatgggtttttagagctttgaaacacaatctttgtaaattaatcaaaacctccctgtgacccacctgccttctccccatacccaaatttgaccatactggcctaaaaggaagatggggttcgatatagaggnctgctaagccagtaggaagggctncacgggagtgacagtaggtcttcctctccanatgggatntacac

SEQ ID NO: 61029 - DNA, 561 bp, Homo Sapiens
  misc_feature (410)..(410): n is a, c, g, or t
  misc_feature (499)..(499): n is a, c, g, or t
  misc_feature (501)..(501): n is a, c, g, or t
  misc_feature (552)..(552): n is a, c, g, or t
cggtttcacaactttattaaaaataaatttataagtaaacaaatcgtaactttatagattaaagttgattgggattaaggagaacctgggtataagaggatctggtacagagaggtctcaggatcttttcctgagtgggagtacatacgaggtagggaagagaaaacaacaaaccagaacaaagttgctgctcccaggtcctctttcatcctccaccttcccacacagcattctgacagcccctgagctctcctcaactgcactacaaaagggcaggccacccccagcacagtcaagtcctgagctccctctgcttgtagccaggcaccatgttagtgatttccacctcagggctttccttttaaaatccacaccccacatgcctttgcaagtcagctctctcacctctncatactcatttcactctttcccaacttcccccagcccaaccttttgccagcttccttcactcactggaattttccctcttctactattncnggaaccatttatttcattcaagccaggaagccatgccattgccagaaaacnccattttgg

SEQ ID NO: 61030 - DNA, 505 bp, Homo Sapiens
tttcaaattttacaatttttttacttccaaaaataacagtaatcagcatcatacgtacatgtccgtgtcctcatatgtagtaattaagattacatgagccactgtattaagtatcacccacttgaggaaatacaaagcaagagaagaaaacctatttaagaattgggtttatataacagtggtgttgtcattttttaaactgctctccattcatgccaaattatagagcagcttcggaacaattatatcattaaatttacgttttgtgtgatttcagtactgaatgcccttttcttaactttcagagcccactgaaagtttcggggctcacgtggcccaccattgtcccagtcactcagcaaacacatcagtgccctcatgtggagggtccacgccagcttctgtgatgacagaggtgaatactaccggctgcttgtcctcgagcacgtacaatgtaacaaacttgtaaataaaataagcacattataatacagcatgttaagtg

SEQ ID NO: 61031 - DNA, 491 bp, Homo Sapiens
ttggacatttcaggcctccactggcagttgctttcactgtacaaatgtaaagtgtggaaaagggtaaggacctagaaaaagttatacaaaaaatatgtgccattgtcaggtgcaaaacctggcgactactctgaaccaaattaagtataatatccttcaaaataaatgagaatatataaataagctaaaatagaatccacacaggcttcatagaaactttgaaagcattacacattggtaaggccccaggataggaagaaaataacctaacatgttcaaaagggcaaggaaaaacctccctacactgggaagtttgttactaaataaacttttctaaaatggaagcacaataatgatcagctcttggaatttttattgcttaaaggcacgtctagtatacacgaaatactcttttaacattgctggtcttttggaaacattcttagttttaaaacttgaacctttatgcactgagtgcctcagggtgaaaa

SEQ ID NO: 61032 - DNA, 632 bp, Homo Sapiens
  misc_feature (506)..(506): n is a, c, g, or t
tttttttttttttttgtgcttttaaaaaaatgctagggcccacaggtctgggggaacagcaacgaacaatgagactcgaaatttcaagaattagcagcatagaatcatagtgtgatggaatcttagaaacatggaatcattccattggaatcttagaatgatggggttttgcaatcctagaatcttggaatctttcacctgtggaacgttagaattcatgactcttgcagtctcagcagggcccccaagagtgtatgtggtcctggctgtgacctcctccctcctccctctcctgctccctctccttcaacaggggccgttaggtcttgggtagagacagggcctttgctctctctctcctccaggaaaagcgtgtcttggtctgggtagccgggcttggtagtggtggtggggcatctgtagctctaggtccagctggaggccccgcctggccaggtgttgagtgaagaggtctggaccatagccttggggtctgtggggtctcncagggtggccctgagtgggttgctgggcccctccaaagtattaaatttctgctgcttcttgttatatcagctttctcaaggcagccttcatgctgcgaagctaactcagacagatctgggtctgag

SEQ ID NO: 61033 - DNA, 490 bp, Homo Sapiens
tcaatgaattaaagcagtttatttaacattaattgcagaatgcagaatttacagcactaccatttaatgataggaataaaaatagaaagaatccagtgtaagcgatgttgcagacaaaacattggggtgggaaatgagcaaaactgaaaatgcaattaacattcaaagaaatcttccaaaaggactgggagcttatcaggggatgggcatccccttgatgatgaagcgtgatcctcatccccaccaggatttcagggcagccactgaacatatacccctgttgaccgtccctggaaagtctttcagcacagtctgacttaacatgtttgagatggggcaatatctggattataatacactttggaaatatagcgcagggtgaaagacggtaatagtgtgcatttgtgtgtgggttttctttttcaaaacggaagaaagtgcaaattttaggggtgtgttttcctgattttaaacatgagaggtgatgtca

SEQ ID NO: 61034 - DNA, 541 bp, Homo Sapiens
cttgcagctccagctcaaaggaaaacaaaaactgggtttgaatcctcgctctaccactaggctgcgtgactagcactaggctgcgtgactaggggaatgtcacttagcacctaggagccttggtttcatcacattgcaagggtggtgtgagaatcaagtgataaaatgttaagtgccaaccaggcacaatgtctgggtgcaaatggttgcatgacaatagaggtttctttacattatgatgactactcagccttttaagtgacaaagcatcttttaggtggagaccatgtatttctagtgatcaattcaaattagtacgactttccctagaagagtcctttcctgatatttgcaggggtagggcaagtcccctggctaatccagtgctgtgcaaaaaaacgtgccagacggggaaatgggtaacatatttggcttctcaatcagcatcattcttttcaacaataaagaaaatgggagaaggaaatagaataaacttattcaaagagaagtacgtccactgttagtatcgattttactggca

SEQ ID NO: 61035 - DNA, 2627 bp, Homo Sapiens
gcacaatctctctctcacacacacacacacacacacacacacacacactcactcactctattttgtgctgtcgtaaaacccacgtgtccagccgggaagctgccagagcgtggaaccaaggagccaggacgcggcagcggccaagcgcagcagcccacggcggttgagtcgggcgcccaggtccgtccgcactctcgcgccctccgcgggcctcccaattttctcgcttgcaggtcgggaggtttccgggcggcacaatctctaggactctcctcccgcgctgctcaggggcatgtagcgcacgcagggcgcacactctcgcgcacccgcacgctcaccgagacacccgcgctggctggtctctcggccctgccggtgtcgcagctgccggtgttcgcgcctctagccgccgctgccgtcgccgccgagccgctgccccccaaggaactgtgcctcggcgccacctccggccccgggcccgtcaagtgcggtggtggtggcggcggcggcggggagggtcgcggcgccccgcgcttccgctgcagcgcagaggagctggactattacctgtatggccagcagcgcatggagatcatcccgctcaaccagcacaccagcgaccccaacaaccgttgcgacatgtgcgcggacaaccgcaacggcgagtgccctatgcatgggccactgcactcgctgcgccggcttgtgggcaccagcagcgctgcggccgccgcgcccccgccggagctgccggagtggctgcgggacctgcctcgcgaggtgtgcctctgcaccagtactgtgcccggcctggcctacggcatctgcgcggcgcagaggatccagcaaggcacctggattggacctttccaaggcgtgcttctgcccccagagaaggtgcaggcaggcgccgtgaggaacacgcagcatctctgggagatatatgaccaggatgggacactacagcactttattgatggtggggaacctagtaagtcgagctggatgaggtatatccgatgtgcaaggcactgcggagaacagaatctaacagtagttcagtacaggtcgaatatattctaccgagcctgtatagatatccctaggggcaccgagcttctggtgtggtacaatgacagctatacgtctttctttgggatccccttacaatgcattgcccaggatgaaaacttaaatgtcccttcaacggtaatggaagccatgtgcagacaagacgccctgcagcccttcaacaaaagcagcaaactcgcccctaccacccagcagcgctccgttgttttcccccagactccgtgcagcaggaacttctctcttctggataagtctgggcccattgaatcaggatttaatcaaatcaacgtgaaaaaccagcgagtcctggcaagcccaacttccacaagccagctccactcggagttcagtgactggcatctttggaaatgtgggcagtgctttaagactttcacccagcggatcctcttacagatgcacgtgtgcacgcagaaccccgacagaccctaccaatgcggccactgctcccagtccttttcccagccttcagaactgaggaaccacgtggtcactcactctagtgaccggcctttcaagtgcggctactgtggtcgtgcctttgccggggccaccaccctcaacaaccacatccgaacccacactggagaaaagcccttcaagtgcgagaggtgtgagaggagcttcacgcaggccacccagctgagccgacaccagcggatgcccaatgagtgcaagccaataactgagagcccagaatcaatcgaagtggattaacggattgactggttggaattaaactgcaaggaaagtcatgattaaatgtcacggacacttaagcaaaaccaaagatttcctctgagcaactttcaatcagtcccagaaaaccaaaagcagtaataaaataagtaagatgttaagagatattgatcctggcatggaagtcagaccaggaaagagattatttatttatgacttagggatgagacttatttcagtggacaactaacctgggatggtaaacattcccagtcccaccatgtattttgctttgtttctaaaaagctttttaaaaactgttatttaataccaaagggaggaatcgtatgggttcttctgcccaccgttgtgactaagaatgcacagggacttggttctcgttgcacctttttttagtaacatgtttcatggggacccactgtacagcccttcattctgctgtgtcagtttggcctggcctgacactggctgccccagcggggaccacggaagcagagtgagagccttcgctgagtcaatgctaccttcagccccagacgcatcccatttccatgtcttccatgctcactgctcatgcactttttacacggtttcttccaaacagcccggtcttgatgcaggagagtctggaaaaggaagaaaatggtttcagtttcaaaattcaaaggaaaaagttgaggacttattttgtcctgtcaagattgcaagaacatgtaaaatgtacggagcttcataatacgttatattgttccgaagcagctcgttgagaaacatttgttttcaataacattttagct

SEQ ID NO: 61036 - DNA, 527 bp, Homo Sapiens
tttacactttaagtattttattgggggctgtaatttctttagacttcaatgtcaggacttcaacttgcaaggggagttgatcttgtgtttagtttttcctgggaatgagacgatgggggttgggtggtaaatttatggtcaagtttggggcatttgcacattggcttgtaactggagtaagttgtggtgttgtttaattttgtcgaggcttgactggaacatatggctggaaattatttgggactgaaagagaagcggtagtaaacatttgccttaggtaaaatgtagctttgggatgaaacttttttaaacagctttactgacatttaattttcacatacctcacccacttaaagtatacaattcagtggttccgagtatattcacaaaattgtgcaaatggaagtataatctgattttagaacattttcatgatccctccaaggaaacttcctattagcagtcactctgccttctattgcccccagccctagacaaccactaatctacagcctgtctctatacat

SEQ ID NO: 61037 - DNA, 584 bp, Homo Sapiens
  misc_feature (537)..(537): n is a, c, g, or t
ttttacacataccaaaaacatatttaatcaggtaaacaaaaattccaaatacattgttgcttatttataaatattgatttataataatcctaaacttttttttaaccttaaaaaaatcatccaaagacttcaagttaaatatatttcaggattagccagggatttttgtttttcgagggttggtttttaaccacttcttcatccagcggtctattatgagaacacaacacagtcctctgtcccttaagcatgcaggttccttctactgctctcagtgtggtcttgtctgccaggcctgtgattctccctaggactgtcttttcctctgggaggactgactcacctgtgatttgtggtatttcaaactagtgaaaaaaggaaaaacaaaagtggcatttgattcctaagctattactactacccaggaaaatgcttgctgagagaaatgaacacagctttgtgtattgcattctaaaaataacaccaaaattgtgcttttgtaatcttgtgcagatttgagtttgtgctttgatgttntcaaaggaatcttcaaggtattggaaatactttggaatccaaagtat

SEQ ID NO: 61038 - DNA, 946 bp, Homo Sapiens
  misc_feature (840)..(840): n is a, c, g, or t
ttttcttatcaaaaatattttatttacaaaaaattaattatactatacatcctatactggaaatacattgaataattgctaaaataaatacaggcaattaattcaactttttataagaatgagagaatttgacatttgaatgttatcaaagcttaacttagaacataaatagttaaaaaggcaaactcaagttttcatctcatttattggcatggtgtgttttgttttccacaagctctccaatcagtgagagtcttgagtctcagatgtacctttttgtactctgaaggtaggatgtgcagctttttcttaggcaggatagatgtaacatagatgactgcataaaaaagaggcagaaaggcaggaagcccattttttttttaacactttctcatgtgtctctgcctcaccataatgctgtttattcaattattcatatattccgattgtgttttcaacacaggtctacacagcaccagctacaaggcaaggtcaatcgtgtaaaaaataaaactggataatggaggccttgcagtaactaaattagccaagttcagagtatgtggttcaacaatttttatatgtgccaatcattgatatacttattaaaccctgatgtcacttctactgggtagacatttttatacagggccagaacaggaaattagaagttatgatctgtgtaattcagaaaaaccaaaatcctcatttgaaagtaaaagagggtagatccctggtgatttctatctgccaatttgaatttaattgtttaataatttatccaactaaaccgggtaaacattatacttacatggtaagggaacgtgcaagtttgaaaanaaaaaaagacagccaaaactgtttaaagtgtgagtgggacccataaattcaggcccagaaccaaacctttgttaaacgggtttgttgggcccaaatttacagaaat

SEQ ID NO: 61039 - DNA, 560 bp, Homo Sapiens
  misc_feature (502)..(502): n is a, c, g, or t
tttttttttttttttttaacaagaggccccttgttttcgttttgtgttgggccccacaaattctatagctggtcctgcacacagcactaggctccacatctgtagaggcagaatgtttgaatataataagatcacaaaaccagagcagcatctggattctcttcagtgaattaggccaggcttcattcttgccgctttctaaacctccccatttaaaggacacaaataaattcaaatttagggctcagattttgtatctaaacagttaaacagactcatatgattctaatctacacaaaagggaaaaaaccaaagcatttcaaaagtttctgcagattttcctcaaggtttggattgccaattcatgaccaccatgaccagatgttacaatccatcaagacaaccaccaaaatggctgctgaacttgaagatggcacacagaaaacaaatgtaaagtgttaccctggagaaaactatctctaaccagactctccaaaggcanaaaatgggcttttgttgtcctctggatcggtttggtttagcagtacaagggtaaaaat

SEQ ID NO: 61040 - DNA, 577 bp, Homo Sapiens
ttttttttttttttaatattggggcatttattattaccacggacattaataatcagaggaaaataagttttaaaggtaaaacttcttttgcgagaaaccctcatggacacaggcagcggagtggcgaagcgatccctgaggtcaggttctgagttcagaaccagggcaaagcacagagcaagcggcactcaagtcttcccagtgaagatgcttttggttgcaaggagcagaaactctctcactgagctggagtcctgaattcgttatgatatcaggtgtcagggaaaccaggccaagagatgccaccagctttcatgaagcaccagtacagaaatatggacgccaataccatgaccctctcttcccatctcttccctctcctttccttctacacctgctctgtgccccaggtccacagcatcccagcggtgagtgcctgtgttacatgtcctcacttcggccacgtgccgaggcccaattcctgcgggttctgattggccagctcgagtcaggtgtccatccacggtccaatcagatatgaccaaggggggccagggccacactacaaacatggctg

SEQ ID NO: 61041 - DNA, 439 bp, Homo Sapiens
ttttttttttttggttataatagctatttattaccataatgagaaatgaacaaaagttttacagtgagatgacaaagttcaaatattatctgtagtatacaagaactagataaaaaaaaaaacacatggtgcaaaaagggtgcctactatttaaataccctatacctgagttacaaatcacctaagcacaattacaaataattcagcctagcacccatgcaggacactggctagtacatgggtagccagcagagcctcttagcagaggcaaaatcaattgcatttcaaggaaataagtctcccagcatcagaatgcagagatggattctttcctcccctcacttggtccctaattgttctctttacaacactagcagatgttggggctcagaaaacccaaagtgaaggcctcagaagcaaagtttttctctgatgttat

SEQ ID NO: 61042 - DNA, 1310 bp, Homo Sapiens
aattgccatcggatgaagcctgctctgttcagcgtgctctgtgagatcaaggaaaagacagtggtaagcatccgtggcattcaagacgaagatccccctgacgcccagctcctgaggctggataacatgctgctggctgagggcgtgtgcaggcccgagaagagaggaagaggaggagcggtggccagggccggcacagcaacaccaggtggctgtccaaatgacaatagcattgagcactctgactacagggccaagctgtcccagatccgacagatttaccactctgagctagagaaatatgaacaggcctgtcgtgagttcaccacgcacgtcaccaacctcctccaggagcagagcaggatgaggcctgtctcccctaaggagattgagcgcatggtcggcgccattcacggcaagttcagcgccatccagatgcagttgaagcagagcacctgtgaggcagtgatgaccctgcgttcgcggctgctcgatgccaggcgcaagcggcggaatttcagcaagcaggcgacggaagtgctgaatgagtatttttactcccatctgaacaacccttaccccagcgaagaagccaaagaagagctggccaggaagggcggcctcaccatctcccaggtctctaactggtttggcaacaaaagaatccggtataaaaagaacatggggaagtttcaagaagaggctaccatttacacgggtaaaacggctgtggataccacggaagttggggtcccagggaaccacgccagctgcctgtcaacacctagctccggctcctctggacccttcccgctgcccagcgctggggacgccttcctcaccctgcggactctggcctctctccagcctcctcctgggggaggctgcctgcagtcccaggcccagggtagctggcagggggccaccccccaacctgcaactgcctcacctgctggagaccctggcagcatcaactccagtacatctaattaagtttgggggataagcaggaaagagcgctgcgtgagctgccatgtatcgccagccgttgctttgttactgaacgtgccgccgacgacctcagaaaacccagatgggtggtggtgcccatgagcccctgctcctcagccaggcccgtggcgccggctcatgtgtctgctgcgactcgagatggcctgaaacgccactcattctcccacttcagttcgtttttttgacagtaattttatggtaacgctatgaattgaattgtctgttctaggactgggcacagattttcccattaaaatttttgacttattttaaaaaaa

SEQ ID NO: 61043 - DNA, 478 bp, Homo Sapiens
  misc_feature (383)..(383): n is a, c, g, or t
cacgagggagttcagcagttctcatattctgtttaaataggtacagcattttcaagggcacagatacagagaagctggctttctaggtattgggcttccaagccaagagttttgtccttccacctgtattagttatctattgctgtgtaaaaaattaccctaaatttagtatgttaaaatagtaaacattatctgtcagtttctgtgggttaagaatttgggagtagtttaacatgatggttctggcccatggtatcatgaagttacagtcaagattgaacaggggctgcagtcagctggagctggagaaaccacttccaagttctctctttgtggccgttggcaggatgcctcagtttcttcccatgtgggtctctgcgtanggcagcatgagtgtcctcacaccatgacacctggcttctccctgagcagctgattccagagatcatggggcagggccaggagaaagctgcagtgc

SEQ ID NO: 61044 - DNA, 420 bp, Homo Sapiens
  misc_feature (213)..(213): n is a, c, g, or t
  misc_feature (293)..(293): n is a, c, g, or t
  misc_feature (349)..(349): n is a, c, g, or t
  misc_feature (351)..(351): n is a, c, g, or t
tttctctgtgttcaatctctggatttgaccctctagctccctttcagctttctgtttctcattgtttgctttcttttcttcttccagctgatgttccacttgtttcttctgttgtttcaaagatttgatggtgtcattcagtcgactgatttttatggacctcgagttcaggactgctgcttgttcttggcacgggctctgaggcgcatgcanagaggaggaggcggaggaggactttggggagaggtagagagaacgatcattagggctgggttgtgtgtgggctgtctcanctggcaaaggggcacccagtccccgctgcgggaggaggttggagggctggcctgcngngtcactgcacctccgcccagagcctcctacctccagatccttcagggtagcagatgatgtagggcccct

SEQ ID NO: 61045 - DNA, 536 bp, Homo Sapiens
  misc_feature (47)..(47): n is a, c, g, or t
  misc_feature (51)..(51): n is a, c, g, or t
  misc_feature (529)..(529): n is a, c, g, or t
ttttttttgaccacattaacatagcttttattacaatatattaattngccncaatttaatatttttaatctcttactgtgcctaatttatgaactttatcatagctgtgtatatatagaaaaaaacataatatatatagggtttggtactatccaaggttttaagcatcccttcctcccatcctcagtttcagttatagtcaactgtggtccaaaaatattaaatggaaaagttctgaaatacacactattctaagcaacatgaggaaatcatgggggagttttctgcttcatatttttatagggaaaggaaggtcatgtgtgctcattttattcttcttacaatttctcttgaccccagagtgggtaccacttcctgggggaaggatttgttttccaaaacagagggttcaatttttatataggccctcttatttcccccattaggaattcacttgactagggggcttttatttactctgtcattttaatcatgtttcaaatcccatccaaaggccataaggcttttnactcaat

SEQ ID NO: 61046 - DNA, 526 bp, Homo Sapiens
ttttttttttcagaaaggtagttttgttatttattaagtgtttattaaatgcctccctaaaggtcctggatgccactagaacctttagttaggactgagatgtatatgcaagagtggcacatatcaaaatatctgctcattggttcagatccaacgtaagttttccttgaaccagaacctcatattaacttaaagtactcaatggcacagcatcctctaatttaaagattttaaaacaaaaacataaccagaagacccagttttcaaaattgctgttaaaggccaacaaattagtgggagggaaggaataaaaaggaataacctctcttaaaataacaaatctacaaagtcctctgccacaaaagcagatctttgtcatttcccatgagataatcatcaccttgccgaaaaatgagaaaggcaccccccgcaggcaggggggaaaaaacccactcgctgaaaacaggcttccacctggtttttaccatatattccagggggttatggtgtgtggaggggttggttt

SEQ ID NO: 61047 - DNA, 464 bp, Homo Sapiens
cctgagacacaaaaccatttatttttggttcatttcagtatctatagcagtgcacaaataacacatttccatccacatgaatagttcccaattgttggagcaaattaatcttttacaagctactgagcagtgaggttagaagataaacagtagatgaaatcgtacactttcccctgtatgtgaactttcttattacaataaactcctacatttgagctcaccacatccaatgactgcccctctctgttcatgtggcggccccggctgccccctgccacctctgccctgctgaggtagttctctgatcagccacctgggtggggcatgctgccattttcagtttggaaggaaaagcctgtaaatctgcttcctgggaagagagacactgctgaattgtcatttgcctccagaatgcagaaaacatcaatttcattgcagctcatcaggggttggaaacacctggc

SEQ ID NO: 61048 - DNA, 696 bp, Homo Sapiens
  misc_feature (597)..(597): n is a, c, g, or t
aacaagggttgtcattgcaactttattattagagcaaaactctgtaaactatccaaacactcaaaatactgcaatttgctttataaatgatagtctatccacacaatgggatgtggtgatttaaaataatgatgtgtataattattgacatagaaagaaatttagccatttattaaatgaaaacaagtatgtttgtaaaacggtatccagaagacaaaggacccagtttcttcaacataacagtggcatgtgaaccaaaatgtagggggaactataataaagaggcttaagaaagaagaaaaaataaaaaataaaacaggcttaatatatcaaccgcatgcaatatgtttagatcctgattccagaaaagcaagtgtaaaaaagtaaagttttggctgggcatggtggctcatgcctgtaatctcagtgctttgggaaactgaggcaggaagattgcttgaggccaggaattcaagaacactctgggccacatagtgagacctttttaaatttttttctctacaaaaagtagccaggcatggtggtgcatgcctataatcccagtcttccttgtgtagcacagtcctgcctcctccnttctgactcctattgtgtgtgcaggaggccttgttgggagttggtggagccaagagtttaggagaaagagaggcaaatggatttatgggatatttgcct

SEQ ID NO: 61049 - DNA, 443 bp, Homo Sapiens
ttttttttttttttttgccatgcaaaggtgcttgtttattctttgagatgtgaattataggcgtctgctgtactggggttcctgtgccgccggtaggggccccagtcctccggctcccgaatggttctctgctggtcactcccgctggaactgcaactgactagcgtctcattcgacgctcgcgtgatgatgatctgtggaacgaccactttcttcctgctggacttttgctttacatcaggtttctcttccagcgaagctgccggcggcgggtgcttggctgtcccggcccccgggtggaggctgtccacaggcttctccgactccctgtctgcctgcctggcttcctgggaatgcttctccatcaacttctccttagattttggaactgaataggtggatcccttcttttgctcctcacctttcctgggtttctctttgct

SEQ ID NO: 61050 - DNA, 539 bp, Homo Sapiens
ttctttatagttatcatttatttcttctgaggtaagttactttttaaaaaacaaacttaaaggacacactacacttcagcaaaagcttgtccacgcatattatatttcagccgtagatgagttgttgtggctgttttaagatcaaagcgtccactgtaatataaaagtcactgtaaacatatccatgatattcctgtcaacataccaataaaaagtaataaagcaataataaaacttatcgtgaactttcacccataatgcatatcatacagcaaaatctcttacatatagttgtatacatatacataaatgtatgcacttcttaaaagaatttgtaacgtgaacattcacaattttcttcataaatcctttgtagtttattttgatcccagcaattggcatatagaaaagtagattccttttccttttctcttcttcagataagtttttaattacttctatttatatataggagtgccagttgtctggcttcttaaggaagaattgtatgtcatggatggagagaaatctctacagga

SEQ ID NO: 61051 - DNA, 422 bp, Homo Sapiens
  misc_feature (30)..(30): n is a, c, g, or t
  misc_feature (111)..(111): n is a, c, g, or t
  misc_feature (138)..(138): n is a, c, g, or t
  misc_feature (191)..(191): n is a, c, g, or t
  misc_feature (211)..(211): n is a, c, g, or t
  misc_feature (257)..(257): n is a, c, g, or t
  misc_feature (285)..(285): n is a, c, g, or t
  misc_feature (396)..(396): n is a, c, g, or t
ttttgaaagttgttcatttatttgtgaaangtctacatgtgttgactgcattctaaaatgaggctaaataggaaaggtgccattagctctgagtgattaaagccatcgtangcagatgccaataatcatgcaaaccantaaggaaagcgcttaaaaacagtatttttatttttaaaaaacctcaacattanggcgggaacccttctctgangcacatcactttcctattaaaaaataaaaaaagtacagtagacggngcacaggacaactctcttcacacaaggnaagactgtgtgtttacacaattcaaacacccaggaattcaaaaccacattctcccattaacttgtggaaggtaattaaatttgctttggataacttctttccaggaaaagntaatttttcctcccaaagcacaccat

SEQ ID NO: 61052 - DNA, 527 bp, Homo Sapiens
  misc_feature (401)..(401): n is a, c, g, or t
  misc_feature (447)..(447): n is a, c, g, or t
  misc_feature (484)..(484): n is a, c, g, or t
  misc_feature (512)..(512): n is a, c, g, or t
tttttttttaacatcatacaactttaatgttacaccatctacaaatctaaattacatttaaaattatcagttgacagttgtactaggatttacattaggaatcactacatgatcaaatagattgtttttctgtgttttattgccaagttatttttactgagttaactactccagtttcagactcttttaaatgtttttatgctaaagtatatgtattagtccattgttgcattgctataaaaagtgcctgagactcggtaatttataaataaaagaggtttagttggctcacagttccatgggctgtacaggaagcatggcactggtatctgatggggcttctggggacgcctcagggaaacttacagccatggcaggaaagcaaaagggggagtgagcanttccacatgggccaaagcaggagcaaggagaggagttgagggggtngaagttgcccagttctccttgaggaactcactatccnggagttgaagtacccagagggggttggnccccaacgttccatt

SEQ ID NO: 61053 - DNA, 546 bp, Homo Sapiens
  misc_feature (440)..(440): n is a, c, g, or t
tgagtactgaatgtctttattgataaactaaatatatatttaaagcataatacgataattatgtagaggataaaatataaattgttcacttaggagattaatacataaatcatatttacagaccattgacttgagaaatacagttcgatgacatttcaatttgagcaaaagatgaggtgctcaagtatggcattctgtctcattaagacagaattcaaactttctgcaaagaaaaagtccctcatttcttggtgtgctccaggacctccatattctttagatttggaggcaccgcccattgaggagctggctgcagtgtcagcgtgagaaggaggaggaactccaggccaggggcggggtactccagatccactggcctcaaggacccctcagatggagtcagtgtgggagcacagagcctggcagctcgggaggcctgngtggaggggaaaagaacagtgctgctctaagacccagccccctcgtgggggagagagcagcagggcttggctctcagctgcatggcaggtgtggaaaagctccttg

SEQ ID NO: 61054 - DNA, 561 bp, Homo Sapiens
  misc_feature (368)..(368): n is a, c, g, or t
ttttaggacaaataaaatttatttttctctgtaaattcatttaaaagtatgttatctatgattatcctatcaagggcagaaatgttagatcttactccaagataggtaaacgcctttgaaacgcaacaaaaagagacgatgatcttatgagctcatttatgttcatgcgtgaaagtgtgaaggtcactagctttgctgtgtttctacaagtttccttgactgtaaaaacagtcaaaatgtaaccaacctaattcaagatgttaaattaattaagttaaataaaattagccaaagcactgtaaattaaatgacataatacttaagttctgtactgatgacaccctttgatcaaaagaaggtggacccantaaggtgcttctggaggttattacttctctaattccgaatttatcatcactgactctttaggcataataaaatgtagagtgtaaataggttggtgacaatttatttaatttaggttgagctacttataaatacctgagagctctggaaacaacatatatatccatcttgcaaatatcagtaaaaagaacaagt

SEQ ID NO: 61055 - DNA, 497 bp, Homo Sapiens
tttttttttttttacaagttgcttgtttccattcaacaatatattaaccatgtctctacatacagaagtaactcatttttcttttttctttttcttttctttttaatggcctgcgacacagccccaggaaatcctgagaacatgtgccccagtaactcctttttcttaactgctgtgtagtttgtttagctattccttactgttggagatttagggtgtttccagttttgtgctgttacaaacagtgttgtaatgaatagctctgtaatgtcaccctatgcataagtatggtgactgtttctctataataaatggtgagaagtggaactctgtgtcaaaaaacactaagtttataagtataacacatactattaaattggccttgctagttttgtggtatagttgttatagttaataacagtaatatatgtgaccatcagtttcacatattagtgtcctttaaaactctaggacatctcattgacttaaaactcatg

SEQ ID NO: 61056 - DNA, 480 bp, Homo Sapiens
ttttttttttaaggtaaaaaaaaaatacaccttcagtttcctggtgtgatcctggttaaaatggatgatttttcattgaaagttttgctgattaacaattaaagtgggatgatatgtggacaaaatcacttatgaaagtagaagcaagaatcagttggtttgctaccacataaagccatgctgtttttggtcaaactgtgtaaactggaaaaattcacatcatttctgagtttaatcactttaggatatattcacattgttttggtgaatttgctgaattgaattgtttttctttctcaaatctgtgatctcttttctttatcctgtttctttgttcctttcgtttgctttcttatttttcttttgttccattcttttcttacttttttcccttttccttttttggggaggctggctagtagtgtgtgagaaaagaatagaaagtgaatttgcataatgaatgtaaaagggaaataaagt

SEQ ID NO: 61057 - DNA, 550 bp, Homo Sapiens
tttttaaccattcattcaacatttattgtggcagtttagatttaaataactttatatcaagggctgtatgattctgaaacaaataattaaaaatcccggaaagtcttttctcctgaacacatttaagaaactagaaatcactttgggtatgatttgtttagaagcaggaagatgaaaagggtagcctgtagaagaccttgccaccccaagaaatcactgatcttattgcttggtccttgggggactcactctccttctgtgccaggacacgggtacctgcctctttttttccctagatcattggaggtatcgaccactcgctgtacacaggcagtctctggtatacacccatccggcgggagtggtattatgaggtcatcattgtgcgggtggagatcaatggacaggatctgaaaatggactgcaaggaggtaataaaaccaagggagagcctgggaacataagggggtaggcagtacaatgtgaaggaagactctggttatcatgttgggaggatgaggcagaggtaataggacctgcagaaagggtt

SEQ ID NO: 61058 - DNA, 607 bp, Homo Sapiens
aaatacatctttattgtctgaattttttacataagaatatatcattttataaattaaaataaaatttcaaactaagtggtaagagttttaaaatctctaaactgtatagatgatagagagagaaagatctagattggtccatagttatatctaagatacatttactgaaagttgacactataggatttggctgacatgacaagaagaacatgaagaaaattatccttttaggattaaaagaaaaaagcaactaatttcgaatcatctaggtaaagtgaattaatataccttgatggaagtccacaccaatttcaaattggctggtacttcatctgccctctcttctttgctaattggcaatttgctaaggatgaacaagacacaagatgccttttatcagcaggaaatttcacctacccttttcaggaactgcctcaaataaggtttcaaccaatttagcactgccctcaaagaagcctgaagctgggagatctgaggtttttggacacaccaacaaatacaaaaggagagaaatggtctccagtcacagaaccccgccttcattcaagatcaagtctgagctggcaaacttaatggttggaacctc

SEQ ID NO: 61059 - DNA, 567 bp, Homo Sapiens
ttttagttcgtaaatatctttattcattcaaatcatggcaagaaactccttcaggaacacaggagatagtggtaccaaaaacagataaccacgcaaactatgcaaacttggaaaagtgcattgctttgtcaaagttcattaagtaggtcttaatattttagcaaaagaaaatcttccatctgaacacagggcatgacaaagctcatttcacacaatggaaggaaggctttttttcttgtttcatgtttgtatgtttctgacactgcagtattaacattttaaattgaatctttaaatgatttttctgatgtcaacaacattattgggaaggccaagctcggtagatgaccttaactgaggtggttacagcattgttcccggtaattcggctttgtgatatatccttcttctcctaggtattaaggtctggtttgaattaaagtccgcagcatactcacagctgtggggagtaactgaaaggacttgttttcatctgatggccaaaagactttcttgtaacatacagtttgtacatttaattacttacttgttgggcatttattgacc

SEQ ID NO: 61060 - DNA, 4685 bp, Homo Sapiens
ccggcagtggcttactcccggtgccaggttcttggagctgtgaggaggaacaaccatgtcatcagaatcgagcaaaaaacggaagcccaaagtgatccgaagcgatggagccccagctgaaggaaagcggaatcgatctgacaccgagcaggaaggtaaatactacagtgaggaggccgaggtggatctgcgggaccctggcagagactatgagttatacaagtacacctgccaggagctacagaggctgatggctgagatccaagacctgaagagcaggggtggcaaggatgtggcaatagaaatagaagaacggaggatccagagctgtgtgcatttcatgactctaaagaagcttaaccgattagcccacatcaggttgaagaaaggaagagatcagacccacgaggctaagcagaaagtagatgcctatcatctgcagctccagaacctgttgtatgaggtgatgcacctacagaaggagatcaccaaatgtttggagtttaagtcaaagcatgaagaaattgatctggtcagtttagaggagttttataaggaggctccaccagatatcagcaaggccgaagtcaccatgggagaccctcaccagcaaacactggcacgtctggactgggagctggagcagcggaaaaggctggcagagaagtaccgagagtgcctatctaacaaggagaagattctcaaggagattgaggtgaagaaggagtacctgagcagcctccagccccgcctcaacagcatcatgcaggcttcccttccggtgcaggagtacctgtttatgccattcgaccaggctcacaagcagtatgagacagccagacacctgccgcctcccctctatgtcctctttgttcaggccactgcgtatgggcaggcctgtgataagacgttatctgtggcaatcgaaggcagtgtggatgaagccaaggctctgttcaaacctccagaggactcccaagatgacgagagtgactcagatgccgaggaggagcagactacgaagcgccggagacccacactgggggttcagttggacgacaaacgcaaggagatgctgaagaggcacccactgtctgtcatgctcgacctgaagtgcaaagatgacagtgtgcttcacctgactttctactacctcatgaacctcaacatcatgacagtaaaagccaaagtgacaactgccatggagctgatcacccccatcagtgcaggtgacttgctgtctcctgactcagtcctgagttgcttgtatcctggggatcatggaaagaaaactccgaatccagccaatcagtatcagtttgataaagttggcatcctgactttgagcgactatgtacttgagctaggtcacccctatttgtgggtgcagaagctgggtggcctccacttccccaaagagcagccccagcaaacagtgattgctgaccactcgctgagcgccagccacatggagaccaccatgaaacttctgaagaccagggtgcagtcccgcctggccctccacaaacagtttgcatccctagaacatggcattgtgccagttaccagtgattgccagtacctcttccctgccaaggttgtctctcgcctggtgaaatgggtgacaattgcccatgaggattacatggagctgcacttcaccaaagacattgtggatgcgggactggctggggacaccaatctctactacatggcgctcatcgaaaggggcacagccaaactgcaggccgctgtggtgttgaaccctggctactcctccatcccacctgttttccagctctgtttgaactggaaaggggagaaaaccaacagcaacgatgacaacattcgggccatggagggcgaagtcaatgtgtgctacaaggagctgtgtggcccttggcccagccaccagctgttgaccaaccagctgcagcggctgtgtgtgctgctggatgtttacctggagaccgagagccatgacgacagtgtggaggggcccaaggaatttccccaggagaagatgtgtctgcggctcttcaggggtcctagcaggatgaagccatttaaatacaaccatcctcagggattcttcagccatcgctgatctcccgcgcagaccgttgtttcccccaaggcctcaccctgagcactgggcttctgctttctgctctggcccacatgtgactcttgatattctccaaagacaccagccaattaaaaagcgtcacctgaccagtggcctttgtctgtggttcctggcaaggtggctttgcagtctggaagggcaggtgggagctgtgacacagtgtgaaaaagcatttgtagagagactttttctcagcagccaataaaagcagagtggaaaaagattccaattctgcagagagatgctcacctcttgtctacgcacaccctatttgtgctttgcggggtgaggtcctcatgatcttgtatttattatcccaagttcctgctgttaagaggtggtaggagaagccaaaggcagcagagcacaaaaagcaaaactcttccctccccacccgctcttcccattagtcctgtcagggttgccgatggacaaattgtctctgatcgttggatgttataaatgtctgacagtgcagtgcaaacagaagacaaactcagttgatccttgaacaactcaggggttaggggcaccaacaccccctgccctgcacagttgaaaaatccgtgtataacttttgactccctaaaaacttaactaatagcctgctgttgaccagtagtatgctattagtagttacttactgctaacatagtcagtacatattttcagtatatattttgtatcttatacactgtattcttacaatacagtaaactagagaaaagaaaatgttataaggaaagtcacaagggggcctgagtgcagtggctcacgtctgtaatcccagcactttgggaggccaaggcgggtggatcacttgaggtcaggagtttgagaccagcctggccgacatggtgaaaccctgtctctactaaaaacatggaaattagccaagcgtggtggcgcatgcctgtggtcccggttactcaggaggctgaggcagaattgcttgaacccatgaggcggaggttgcagtgagccgagatcacgctcctgcgctccggcttgggcgagagtgagactccgtctcaaaaataaataaataagaaagccataaggaagaaaatatatatctactattaagtagaagtggatcaccataaaggtcttcacatactgtctcagggttgaatagtctaaggaagaggaggggttggtcttggtgtctcagggatggcagaggcagaaaaagtgggggaggtggagggggaggcaggcaccactgttatttttattgaacaaaatctgtgcagggactcatgactgtaatcctagtactttggaaggctaaggcgggaggatcccttgaggccaggagttcgggtccggcctgggcaacgtagtgagagaccctgtatctacaaaaaatttaaaaatcagccaggtgtggtggtatgcaccagtggtcccagttactcggaaggctgaggtgggcggatgactggagtccaggagttcaaggtggcagtgagctattcatcgtgcctgtactgtactccagcctgggaaacaatgcgagtccctatctctaaaaaattttaaaaaaagaaatctgcatataatagacccacagagtccaaactattgttcagagatcaactgtacttcacagagagtaattctaagtcttacaggatttcatggagatggcgagagtggtgttggagaatcaatcacatacagagatacaggacagtgagaccaggtaacatttgaggagaatattttttttttattgagacggggtcttgctctgttgtccaggctggagtgcagtggcacgaacacggctcactgccgcctcaacctctcctgggttcaggtgatcctcctgcctcagcctcccgagtggctgggaccgcaggtgtgtgccaccatttctggctagtttttggattttttgtagaggcgggatcccactatttttcccaggctggtctcgaactcctgggctcgggtgatcctcccacctcggcctcccaaagtgctaggattataggcatgagccaccacacccggcctgagtagagtctttaaggtaatgacaaaagtgcctcaaaatataattatttgattaagagaagtcttgggaagataggtaacaacctttaaaatgttcataaaattacatcctttgtaatactcctgcaagtcaaagtaaaggatggcatagactattcttggacagttttgtcaaaaagtgtatcttgaccccaccatcagtactccattcttcattttaaaaaataagatgggctgggcacagtggcttacgcctttaatatcagtactttgggaggctggtgggcggatcgcctgagatcaggagttcgagaccggcctggccaacatggtgaaaccccgtctctactaaaagtgcagaaattggctgggcatggtggtgcgcgcctgtggtcccagccgctcgggaggctgaggcaggagaattgcttgaatccccgaggcggaggttgcactgagccgagatggtgccactgcaccatctggacaacagagcaagactccgtcttgg

SEQ ID NO: 61061 - DNA, 692 bp, Homo Sapiens
  misc_feature (357)..(357): n is a, c, g, or t
  misc_feature (407)..(407): n is a, c, g, or t
  misc_feature (426)..(426): n is a, c, g, or t
  misc_feature (454)..(454): n is a, c, g, or t
tttttttttttttgacatattacataacattctttattttacaagtatttattgaaggcttattattggtcatatatcgtgtaatacatagggaatcaaatggttagtaagatggagttgatccttgccctaatgaagtttaaagaccagagaggaatacaaacaggcaattatgacacagaatactaagccttattatattcagggatcttctgacacatgtatctgcaattttgtactcactgaatcttctcttccataataaaagcatgttgatgcaaaattactcagataaaagaactcattagtaatttttaaaattccatattaaatatatatacatatatattttaaatnttttaaagtccagggtacatgtgtacgatgtgcaggtttcttacatagantaacatgtgccatggtggnttcctgcacctatcaactcatcacctangtattaacccatttatgccagaagttgcaaatttgttgattgtgaaaatcagaccttgggcatgacctgagcaggatattaagacttcacatgctaacattccaaaaatggacactagcataaatggttagcccacatgctttactattttctaatgtcttcttagttgaccccacccctgactgcccaagggggtattccctcctggcccagtgttattgtcaactccactataggg

SEQ ID NO: 61062 - DNA, 599 bp, Homo Sapiens
ttttccctaaatggtatggccgaaagttagagttaaaatatatatagttagattccaacttcctccttcactctaaaaatagaatccaaacccactcttcatatatgcttccagaatggggcttaagtaccaatctctgctttgcaatgggcacaatcttggtcatgtcctgaggctctctaagaaaagagaggatctaggatgggagagctagaaagttgctaactgggaagaacaaggccctgagggcttggtctaccaatctgggaagatttgaaaacaaacttctcgcaactgaaggaaggctgaaggctgctgcaagtcattgagtgactttaggatgagcaaaacattgggccacttcctaatgccctatgtgtatagtaccagaagcaaggtctcagacttaacagacccagctctgttccaaggtgagtctgaaccaatagaaagcaaacatgtgcagatatccaaacaagactgctcatgcaagtcggggctggctacccgtcttaggcagcaacagcagagctccagggagcttattcaatatttactgagacttcgaagacccagcagatgtttaatgaagtcactat

SEQ ID NO: 61063 - DNA, 588 bp, Homo Sapiens
tttttttttttttttttaatcaataaataggtagtttattaaccatattaataacaatgatgggtcaaataatcggagattcagcccatctgggaagtacggatgaaaatgaaaggagtccttttttttcttcccctccctccctcatcctcataggtttttatatctaaattatgtgagagtgattcatacacacacccattatgaatcagtaagagaaataacttcaagacctttgctagtgatgaaagtgcaagttaagctcattaagccttagtggttatgatgtcagctgaccacagtaaggagagaatgtctggttgaatttttacacctaaagtcaaagttcaagaaaaccagctaagattcagcttaaaaagcagtgacgaaaaacagccaacacccacataaaaacagatacacacattctgtatgctttgtccccacccttcttttctttagcctcaatctgagaatctgccatgcaacacaggtagaaagaattataagagattcaaggaaaaggtcacaaggccaggaagcctcctaggttccctgaaatcgtgggcaaaggcctcgtgccgaatt

SEQ ID NO: 61064 - DNA, 650 bp, Homo Sapiens
  misc_feature (487)..(487): n is a, c, g, or t
ttggttttttggtttttttttttttcctctgatcacattcttcaaagacggagtattctttacctcaggtttactggacaaaatcaataactacaaaaggcaatgattcacgcttttgttttcataatacctcacaaccgtacagtttctgcttgggagcccattcgcatgaggaatacagaagcagtgtgagcagggctgactccctctcaggtggaaggcagggcggtctcactcccagggacctttttggtcatggaggccatcgggctcccagttagaccctggtatcctcatcatgatggaaaaaatacattgaaccaagggatcctccctccccttcaaggcagacgttcagtacaaacatttatgcggtaggctcagatgttgtaatttgcacttaggtaccaggtgtcaggaaacagactaaaaagaattccaccaggctgtttggagatcctcatcttggagctttttcaaaagcggngcttcatctgcaaagggccctttcatcttgaagtttttcccctccgtctttcccctcccctggcatggacaccttgtgtttaggatcatctctgcaagtttcctaggtctgaatctgcgagtagatgaacctgcaccaagcaacgtttatggtgctttcttct

SEQ ID NO: 61065 - DNA, 599 bp, Homo Sapiens
  misc_feature (385)..(385): n is a, c, g, or t
  misc_feature (424)..(424): n is a, c, g, or t
  misc_feature (497)..(497): n is a, c, g, or t
  misc_feature (517)..(517): n is a, c, g, or t
  misc_feature (554)..(554): n is a, c, g, or t
agaacggactcagctaagtttattatattctccccggagagggaaaacacaaaacaaggcacaaaggcagaaggtgcagatgtagcacaacgatgagttaagattccgcacgcaggtaacaaggagggtatggtatatctctgccagaggtactggaaggtttcaaaggcagaaaaaaatgtgttccggacacctggacgcagaattggaggcatgacaggaacacagggaggcccatctaagttgcctattcacccaggtgacctctctttcatttctttaattgtccttttaacaatatggggaatttcacccaaggaaagggtcctcttctcgccccagcaggcaaggggtgttcctccagcgcaagttccggccccagctncccccacgtcccacaggtctcctgccttttggcacgcanacttcctgaccactcgctggtttccggatccctactctgatcctctccccatgcatctctgcctccttagacnactgagaattttattggtcnggtttccttgccagacttgtaagttccacgagggcanggctcggtccaatttaattaccactaatccccagtatagagcaga

SEQ ID NO: 61066 - DNA, 530 bp, Homo Sapiens
tgcttgtagcccgtgtcatgttagttgctgctgccttctttccttttgtgaggttcccaatgtttcgtccagaaaagtactttatttatgcaagtcaggtgactcttaggccacaaaaccatttgatgataaacagattatcattaggtgcatatcttattgatattttgtgaaatgttatgcctatgttgcaaaagttgaatagttttgtctttatatattgctgtcttcagtgtacagcatggttttacttaattgaatgttaatgtttaatattttcttcttatagaagagatcatgcccttttgtatgacatgttttaataaatgttatctgtcaactttgtaaaagttttgtttttcactatgagtagatgaccacatcttgtttgactctgggttttgccacctgagaatacagttatatggtggcgttttggtaagtaaatgccaaataatctgatccaatgggcagtgagtgactgccaggcaggcatttatagtaatattttagacccccactggcccctt

SEQ ID NO: 61067 - DNA, 4080 bp, Homo Sapiens; identical to SEQ ID NO: 23177

SEQ ID NO: 61068 - DNA, 518 bp, Homo Sapiens
ttttttaagtacaaaatttattgcggtaaagagattaaaactatttcttatgtaaaccaaaatcaacatttgtttcacttgactaccagtagttggaaaaactatctattacaaatgcaaattctggacaaaagaccaatgatggtccttgttcaagtcagtaaatgtgctcagaccaccagggagaatttcaggataactgtcttagtagagagatagaaagagatgacaagaggaataataaattacattactaataaatgatcacttccctattggacaaccatgagtgaccttcatatctttatgccctcaatgccaaggattcaaataacagattcccaaattcatgcttcatggacaaggatttccttttatgaagcttcttatgcatttttcaggatatacttaatctatgcattcagcaatgatggagaagatgaggccacagaggaggctccatcccatctggaccaccctcttcctctttgaaagatgtacatccttctcaccaactg

SEQ ID NO: 61069 - DNA, 550 bp, Homo Sapiens
ttttttgtcaagagccaagacacaggtaatgcacgacattgattgctgcattttaccttcaaaatatttgtccttattgactgggtctccttaattaatgtacacatgtcattagaatgcagacggaggggactcaccatgaatatctggggttgattcccagatgtgtgttgcttctctattgcaagcagattccctgttggatttacttcggatttattcccttttaaagaatttttgcccatatctggaagggcactatatttttgggaggagccatagattcctggttatcctatttttaaacaaaatgtagacaaagtgaactctattttgattattgagaaaggagtagttttctatccctctaagagtatacttgaatcagacattttaaggatgtcactatggcactgttgtcatttccaaattcctagaaaagtttgttttactttgtttttattctgttaatgcattctttcttctctttacttcctttcttaccagtacactcctatctcaactctgtttatttgatgagttctgtccc

SEQ ID NO: 61070 - DNA, 338 bp, Homo Sapiens
  misc_feature (2)..(2): n is a, c, g, or t
cnggacacagagcaagactctgtctcaagataaaataaaataaacttgaaagaattattgcccgactgaggctcacatgccaaaggaaaatctggttctcccctgagctggcctccgtgtgtttccttatcatggtggtcaattggaggtgttaatttgaatggattaaggaacacctagaacactggtaaggcattatttctgggacattatttctgggcatgtcttcgagggtgtttccagaggggattggcatgcgatcgggtggactgagtggaaaagacctacccttaatttgggggggcaccgtccgacagactggggagcaagatagaaga

SEQ ID NO: 61071 - DNA, 1330 bp, Homo Sapiens
ggaaaagtagcctaaagtcagtataactaaagggtggaacgaggtgggacaaggtccggaattgctgctcagtgatgtgtgtgtgcctgccgctggtggagctgagactgctcatctcagaaggatggggatgcttgatttcctggccaggttgtcccagcacagtggggattggccctgttgtatgacgaagacagcacatggtggcagagatagatactaacccatggactttccaagggagggaataggtctttggagggtatgcaagacaaaggtagacactggataaagaacccggtagtgcccaggtattaccccatctgggccattactcccacactcaggaaccagacgttgtgggtgaggacatgctgtccctcctgccaagtaataacttccttcccagccaggatcctgccccaagtaggaatatagctctgcatttacagcagctcctgctcagaccttgtcaaaaccaccctgcagcttaggattaaggagcatggtcacaggaaggtggggtttcagggcatcccctcaggaactgcccatctccccagaattccaaaatgaaggtccatatgcttgtaggtgtgctggtcatggtgggcttcacagtaggaaagggtaagtggggcccaggggcagggagggaggaaggggtaactgagtccaggaagggggtggagcgtggccatggataatcgggcttcctactggcccagggtatttgagagtgacccagtgcctccatccctccttctgcctccccagttcctgttcccgacatccggacgtgccacttctgcctcgtagaagacccttctgtaggatgcatttcaggctcagagaagtgtaccatcagcagctcatccctgtgcatggtgatcaccatctattatgatgtcaaggttcgcttcatcgttcgaggctgtggacagtacatttcctaccgctgccaagaaaaacgcaacacctactttgcagagtactggtatcaggcccagtgctgtcagtacgattattgcaactcctggtcaagcccccaactccagagctctctgccggagccccatgacaggcccctggccctgcctctgtctgactcccagattcagtggttctaccaggccctgaacctctccctgcccctccccaatttccatgctgggacggagcctgatggcctggaccccatggtcacactgtccctgaacctgggcttgtcttttgctgagctgcgccgcatgtacttgttcctcaatagttcaggacttttggttcttccccaggctggactcttgacacctcacccttcctgaattcc

SEQ ID NO: 61072 - DNA, 3103 bp, Homo Sapiens
cgggccggggccaaggcagggagggatcttaggagagatcgtaggacatctgaagagctgccatgtctggggcatcttcctcagaacagaacaacaacagctatgaaaccaaaaccccaaatcttcgaatgtcagagaagaaatgttcatgggcctcctacatgaccaactccccgactctgatcgttatgattggtttgccagcccggggtaaaacctacgtgtccaagaaactaacacgctacctcaactggattggagtccccaccaaagtgtttaatcttggggtgtatcggcgtgaagcagtcaagtcctataagtcctacgacttctttcggcatgacaatgaggaggccatgaagatccgcaaacagtgtgctctggtggcgctggaagatgttaaggcgtatctcactgaggagaatggtcagattgcggtgtttgatgccaccaatacaacccgggagaggagggacatgattttgaactttgctgaacagaattccttcaaggtattctttgtggaatccgtctgtgatgatcctgatgtcattgctgccaatattctggaggttaaggtatcaagccctgactatcctgaaaggaacagagagaacgtgatggaggacttcctgaagagaattgaatgctacaaagttacctaccgacctcttgacccagacaactatgacaaggatctttctttcatcaaggtgataaacgtgggccagcgatttttagtcaacagagtccaggactacatccagagcaagatagtctactacctcatgaatatccacgtccagcctcgcaccatttacctttgccggcatggagaaagcgagttcaatctcttggggaagattgggggtgactctggcctctcggtgcggggaaagcagtttgcccaagctctaaggaaatttctggaggaacaggaaataacagacctcaaagtgtggacaagccagttgaagaggaccatacagactgctgaatctctcggggtgccctatgagcagtggaagattctgaatgagattgatgctggtgtgtgtgaagagatgacctatgcagagattgagaaacggtacccagaagagtttgcacttcgagatcaagagaagtatctgtatcgatatcctggtggggagtcataccaggacctggtgcagcggctggagcctgtcatcatggagctggaacgtcagggcaatgtcctcgtcatctcccaccaggctgtcatgcgctgcctcctggcctacttcttggataagggcgcagatgagctaccatacttgagatgccctctccataccatcttcaaacttactcctgtggcctatgggtgcaaagtggaaacaattaaacttaacgtggaggctgtgaacacgcaccgtgacaagccaactgcagcagagaccacactggctgtgcgcagacgcccctccgcagcgtccctcatgttgccttgctaatgatgtggatgttcaggcctcacctctccaaacgactgggatctactgaaaagcttgggatgtcagcttcacagaggctagaacaggaagttaagtgggaactggactttgggggccaccaaaacgaggcctggagaaacgtcaccatatttcctcccctcctgcctaatgggaatatcagttacactgaaaaatttaacttccctgtgcctcaaaacatttagcaacctgaaccagtgactttttgtcatctctgtgctgagtttggtccaagttggtcaatctcattctgtataggcatttaacatcctacctgtgactgtctgcatcctttgctggctcttttttgcccaaagtgcaaatgcacttcttcagatttacttttcaagtgagaaggtaagagctggtctctgccactgttccaggcgagcaggctagagtctaatatacttatgctagcagttaccatttgccacattggaagcaagagacaaatcaccaggtgaatggagggtcttctgagaaattcagtccctaaaacatcttctctgccttgatagaagaacagtgtcagtggcaaccttttcatttagagaagtttttcttgttccaggcccttcaggacaggatctgactgcaagactccccaaaatgggtacccatcttttaagttcccttttgtagctactgtacttttgacttgatgcatgtgcctctcatgcatcaagatggggctgatgtggttctcctgggtggttgggaatgtggactagacagaaaagtagagtgccatttatatcgcgtgagtaagtcaagaaagctccttgagaatcagcccgatcagggagtgttttggcttcagaacaggtggaaggagacacgcccctctgtgggctctgtcaccatgatacagtccttgagagagctgtggctgtgacttggagggcagtagtctcctgatacctgcctcttggccactggtcactattgtggtcactgatctctcatataaaagtgagggtggcggggtcatggaccagcgcctcagtgcattagtcattcgcttttccttacagacaaatcagataactcttccccagtgattgtcaaatgtatgaatgtatctctgtaaatgtggttttgacatgtcactgttactgaaggagagtatggaatccccacaggatattatatcttgcaaggaaagtctatttttttaaagaatagtatgtttttagctttacttttctttcttttccttttcactcaaatgctcacttgctgggcaaaagggtgagtagcaagaaaagtaatgatatgtagcttttctcaaatggttcttttatactgtggatgatacaggactctgttacctaagatgtgataagctgggctgcaggcggttcagcatccagcaactaggagctgcttttctacgtacaaagctgccttcaggaaggctccttaccctgtagcagatgattttcatctggctgcctaccgcatgctgtactataatgatttagttgtgatatggatttctctctgcatcgaaaactgtcttttgatgatcagacaatgtttatatttagttatttattctatccatgtaaggcatttttgag

SEQ ID NO: 61073 - DNA, 384 bp, Homo Sapiens
  misc_feature (353)..(353): n is a, c, g, or t
  misc_feature (358)..(358): n is a, c, g, or t
  misc_feature (379)..(379): n is a, c, g, or t
aaactaattgtggtttagaatagttttatgttcactcctgataactgagaaacagaactaaagttttccttacattgctaaatggataaacctcatattcaataaactagtaaatgtagccacttgactgattgcgtaaatcgtgttaaaacattctaaaatgttgtaaataatttaatgtgaatactgttaaacagaaaataattgcttataaaagtctaacttcacccagttaccaagtcttgggccaaattttatcttctgcctatagtttttactagcctttttaaactataatagtgagtgatcattactttatattctcgtaaggttaggaaatacttggaatgccnaattnattttggtttttaggaaagcnttatt

SEQ ID NO: 61074 - DNA, 139352 bp, Homo Sapiens
gatcaatatttatcctgttggccagaaacccatggacttctgtaaacgtccattttcaggtcagcagtttccagagtggtgccagtttcactggatgtggtgctctcttgccctccatttctggaacaggagtctaacctacacctccctcagctttactcgctgactggctggtgaactctgctagagtaggcagagcaccattaatgttgtgattgatcatgtagcttgttatgaccaaagaaatatgtatttaccactgtgcttgacacctaatcagcattcacacatgcaaatgaaatgaatttgtgaattttaagagaaaatctaaattcaatacctctactcctgggtggttttgatctacatggcatttatttgttggtttgcttttcagttccctcccctgctcttttctgtgtcactgaggggactggctcttgcaaactatatttcccaggcttctctgtcaattgttcccaggtaggttcagccactaaaaggcactagcactaaagagaagaagccaaggtatttctgcccctttctcttcttgggaggaaggggatgcatctctagcagtggctgcgtctcttctgtacttccagctcccatcatacagcccctcctccccatggccccaaatcccacctacctagctggcagaggttcccactcctaccaagtggctaatgtttctgggctccgggtaggctcatcctttctttatccttccatccctatgggcgtagcagcgcctgcagttgctaatctttgggttttctcactttcttcttttcttccctttttcaacttttctgtgtattgtttcctgtatcaaattccctctgttggcttcattttcccagctggattcctctgatggaaaatctatctcaggagccatgtacaaaaccatgatttattctaaagcctagttccgaaaggaggtatgtttgttttcccccttaattatttgagagcatttctgaaagatactctttcctatgtcttattttcctggtattttgtagtatttgaaataagattatattcagaacattaacagcaatcaaaaagctaagtctgggccaggcacagtggctcacagctgtaatcccaacacaatgggaagcgaggcaggaggatcatttaatccatgtcaaaaaaaaaaaaaaaaaaaaccaaaacctaagtatgcccaatattggaaagacgccaactgttcctaaattgatctatcgatgtgatgtaattcctgtcaaaatcctaactggttttttttttttcatgaaaatagacagttgattacaagatttgtatgaaaatgcaaagggccaaaaatggcccataccatcctaaggaaaaacaaggtgggaagacctttttcagcagacatcaagacttaatggccagacacagtggctcacacctgtaattccagcactttaggaggccgaggcaggctgattgtttgagcacaggagttcaagaccagcctgggcaacatgatgaaaccctgtctttgcaaaaaatacaaaaaattagccaggcacagtgacacatgctggtagttccagctatgctggaggctgaggtgagaggatcacttgagcctgggaggcagaggttgcagtgagctaagattgggccactgcactccagcctgggtaacagattgagatcctgtctcagaaaacaaaaaacaaaaaaacaaaaaaaaaaacaaaaaaagaagacttattaaaaattaagaagatatggtgatagagaaagtgtggtgctgcttccaggaacaaatagttcagtgatatggaatggaccaatgttctggaagagtctggcaacttacctatggactgtagatatttttttcaaagtgacattgcagagcagttgggaaaggatggtcacttcaataaaaatttccagcacaactgggtgataatatgctaaaaaatgtggctggggacagttgttcatgcctgtaatcccagcactttgggaggccgaggtgggcggaccacgaggtcaggagatcgagaccatcctggctaacatggtgaaaccccgtctctactaaaaatacaaaaattagctaggcgtggtggcgggcacctgtagtcccagctactcaggaggctgaggcaggagaacagcatgaacccaggaggcagtgcttgcagtgagcccagatggcaccaccgcactccagcctgggcaaccgagcgagactctgtctcaaaaaaaaaaagcttctccttatggctgttttttccatagagatctaaatgtgaaaggcaaaaatcataaaacatttgtacaatgatgaaaaatttaaaaagaaagctaagtctgaatgtgggaactggctgtaggccagggttgccttttttttcttcattccaattgacaaaaataaagagatctttcctgcttcaggacttgatgagtaatgaactcagaccaagcccccagcctgagaagccacaagatgatgttaacattgtttaactccatgcttttcaagggagcaagaagagaaggaaatcactggaaagtcgagatgcagatgctcctggaaggtggtaactttaaagaattgttggcaatcagcgcatcttaaagagtattagaacccttatataatttcagctctagaggaaaaattgcttgcagatctgcagtcaaagaacagccctcactcaacagcttctttttctgtaccttctgctctacagaggttttaaacagactcttttgtgccccaaatattcttttttcaattttaaaagtatttcagatttcagaaaaatgcaaaaatagtaaaaaaaattcccttatacctttctcctcaattccctgaatgttaacattttgccatacttaccttagcattctctttttctctatctttatatttttttctaaaaatgtgaaaggaagttgtacatatgatacccttttacacctagtcacttcaagatgtgtttcctaaaaacagggacattttcttacataatcacagtacaattttctttctctctctctttctttgtttttcttttcttttttttctttctttctttctttcttttttttttttttttttttgtatttttggtagagacatggtttcaccatgtttcccaggctggtcttgaactcctgagctcaggcgatccactcgcctcagtcttccaaagtgttgggattacaggcgtgagcttccacacccggcacacagtacaactttcaaaatcaggaaatcaacactaatacaatacaatacaatacaatacaatacaatacaatacaatacaatacaatacaatacaatacaatacagtaacctatagatcttattcaacatttatccattgttccactaatatcctttttaagtccattcttttaactgttctgtggctgtggtcttggtgaaatactttccagctttttcaggaagatgtagccattcattcagcacatacaaaaagaatttgaacctcattaattttcaagaaaagtaaactgaaacctcgcttgagctgtgcatgcagacatcttcattccctgaatgaagagaacccagtgaagtctcactccgttccacaaagcctgtgttattcctattctgtgcaggtcacctgcctgctgctgcttcccgattcctcattaggctgagggaacccacatcaaaaatatcctggaagatgctttcgtctttttctcacacatcataacaaaaatactttactgtctcaatttgaaagcaagagaggatgcacagggtttgtagcatcgactatttcttactagcaggttattacacgacccacccctgagactaaggctgtgttgtaaaggagtaaagaccaaagggtaacaacctgaatgaatgctcattagaaaaggaactggttaaatacattctattgtatccattcaatgtaatacatcattcaaaagaagatgcagctgtatatgttccaaaataagtcaaacctaaattataggagtagtaaagttgtgttgactgaaagaggaattgaggaacttgagatttggaaataaagggagaagggagacttttatagtaaatccttttgtaccgtctgattttttttttaaaccatgtgtatatgttatgtattcagagagggaggaggaagagagacagagaatcatgaataggagatataatcatggataggtagatggatatgcagacaaaaagaaaagtttgagagaacagcaggtcccatattctccggctgcacttttaacttttaaagctatcactgtcttttccattttccctgaccaaccatttagttctctctcggtagcaggagtgttttcctcagctaggtcgaggagacacaaacagacctcgtcacgcacacatctcagcacacaggcatatagtctcaaacacacggttttagatttgatggtgtgtggggggagatggggagcaggctgaggcactcgaagcgggacctcccgcctcccctaccatctcagatctgcactactcccctcggccgtccattctttggcccgcctttcccccacccccgctccagaccctgcacaccaggcgactggactggcgtaaatttccgcccatttgcgtcgccgcctgggggtgctgcttcgtgacgtcagggctgagctagggggcgcccgctcctggctgcccgctcctcccggccctgcggcccccgcctgccctttaaaagagcggggcctgcgccggccgcgccacaccgcggggaccaggaggcacgctggttttccggggccgctccatcgcgccttcctcctgcgcctcgcttctccggtccagccgccatcttcctttccgcacaggggccgccgagcggggccatgcagccaacgctgcttctcagcctcctgggagccgtggggctggcgggtgagtgggcgcggcgggccggtcagcaccgcggacagcgccagcctcgctcttccccgccgctcccgcagccaggctggcggatcccgggagagagggagggttgaggggaaggtttacctcttgcttcgtttcttctcctccctgggtgttttccttcagctcctcccacccgtttgacttggaaaaagctagagggcttcctagcccaaccaggggagcctcagtctttctgtatctgagttttcctctagataggaaggaagaaaacgtgccatacctgcaaggaaacctcacattttgtattcgcttctaagatgtcacactctctctgcccgtctagagagattctgttgtctgattctgtatctgtttggctttttaaagccaggcgactacagagaggcaggaatacatgtatgatgctatttagtgcctgcataatttcccttattattgttattgtcatgtaagtatgatgagataaaagtgagtcccatatatatataagatatatcccttttcttaacatgtccatatataatgtgtgtgtatgtgtgctcatgtatgtacaagtttaatataatatgttcctctattttgtatttccatctctagggacaggtaatttctaatttcacactcaaaggaattatttttttttaacctgtgaaagcctcagcagtcctgagaacatgtgctcctcattttttagttatgaatggaaaccgcagtattttgacttctgtactccaggaaaattattagagtacaaaataaccacaaaagttcctttggagtagtaaaaaaaaaaatgttttagccaatttaggaggattgaattttaagtagtagatatttgactgtttcccttttgtagggaagattgtaggattaatctttcaaactaccctgaatctcaaacaaatgatctctgaagatctgaagtgtgtgtgtgtgcatgtgtgtgtgtgtgttgaagtcgagtcacctaccggtattgagatattgagactattgagaagtaagtatactagcaccaaattaaactacaggttttcttcagctgttttaatgatttagaaaattgtccatatctgagattgagactcctacctagaattgagatactgccatccatgaatatgaagcttttattggcagcaattactagatccaaaaggtagaaacaaaatgaaagccagtcgtaattaattttattgtaagctatatacattcagaatttgctaaaattcttgtcattctcacaaattgtcaataaatgttctcaatttcattaaagaaaatcaaatgaatatttataattatttctggtcaaaatactttcagaaaagaattgctttgcttaggaggctgtagaccacaaaaacagtgacatttgtgggaatgatttaactattgtggtacaatacttacagatctcttatgtaacagaatattttaaataaaagtttatattttaatagcagctaaaatgaagacataatctttttaaaaattgagcttaatttgtatatcatataatccacgcttttaaattatatagttcagtggtttttggtatattcgcagattgtgcaactattaccactatcaaatttcagaacattttcatcaccccagaaagataccacaaacccattagcaagcacctctccattcccacctccccacagcctctggcaatgagacatgttagacttcaagtagagctggtaatttgcaaaattacagggctgggggaagcctcaagaaaccatctagctcattcacttatccttaagaacttctgaaagatatgcacaaccttctatggaagctattgtgcactctaaaaattaatataagggaagtagtaaaatgatatccatattattctaggtaaaatggtttctttatctttctttttcttttcttttcttttctttttttttttttttttttgagacagagtcttgctctgttggccaggctggagtgcggtggtgcaatctcagctcactgcaacctccatctcccgggctcaagcaattgtcttgcttcagcctcccgagtagctgggattacaggtgtgtgtcaccacgcccagctaatttttttgtatatttagtagagatgaggtttcactatgttggccaggctggtctcgaactcctgacctcaggtaatccgccagcctcggactcccaaagtgttgagattacaggcatgagccactgcacccggccgggaaaatggtttctaaattcagaagagcttatttaacttattttacagttatattttcaatccagtatcaaaccttaacagtattagatattaatacatcagaagttgctctcagatttaccagattatttgataatttttctaccatttgattgctttacttttaacacgagcagtaggttttctttttttttcgtatatacctacagagagcattagattttctgttgtgccacctgaatcttactgtatgcaaaagtaagttgaactactttaaggatgacaacatgcctttggctattaccttgttgtcacaaattttaccggaaaaatacagaagcacctagatgtctcaccaagatgtataatgtatgttcaaaagcagaccctagtttttttttccatcaaaaagagatctgaagagcctcagtcagagaaacaacggtttcataaatacaaacctaagctacaagttgtctagagtaataaaagaaaaatctttctctgcccccaaatctggtaactattaatacttcagcaataccagtagttaataaaaacatctattttacatttgtaaaaaaaaagggaaagtattagcaagaaactgcattatcaagaaggcttagtaaagctgcattttttaaaagtcatctgatttattaggggagttattctctcgcagtcatttatttgcagaagatattacagatttccagcggaaagagaaagtgctgaaatgggtgtgttctcaagtagccatttggaggatgaaagaacagttgagtatattggaccttgggtaccaaaagtgggccaactggatcttgcctgataagcatttcaggaggaacttggggtcttcatagcataactttgggcttcttgaaacagttgaagtgatcccagatcatgctttgaaaagaaaaatttggtaaagtaagtaaatgaataggtgttttatttccaggttgagccccatgatatgtaattgatagggggtggggaatgtttaaagaggcttagagcaaagcattttgcaaggaaaggtcaggttgctgcatttgaatagctttcatgtctgatgtctgagaacttgccccagctagctctactctcttctcagggacttagaagaattttctgcactagcgtctcctgctcagttgcctgctacaggaatgccaggagaactgtagagatggacttacatgtaaatgctttgggctgttctaatagaaagggcttagaacaaagtcaaagtgaaaaaagaatcaaagcagctttgagacagaaaaaaaatggcactgaaaaattaaaattacctgaagcatttttgaagaagacaaagcaacttcaaacactgttttaagataggcggaatcccatgaaattttattgaaataaattaaaatttttcttttaaaatattcttataaaccaatggttaaacaccaatttgcataaaatattatggacttgatgctgtactaggagggttagatatctgccatgttctttacatggttgcaaacagtgtggagaaagagaaacacaatgttgatacggatgcataaacgagcttgttcaggcaaaggccttgcgggtgaaaaatgaggtaattaattatggaagacatccataaccatgtttttgtcaaggaagtaagttttgggaggatatatttttggaaacagagatacggagagagagccacagatctttacctatttggggtaggcagagaaggaccaaggagggcattcttgttttattagacttagtttggtttaaacttttttttttttgagacggagtctggccctgtcacccaggctggagtacagtggcacgatcatggctcactgcaacctccgcctcctgggttcaagcaattctcctgcctcagcctcccaggtagctggcgcgtgccaccacgcctggctaattttttgtagttttagtagagacagggttttgtcatgttagccaggttggtctcgatctcctgaccttgtgatccaccagccttggcctcccaaagtgctgggattacaagcatgagccaccgcacccagccctagcttaaacttttaattgaaataaaatatatagaaaatggaacagatcatgagtatacagcttaatacgcacacctgtgtaaccagcactgagattaaaaaatgggacatttctggttccccagaagtcccctccttgtctgtggtctagatttgatttataccggatctaaaatagcatttgtttccaaatatatttaagacattgccaggggaaaaacaacaactaatgtggggtgattttgtcagttggggtcacacagctttcaaaaaccaactcaagtcattttccattctttttctccttcaaagctgtcaattccatgccagtggataacaggaaccacaatgaaggaatggtaagttgcaatgtcaatcttagaatctagacttgtgtctagactctagattctcccagtccctattataccaaaccaaacacacgcatgacataatcttacaaagccaggttttcattgctgacagaatgtgagcaagggatgcccctcctgcactgagctcctatgtcctgtcaggatggtttagcacccctgaggatagctgtgccattggttcagaaatgggtgtttatttcccttctccagataatcccaactcagtgccttcttgcattattctgtgtagaagtttggaagatttcattctgttcctgtaaatctgtatctccgccctaagaatactgcatcagcccaggtcacgtaatcaagtcttccttgacagcagctctgggttgagtagtctgtcatccagtgataccagcttctccaacctgctttcgggtttccccccaggtgactcgctgcatcattgaggtcctctcaaatgccttgtcgaagtccagcgctccacccatcacccctgagtgccgccaagtcctgaagacgagtaagtgtcccacacggcaggcagatcttggtcactgcagtgatccttgttcctactccctccacatcaccttctactttatctacaaatgacctgggggcataatgcactaggaagagtattgattgactaggccagtatctgggagacagaagatatgactcctagttcctgctttaccacttcgcagctgtgtgactataggaaagacagtttgcctctcttttcctcaaagtaaaatgaaggagttgaactcagtgatagtctttcagatgtctatccgttcttaaattccttagttccatactttggatttttagaaccggacttcctttgggtggagggggtttgggaaatgctggtttgtgattagatgaggaggggggttatggaagtgttggacaatgacagagggagatttaaaaatcattcttctctttgccttttgctcttctgacagtgagaatcaggaagctgagaagcaagaaacttagaaaggtgacttaaaattctggcctatttacacaacaaattagctaagatattttaatgtatagcttactagaatagaaggtgccaccaaatggtaccaggagttccaggcctgagaactggaagggtttcaggtagaggcagtgcattccagtgaggcagactaatggctttctgagtccagcctgtgaagtgttctcaatatgaaaccatttctgctgaaaataaaatttgaacagtaatataagcagtacccattggaaattgacattatgaggtcaattttacaaaactatgcagtctctgttatgcatgaagccacactgattcaaacaaatccagaaaacactgccctcttcaacactgtcctctgcttttaaacttttagtcaggctgggaacagtagattttatcttattttttcacctttaaaaatctttcaggtgggcatagtggctcacacctgtaatcccagcactttgggaggccgaggcaggtggatcacctgaggtcagcagtttgagaccagcctggccaacatggtgaaaccctgtctctactaaaaatacaaaaaaaaaaaaaaaaaattagccaggcatggtggcaggcacctgtaatcccactactcaggaggccgagacaggagaattgcttgaacttgggaggcagagactgcagtgagccaagattgaactccattgaactccagcctgggcaacaagagtaagactccatctaaaaaaaaaaaaaaaaaaaaaaactctcattgccaccagcctggccaatatggtgaaaccccatctctactaaaaatacaacaactagttgggtgtggtggcgggcgcctgtaatcccagctacttgggaggctgaggcaggagaatcgctagaacctgggaagcagaggttgcagtgaactgagatcgtggcattccactccagcctggatacagcctgggtggcagagtgaggctccatcaaaaacaaaaacaaaaacaaaaaaaacaccaaataaacacctctcgctgccagacaagactctcttgctatagctatacatgagccctcatgcatgaaatggtaaaaagcaaatagtgattggccaaaagagtaacctgaggccaggcgcagtggctcacacctgtaatcccagcactttgggaggctgaggcgggcggatcacaaggtcaggagatcaagaccatcctgtctaacacagtgaaaccccatctctactaaaaatacaaaaaattagccgggcgtggtgacacacgcctgtagtcccagctactcaggaggctgaggcaggagaatcgcttgagcccaggaggtggaggttgcagtaagccgagattgccccacggcattccagcctcagtgacagagcgagtctctgtctaaaaaaaaaaaaaaaaaaaaaaaaaaaaaaaaaaagagcaacctgaattaattcaatctttgggggcttcaggtaacaatggtagctgtgggggcctgagcctttagggaccctagaaacagtggatggaagctttcctaccactcccagcccacatacctctttctgagtttctttccaacttcttttttccagcagttacaggaagtgagtaagagcagagtgggtcactaggcagagagtaaaggctgctccttttggcaaacccatcttggtatctccctttccctttctttgtttactagaccaatgcaaaagtgaggggcctgtcccatcagctcactaaagaaccacagttgcttaggaaaagttgcctatgcctgcctgccaagatcttagcccttagattatggcatagtaactctagcctctgctccagccctgattatgccctgaggtcttttggtgtctgttgagagagacgtagggaaactgggaaaaatcaaatgtatctaaggatcctggagatgttatacccagagagtgacagaatgctgagatggcgaaggtttaagagctcttctgtggttgagccttaaacaccaggcagagctagacagacaaataacacaaaagagtaaggcaggacaggaagtgactcacagactggagggcacatgccttttctgagagggagcaggtaattctcagctctaaacccgttatggagaaatacagactatgttgtcaaatcttgggatttttcaaaagaagttaaaattttgatttttaaaagacatctcctggtattttcatatcgcctctgaattcagatgtactaaaactgctgtttaggtcaaacagaatttacctctgatgcaccagtttgcaacttttatcctattctagttctctctctcttgttggcatgtcgtaaactgatcagaagactggtggagcttttgcccaactggttggatgaatgcctttatacagcctctgttccaccccacgcccatctccactcccactcctacttgcatgtctcagagtcagcatatactcactgagcaaatgagtatttggggagtaggacagaatcattgttttatggatttgagagacctcagggaagacgtagtctaatttcttcacaggtacaagaatctctttgactagggttgatctggtcatccttacagcatgacagatgcatttccctgttttcgcttgaaagtaagtgtgagcttcacagcttgattttacagcttgacagtgagtgtgtgctgctatcacagcctcttccaggcccacctgcggggcttaaagctaaatttagtaggaagagctaagcctcaggcacatgctgctcaggcagtacatatttaattgggaaaaaataaaaatacttctgttcctgacacttaagactcacaaaccagtaggcagtaggaaagggaccacagtgactcggcccctggaggctgagatcttgtctgatcagctctatttcaaccaactctcagaatgacatcagtatctgtctgtcttagtcagcttgggctgctatatcaaataccatagattggatggcttaaacaactaacatttatttttcacagttacagcagtcggaagtccaagatcagagtgtcttatgagggcccacttcctggcttgtagatggctgccttctgtcactgtatcctcatctggtggagacagaaatcatctctttctcatatctcctttcttagggcactaatcccattgtaagtgctctaccttgatgacctaattacctctcagaggcccccacctccacgtgctatcacattgaggattagggcttcaacattttggaatcacacaaacatttagtcaatagcactgcccagagccaccatgcttccctgtgcccatctggctagccatgccccaatgctatacacaccaccactggcttttaagaggcaaagagactggtgacagatgggccttctctcagatgtctggaaaaggccagggacattttcattgcctcataaacatgagaatattattatcatgccagactggactttaaacagagaggtacagagagtccactatttcttggacatttttacaaaataaataatttttttccattttgcaaatatcatttcaaaataacttatcagtgccacccaatagaaatataatgtgagccacaaatataatttcaaattttatagtaaccacatttaaaaagtaaaaagagacaggtggaaattaatttcaataatatattttatttttatccaatttttttctgatatataattttataaatctgatctatttgaaatatatattatccaatacatccaaaatattatttcaacatataatgatataaaaattgttgagattattttacattattctttattctcagaagtctgatgtgtatcttacatatatagcatgtcccagatcggaccagccacatttcaagtgctcaacagcacttgggcttatggtgcctgcagtgtagacccagagctgtcagtggccttggcttcaggcattttatctgaactctgtgacataggttgaaatccaagccctcccagctaacaactgagacaatgctaactgcctatctcctttcatggggtgcccttgagttaaggaggacttagtaaaggagctattgatatttggaaaagatggacgagaacagcattcaattaaaatatcagttataccatgtactctgactctggaaacacaaagataactcactgtgctgaagtctgtccccaacatctgagaacatgttgggtggatggaacctgagtgaagaaagaaatggccctttccactgatgtgcagttttctcaggcaagaaatgtacacccttatcaccagctactaagttatatatcacatactgctaggttgagcctacagttgattggataataaaagtctgatataaactaataatttcaaatgtttaaatcctcctttgaatcttgatatttcttattttggctagttaactatctagctggattattgttagagccattcacatagtgctaactttttaactcctacttgaagaaaatatggaaagaatggtcttggattataccatgctgagtctcaatgtctgcaaaaagaagaggttggactggattagatgaattctaagatgtttcctgcctctaaattctaatatttcataaatctatatctcgatttcagtttgatcattggtagtaccaatgagagaagctggctgggcattatgaagacataaaaatatagacagtttattaccagatttaaacacagtcaaggagctttcatagcatttactttcaaaaggaatctgagtatattcttcattaacttaaataattatccaagcaattttcagtgtcatcaggatttgtagtgattactgaggctggtgcttgtggaaccacaagcaattctgaaattatacctactcttcattttcattataggtagaaaagacgtcaaagacaaagagacaactgaaaatgaaaacacaaagtttgaagtaagattgttaagagacccagctgatgcctcggaagcccacgagtcctccagcaggggagaggcaggagccccaggggaggaggacatccaaggcccaacaaaggcagacacagagaaatgggcagagggaggcgggcacagccgagagcgagcggatgagccccagtggagcctctatccctccgacagccaagtctctgaagaagtgaagacacgccattctgagaagagccagagagaggatgaggaggaggaggagggagagaactatcaaaaaggggagcgaggggaagatagcagtgaagagaaacaccttgaagagccaggagagacacaaaacgcttttctcaatgaaagaaagcaggcttcagctataaaaaaagaggagttagtggccagatcggaaacacatgctgccgggcattctcaggagaagacacatagccgagagaagagtagccaggagagtggagaggagacagggagccaggagaatcacccccaggagtctaaaggccaaccccgaagccaggaagaatctgaggaaggtgaggaagatgccacctctgaggtggacaaacgacgcacgaggcccagacaccaccacgggaggagcaggcccgacaggtcctctcaaggagggagtcttccctctgaggaaaagggacacccccaggaggaatctgaggagtcaaacgtcagcatggccagtttaggggaaaagagggaccaccattcaacccactacagggcttcagaggaagaacctgaatatggagaagaaataaagggttatccaggcgtccaggcccctgaggacctggagtgggagcgctataggggcagaggaagtgaagaatacagggctccaagacctcagagtgaggagagttgggatgaggaggacaagagaaactaccccagcttagagcttgataagatggcacatggatatggtgaagaaagtgaggaagagaggggccttgagccgggaaagggacgccatcacagaggcaggggaggggagccacgtgcctatttcatgtctgacaccagagaagagaaaaggttcttgggtgaaggacaccaccgtgtccaagaaaaccagatggacaaggcaaggaggcatccacaaggtgcgtggaaagagctggacagaaattatctcaactacggtgaggaaggagccccagggaagtggcagcagcagggagacctgcaggacactaaagaaaacagggaggaagctaggtttcaagataaacaatatagctcccatcacacagctgaaaagaggaagagattaggggaactgttcaacccatactacgaccctctccagtggaagagcagccattttgaaagaagagacaacatgaatgacaattttctcgagggtgaggaggaaaatgagctgaccttgaacgagaagaatttcttcccagaatacaactatgactggtgggagaaaaagcccttctctgaggatgtgaactgggggtatgagaagagaaacctcgccagggtccccaagctggacctgaaaaggcaatatgacagggtggcccaactggaccagctccttcactacaggaagaagtcagctgagtttccagacttctatgattctgaggagccggtgagcacccaccaggaggcagaaaatgaaaaggacagggctgaccagacagtcctgacagaggacgaggtatggtctagggcttctgtttaaaagtacttactctggtcaatgttagcacattatgttcaagactatccgatattcacggggagaaattggtgggaattaatcactatgaaaatggtgctctagtaatggagtggaggccaccttgggggtcggtttccacctacctctagccatcgtccacatccttgtccacctcactcggttgcattgcttctcaaccttgtctgcacactggggtcacctggagagcgtgaaaaattactgtgttagagattctgtctacttagttcctagggtgctgcctgatcatcagaatattttaaagcttccagatgattgcagcgttcagccaacgttaacaactgctgttctggtatcttccccttggtcctcttattgttcatcactctctccctgaggcagggagaataggtgatagagaagtttacttgcttgcctatttagtttgctatctttattatttcatgccctactgccatcagaaatttgtatctgggagaggtaacactactggagctgaacctacccaaacaatgttttttttcctaatattgattatgtaggttggtgcttctcaaagttgaatgtacattaggatcatgagggattcctagcccccagagttcctcatttagtaggtcccaagtgagaccccaatatctgcatttctgacaagttcctggctgatgccactggtcaggggaccacactttgagagttactgaggtaggttgactaatgcagcttctaacatgcctaaaattcccctttgcactcatgctccatcaaactacagcaaaagaaattggttcgggacctcatgcctccacttttctgtattttccagaaaaaagaactcgaaaacttggctgcaatggatttggaactacagaagatagctgagaaattcagccaaaggggctgactgtcattggagcggtgggcactgttaagaagcagccatcacatgatctgtttttcaccacttcactgaaagacaccatttatctacccaagggcagaaagtagaacttactattcattaaatgtttgacacaattggaattgtctttaatttctgtcagaatgctattgaaaatgtgaattgcatgacttgtagcatattcttttctgcaaaatagacatattaacatgcttatgacaatgactgtgctactgtctttggaaaaatgtttgtctcagttggaaataataaaagattcacctgagaccaaaagcttcattgttctcagcttcttttgggcaaagagagaggtgtgtgacttttcaaatctattctttgaagtaaattgcaaaagatggccctaggatttgttgggttttggatgcataatagaataaaaaagcaaaccttttgaagtaatgtgcaggatataaagagaaatagattagaaaaagacatctactcccccatgctgagagagattacaggggcttgaagaacctgtttcaaaaacaatcataagatattactttaaaaattcctttatctaaagagctctacaagtagccagccaaagttcatttttcagggctgagaagaaagcttggataatgggaagaattccggggtgggagtgaaaacatctggattgtcaagacagatccctggcccctcagatcttgtctgatttctactccttaagaagatagaggcagctgggtgcggtggcttacagttgtaatcctagcactttgggaggcccaggcagacagatcacgaggtcaggagtttgagaccagcctggccaacatggtgaaaccccatctctaataaagatacaaaaaaaaaaagctgggcatggtggcgggcacctgtaatcccagctacttgggttgcagtgagcgcagatcaggcattgcactccagcctgggtggcagggcgagactctctcagaaaaaaaaaaaaaaaaaaaaaaaaaatatatatatatatatatatatatatatatatacatatatatatatatatatatagagagagagagagagagagagagagagagaggctaggcatggtggctcacacttgtaatctcagcactttgggaggccaaggcaggtggtttgcttgagctcaggagtttgagaccagcctgggcaacatggcgaaaccccgtctctacaaaaaatttaaaaattagccaggcatggtgttgtgcgcctatagtccctccctactcaggaggccaaggcgggaggatcacttgagccctggaagttgaggctgcattgagccgagatcgtgccactgcactccagcctaggtgacagagtaaggtcctgtctcaaaaagaaaaaaaaaggtagagcttttactctgctgactctgttactaagtagctctgactttgggcaagttacttttcctctctgaacctcaagatcatcaatgaaataagatatttgtctcattgagttgttacaaggatgatagagttgatgcaaaacagagcagtgcctggtgtatatcaacggcataggaagtgttagctgctgccgtaatcattcttgcagcttcttaggacaatacagttggacaattccccttctccctttttttacctgtcatttaattcctcacccttggtggcttctacttggttgatttctactgttttcacagttttggtaaagagttattctctggaaggtggtgcagaagagagtaagaccttctctttactctctgaaggttggataattaagtctatggaataaactgaccgtaggcagattaacaggagaaaaaaacattttaattacatgcataggcccaggagtcccacacaatagaagactcagaagggccagatgattgaagtttttatagcatcctgagctacagaagagaatagggggcttggggttcctgggggacacagttatgggaaggtagcaggaggaattgtatgataaataaaggttgtgttgttatgcagataaaatctctcaggtaatcaaagtgatccagcagccttcttttttttttttttttaaaagcttaatgaaattttattttgaaaatatggcaaaagtctaaggcacttcaaatatttaaatacatgtaggaccaaagtaaatgtgacacagtataaaggaatccataaatacagagaactacactatatttctctagaggcaaatacatagccaattcctctaacacaattcaacctttatcattagatacagaattgtgcaattattaacaaaaatatgataatgttacatgtagttcttcatgtctttaattagtatgaaatataaaagttgaaaatactgtgccaatttcatatactctttttttttaaaaaagtcatatttacatctacctagatgaaaccaaatgaaaatattttcttttgtaagtttcatagtttttgagagttctatctagcccagactgaagttactgatgatcaactttcttactttaaaataatacaagaaaaatcaacaaaactgtgctgggatggaattttggaagagctttctaatggtgccacatttggtaaatataaatatttgtggaaaaattttaaaacgtgatgccaatgagaacctgacacttctctgtggtggtggtctgggagtggagagacggaatagaaggtgcccattcaggtcaggtcaggtcacaattccctatggctgtacataacagagcagagactcaacagcaacacagagtaggttaaagtgcaccgtacgcagacagaagatggccagaaaggaggcatgtgtgcccaggctggcagtctctgcactgtgaaagcttcagtctttagccctgggctttatgcttctgtttgctggtgagctcaggcacaatgcatatacattcagtgtctgtcattccaacaggcacagttggcagcttaatggtggcattaaaatggagggctatttgcatacaatcaatcaaatgaaactctgtggcttcattccaagcctaggggtgcccggagactgagcttttgcaaagctgatgtgggcatacagaagaacagtgatgcccttgtgccccacttccagggcgatcgagagcatggtgctgccatcattgtcctgcaggtggacgttgcagcccagctgggccagcagcagcttgatgatctccatgtgcccgtgcttgctggcacaatgaggaccatggagcccttgtcgtcctggaggttgacctgagccccacaggccggcagaccatacaccatgccgatctgcacagtaactgactgcagcatgagggccatctgccccagctgactggctttgaggctcacctttcagccagagttcttccccaacctgcatgtcctctgcttccgcagctgcgagggccgccagcatgatgaaggtatagccccttgttctggtgatccacgttacacatgtgggtgtccaacagcagcttcacaatctcaaaattggagtgggacatgctgtaatggagggctgtgttgctgttgccatctgccaagttgatgacctagtagagggcatccagggaggtagcctcaaaagcagctctgtagtctcccagggtggctgcaatggctaacttctgactggacacgcagaaccccttgtgctggagggtgttcagacagaacctcatatctttgctggtcacagctttggggtcatttatattatttttcagtaagttgcaagcagacaacattttttcacttaatttatacctccctctgattttcaccttctcaggttcacgttcttgaaactgcatttcatcttccaccctggccaacttgaaaccttcaatgttaatggcatggtgccctttggccattccccaagtgtcttcatcctcgtcttcttcaagaggatactactcaatgacactcaatgacatcacactcgtcatctgactcagaagaagagctttcatctgtgtgaaaatcatcacttgaagttgttgcataacctccattaatgccaacaaactgaagattctttttcatgccatttgaatctttgttaccatctttcttcttcataatgggctccagtgtactttcattgtttgtgcatatggaggccagcggccatctggttgtctgtcaggttcactagagaccatgtcctttcctgagcggggaaggcatcctggctgctgaccagctttccttctgagatccctacctctgagcagccttcttcctgatacagatactttactaatgtagatttcctttctagatgtacatttccttgtaaaaaggacagctttttagagccattcctgtgtctgtagtttctctgaataatcagctcgaaatatgccaaagaggtatatttttgggtggcacattgtggtctcctccagtcatattttgggatggtgtgggccgagccccagcagaggcaaaaataagacttaaaatcacgtaggacttttatccatcaaggaagacctggttctcctcctcttggctaagtcaagaattgcctgtgctacttaaccagattctttttagatgaactctctgtgacatacttttccaggagcattgctgctttgtcatatggggagcccatcagtgctataaatctgatggcaaatttttctaaacctggacacacacttctagaaggtttcttgctatctctctgcctgcatttttttttttttctggccatgggattgtgactgcctgtttgtaaagggcagtgatgggggtgtgaggaggggaaggctgctggaggaggtagctcttatagtggacaaggggggttggtaaatacataccatactagttttctggggctgccataacaaatcaccacaaaacggatggcttaaaacaagagaaatttattctcttacagttttggaggccagaagtccaaaatcaaggtgctggcaaggccatgctcccttcaaagcctgtagaggaggatcattccttgcttcttcctggtttcttgcttcatccttgcttcttcattccttgcttcttccaggccttccttggcttgtggcagcagagctcccactgccacctctgtctgcacatgggcactctctccctgtgagtctgtctgttaacatggtgttcttcatcaggacaccagtcatattgaattaaggacccatcctactccagtatgacctcatcttaactaattacatctgcaaccaccctattttcaagtcaggtcacatttacatgtattaggggttgggacttcaacatgttttttttctggggacacaattcaacccataataaagcaggccagcacccacccccctcaggtggagagacactgaggcacatattctgcactgcctcccagacttcctctgtggatcatgccccaggtgccacagcagtgacctgcccaataatgcagcctttattggctgcctttaccttttccactgcccactggtgaccctgctggtgtttcctgggatcatctctcatataaactgcttgttttcaaatacttgtctcagggtttgctcctgggggaccctgacctaagaaactatccaaagtcaaggcttatattatgccaaatagtatacctgcacttgcaaccccttgtcttaatatatcctgatacaagatactgggaaatgctcagcatgtactcacatgcacagagtacaatgtctcttccttttttcctatcacagcccagcagaaaacaaaatcctttcctaaagagagattcaggggcccaaggtgaaaaatgatttactgtctataggagagaaaataaaacccagcaatacaccaaatgccagcctggcaaatctcacacacacacacacacactcacacactgggcactgctcacgaggaaagctgctggaagctagagtgcaatgcatatggcaccccccagcttccccctggcatctgccttgttgaggttctgcacattagtacatcttttcattttagtttgcaaacaccccaggggagggaaacgtgaaggtgtagatggtctatcaaagatgaaggagacatccaagagaatcccacccaatacgtgctgctcagacggtacaattaggatcttggggatgtcaccatttcttcaggaagaagtgaagaacaatctagtccactgtttttcccacttttaatcaaaataatttatgtccattgtaaaaacattaagtagtcctgaaaggcttataaatgaggattatgggttgaattttgtccccaaaatgaagaagtcttaaccactggcacccatgaatgtgaccttatttggaaatcaggtctccgcagttaagatggggtcattagagtttctagtattattggtgtccttacaagaagacggaaattcagagacaaacacacacacagaggagaataccatgtggagacagaggcagagactggagctatgcctcttcaagccaagaaatgcctgggttaccagatttttctggtacggtcaaggaaggattctgccctagaactgtcagagggaacactgcctctgccaacaattcagtttcagacttctggcctccagatatgcaatagaatacttttctgttgttttaagccactcagcttgtggcacattgttatggcagccctaggtatctaatacaatgagaaacaatggcctcagtgccccatcctccaaatctgtgtgcagatgcagccacctgtaatttaacttttagatttattttcttatttgaatatattgtcatgatttataatatcatgacaagtttatcgagaaggagttataacacagagctgggacaggaggaaagaaagggtcctattattacaaaatgaaaatacacaccatgccactgtaaaacatagtataatcaggaggccgggtgggtggttcacccctgtaatcccagcactttgggaggtcgaggcaggcagatcacctgaggtcgggagttggagatcagcctggtcaacatggtgaaactctactctactaaaaatacaaaaaaatagctgggtgtagtggcagttgcctctaatcccagctactcgggaggctgaggcaggagaatcacttgaacccaggagatggaggttgcagtgagctgagatcgtgccactgcactccagcctaggcaacaagagcgaaactctgtctcaaaacaaacaaacgaacaacaaacacataatataatcaggagatttcaggtgctgaaataattaattaattgcagtaattacaattctgcagtccaggatcctgacactcacatatatgacaggcttcactgagaaagtatctgttgatgaaagacctaaagaaagggtgtgagccatgtggacacctggggcaaggacatttcaggcagagggaatagtaggtgcaaaggccctgggtcaggaatgtgtttggcatgtttgaagaagaacaagaggccagagtgggagactgtcgtaggaggtgagcttagagaggcagcaggggccaggtcacgcagggctctctgtaggtcctggtaaggacttttgttttacaattggagagttctcaacggatgactgataggatttgctttatgtttataacaacactggctgctgggttgagtgatggctgtaggggaagtgaaggcagaaacacagaaaccaataaggagggcactgtaatgaccctggtgggtcattgtgatggcagggtccaaggtggtggcactgggaatggggagaagtggtagaattctagatctattctggagacagagctgacacgtagggctgctggttttggtgtggcatgagggaatgagaggagaataccaaggctttaggcctgagcatctgggaaaacagatggggagactgcaggagggactggtttggaagggtagagatggggagctcagatttgaacttgttaagtttgagacgtgaatagatacccagcagaggtgttgagctgggtatatgagccagtgctggaggaaaaggcctgtgttgaagactgcatgtgggagtcatcatcatagagacggtatttaaagccttaaaactgggtgagatcacctagagttatataaatgagtgaaagatggcctctgtttattggctcatagattgtttatttcttcattgcaggctgacactgattactgcagaagccaaactcaaatttttacacatccaattattttaaacaaattttatgccaatttttagccattcagggccttgctggtacatacccggtgaaactatacccagcatctgttggccattgataacatagagccttgtggttataagaccttaagtgcgatgttaatcccagcactttgggaggccgaggcaggcagatcgcttgagctcaggagttcaagaccagcctgggcaatgtaatgaaaccctgtctctactaaaaatacaaaaattagctatatgtggtggcatgcgcctgtagtcccagctacttgggaggctgaggtgggaggatcacttgagcctgggaggtggaggttgcagtgaactgagatcatgccactgctctccagcctgggtgacagagtgagaccctgtctcagaaaaataaagccaaaaacaaaaacacaaacctcaagccgtccctgtccttcggagctctctgacccagagactcccctctgtactgctgtgcaacaccacctagacacataagccttgtttctgactctcccctccctcgggggtatccttgcctttcctcctctccttctgagtagcaacacctgtagtgtgtgctctttgcacagactcttgctctaagggacatccccctacccctatgcaaacctgtcagagtgtcaccatcaccaataaaatatgtgtgtgctgctgccatctcatggtcatgtctttctctttgatcagtccccaaatcctccaaacaccctagggagttagtgtagacaagaaaaggaagaagtgcaagtgctgagccctgaggcatgccaatgtttagaagtttcagagatgaggaagaaccagtaagagagatacagaaagaaaggctggagaggtaggagggaaaccaggagagagtggtgttctagaagccaagggaggaaaagcctggcaaggagagggatggacggtgtcagacactgctgataggtccagcggaccgagaaggagctctggatgtcacactaccgtccattgttgcttgctgcccacaccaaacctgcttcccactgtggctgctccaaagggctgctctcccgtttccaccagtgccacaatccgtctcatcacgccactgaaatcagtgatcagcaaagtttttcacaaaggcccagagagcgtgtattttaggctttgagaccatatgggctctatcacaattattcaactttgccacagtgtgaaagcagccattgacaatacataaacaaattgagagtggctgcgttccaataaaacttcagtttgaatttcatgtaattttcccatgtcacaaatttattttattttttatttttattttttttacttttccgcttcaaccacttaaaaatgtaaaaatctttcgttacaggccatacaaaaaacttgtagtgggccagatttgctgcccgctgatttaaattaatcatattctttcttatttttatctcctttcttgaatctgtcaccatatgactttatttatttatttatgaatgacagagtctcactctgatgcccaggctggagtgcagtggtgtgatctcagctcactgcaacctctgcctcctaggttcaagtgattctcctgcctcagcctcccaactagctgggattacaggtgccgccaccacacccagctaatttttgtatttttagtagagaaggggtttcaccatgttggccaggctggtctcaaactcctgacctcaagtgagccaccctccttggtctcccaaagggctgggattacaggtgtgagccaccaagtctggtctatataattatttaatttaatttaatctagtttatagctcctattttgtgtcactcacaggtgacaggagagcactgagaggtcactacccacctaagcatttgattaaggaaaagtattcccaaaaggcaaaagaatgcctgctatcatttcccctggattaatttctccactctttaaagtttgttggcttagaattataacactatgtagaccaaacatccaacagattgacctacccctctttcaaaacaaaatatccacagcaccttgttacctgtcaaagcaaaaatgaaatgtcaaaatctttccagtcttgttttaatgatatctcagctaagagtaaaaaaaaaaaaaaacaaaaacaaaaaagccccaggttattaatagaactgtaaaaagggccttccaaaaggagtgggtagagtatgatattcatttcctatgcttcaaagatcttgccctttctcataaaaactcagatagctgtgggtgcctagtaaaggttaatacggtagttgaaaggttactggttgctttttaagtagctattcagggacttacctctctcaccatctgacctgtgctacatagttaagttcaaggaaaattataatcctttttacaaaaattaatactagcctagaggcaacatcatatttcaagttattagatacactctgttcctttctagcactgcacttaaaggcattacaaaatcaggataaagtgaatcctgatcatggatttttaggacatgcgttttagtatttagtactgttcttgcaatacttacaaccaacactttaaaacaacatgcaaacactccatttttttttcccaaagcttcactatgtattgagaaaaggctatttttggcttttcaatatacaaccaatgcatgaatgattgctcagtatttgcttcatacaatttgagtgtacctttaagctaaaaaatgccctgtaatgggtgccatgctatattgccaagtaccctagtccagtggaggaacaggatggatgttacagaatgatttttgtctttgacttcttgattgccattcattaaagtgctattctacataactcctctggtggctggatgtccaaaaatcataaaattatccgttcatctgctccaaaggtgaatgtccattttaaacacaagacaaaaacatcctgtatttagctgtacccatgatgtgcatgcacacagtcgtggttcccagtgggcggttcctggaccaacagcaccaatatcacctggaaactacttgaaatgcaaatgctctgtaccactccagaagtactgaaatcttattctgtggggtggagggcccagtggcctctgcttaccaagccctccaggggaatctaagttttccaatgctaagtttgcaaaccacagaattcaatcatctgtacgcagattaagtaaactatatgaatgagaaaaaaaaaaaatacagattaacttatgctgttggcattggtaagatgagttcacaaggtaacatgagcatgcagggccttggtagctcagaccccagaccccttgctcaagaaactcaagagaaaagatttagggaacggaatgcaacttgcaaaccagtaaccaggagaccagccactactgattctaatctatgcagttttctgttctccttgtccaaacttgattagctacatgtgtgtgtgacaccagcttgcaacacactccgtgaggtgccaatccaggcatgtcctctacaatagacagaccacgtcacaatcggccgaaagcccacaggacatcactgactgcatcactgttagaagaatcacagtaggaaacattttcatttttatttattttttgagacagtttcactcgtcgcccaggctggagtgcaatggcgtgatgtcggctcactgcaacctctgcctcccgggttcaagcggttctcctgcctcagcctcccaagtagctgggattacaggcgttagccaccacgcatggctaattttctaatttttagtagagatggggtttcaacatgtttgtcaggctgatcttgaacccctgacctcaggtgatccgcctgcctgggcctcccaaagtgttgggattacaggcatgagccactgtgcccggccgacatttttattctttaatagcaattaggataaaggactcaaaattgtacttagtaatcacattggcatagcacatgctatttggaaaaaaaattttttttctgagatgttccttgctgtatgatacaggcctattctatgacaggagcaacgcaaacgatgaccatgttccagtgagcaagactcaatctctcaaatgaacaagagccttggctgattctaaacactttctttgctacagcacatgatcaaatgattagagtttttcagagcttagaaagggtaaccatctaatcatgacagagttcttcagcattaataatcaagaaaggcactttagggacatttgacaaggaatgacactaatacaatgagaattggtctaagtcctgcacaagactttgatacagttcaaatagactgcacactctttctgtccccatgtgtacatacatattcatacaggtggtacaatctatgtctccacttgcatgtgtatgtatatatctgtgtatatataaatatatgtgtgtatatataccaacatctatatacatatgtgtgtgtgtgcaaatgtgtatccataagaccatagagggggaaaagacatttgtttcctttaattgaatagtacacaaaaattctagtcactttatttagaacaaagaataagagtattggcaaattaatgcaaaaaagtaccctactaaacctttctatgcacaaaaaagagcagtaaaataaatactcagaactttcccaggttgtcaactattaaaataaaacctcagcatttcaaaaaagcttattccgctgcaggaaagaaggtggacatttttggtaccataataaatcacacactcacacatccatattgcttaggttgaagagaacggaatgaacagaggaaatttcttccatgaattgccctcctttcggtacccgccatgttttagttacgttgtattattccacttagcttaaaatataaagtcttgtagaaacacatttttaggatgttgaagttctcaagatatttgcacagaatatttagaagtacttagaggagttttgttaaatgcagttggtcatactacataccccatggttgcagttttgacagaccaaatgcatctgtgtcagaaatagacaaaaggcatatactcctccttcctagaaacgggtacatagacatgttcttattcttgggatatgaaaaaacaagtagtaatggcatttaaagtttaattactaactgtataatgcctgagaacaaaattcagagcaattctcaaaagggttaagagtcagactctgggcattttcgttttttagctgcaggctcctcagtctcgtgtgattctaaagtgcttgcattagatttgaggctggtgtctgctttaaggttgtccatggcaacggtgaagccggagagaagataacccccacctccactcatcagcagtttaggatgacttcgatctggcaaaacctaatcaagacagaaaagacattcatgctttcctaagacaataaagtccatgctaacaacacatataccaaaaatcagaatttaaacaacacaggttctcttgatgatttaaatggacatttttttttctttcttttcttttccctccctccctccctctctcccttccttccttccttcccttccttcctccctcccttccttcctttctctctctctctttctttttaagaggcagggtctcactgttcctcaggctggagtgcagtagtgagattttggctcactgtaacctcgaactcctggcctcaagtgaacctcccactttggctttccaaagtgctgggattacagatacgagccacggcaccaggctttaaatggaccaacttctaaggactaatttcttcacattacaatgcaaagaaaagtgtagaaattggtttaattgattttcttttgaaaaataaaactggccgggaatggtggctcacgcctgtaatcccagcactttgggatgctgaggcaggtggatcacaaggtcaggagtttgagatcagcctggctaacatggtgaaaccccatctctactaaaaatacaaaaattagccaggcgtggtggcacacagctgtaatgccagctactcgggaggctgaggcaggagaattgcttgaacccgggaggcagaggttgcagtgagccaagatcgcgccactgcaccccacctgggcgacagagcgagactctgtctcaaaaatgaaaaaaaaaaaaaaaagagaagaaaaagaactgaagcagttttcagttcagcccaggtttatctagaaactgaagcatgtttctggcggagaatgggtaatggtcttggcagtactctagaactgtgcatatagctttctttctcctggcttcaggaagcttcatggccaataatggagcttgggtctatggagaagttgctactgaatgtactacactccaaacctcccttccccgctaccctgttaactctgccaaggcaacttctctcctctttctcctgtaaccttagccaagacagacaacctccacaaagggcagggttacccaaggctcaatagcatccccactacagtatggtaagacaccaagcaatgagacggggcctacggcagcatggaggtgctcccctcagatctcccttcatgagggaacagctgagaggcattcaggcagtagaacacctccagctgccgctcctttgggatccactgcagcattcataccgagggaggccatgggttgcttccagtcagtaactgagcatgggtaccagagctggagcatttctgcttaacacagggctccttgaatggcgatctttccacttgggctcgccatcagcctcatggagactttctccagagcagcactgcaggctcttcctaccatcctcctttctctacccgctccttgcccaggcatcaacctgcaccaccaatcttgctccctctccccttatctttctaaggcatttccctcaataaatctcttacacttcaacttccatcttagcatatgtcttccagaagacctgaactgacacagagcccaccagtaaatcctgaaaacttgctgcaaaaacatcctggcagagaggaaagggccagtttctcatccacctgggaattttgctattgtcaattacatcatccacagtgatactgaggccttggggaaataagaaccataatggtttgcattttaaatgcctttagggcagagttacagagtaatatattctgacataacaagagaaaaaaagggtcacaaaaagtcaggggcatattctctgagtaacagccatgagaaatctccatccctgtagaaagaaacagagacatctctatttttattttgttttgtttttgagagagggtcttactctgtcacccaggctggagtgcagtggtgggatctcggctcactgcagcctcgacctccagggttcaagcaatctttccacctcagctcctgagtagctgggactacaggcacctgccaccatgctcgactgatttttatattttttgtagatacagggtcatgcccagccaatttatgtatttttttttgtagagacagggtttcaccatgttgcccaagctggtcttgaactcctgggctcaagcgatctgcctgccttggcctcccaaagtgctgggattacaggcataagccactgtgcctggctgagataactctatttaatgacttctagtactactgcaaggaaagtcaagtctcgggagggcagctcttgggactggctgtaagaacacgtacctgataatttctgagccaggtttcagacagcctgaggttgatgacccctcccctctcccgcagttttgtgtagcattccaacagaggctgcagacaacaacagaattctgttaagaactacttcctgggatgcagtttaagaatcaacattcagacataagaattcctgcccattccattccagtattacctctttgtactgacagtagaccacaaacggccttgaaggggccacaaagtccagcaaagacagcagcaggggagtggggtggaaacgactagctacaattaaactgtaaggaaaatgccagacaaattatttctctacaccctcaaagtggagcacaggttttaaaatgcatttaaaatgatcatgtatttaatttgcatgactcacaaagagaagagatttaaatataacattctagaaatccaaaacagaatacaatcatgagctatttctttctaggaaacgcgaactaggttagaagctcttgtggtacttggcaactctaagtcgcatttaatgacattcttgattttttaaaaaaaatcacctggaaacaaatccaacactgcataagctgctttgtggatatctgttatagcctgtatcgcagcatttgagtgccccatcccctgcatccagtgggaccacagggcccatcttgatgcagtgatggagaagattcaatttcttctgaaaccctgaaaccagcatcatcaattccccacccctgccagcctcagcctcctttctttaaaaaaacccccaagacaaaatcctcatctcgggtcccactagagtcaaagcagacaaggagaaagagaatgccaatctgtctgaagcagagcccacatgcactgaggagtctcctgccttcttccatcaacgcacccatctgcgtttctttcactcagcagagcggcagcctctaaatgtcttttcctctgctcttcttgtctcctctgtttttcctgaatcttcaaaaagaaaaataagaaatcaatgtactggggtctttcagtcaaatttatggaaatgctctggcctgtcaaaacatttcaacaatatttatcaacttggactaaaccaatagaagcaggttgtttataaggaagttgcaaatacacaagaaagcctatatactataaaaaccatgattaagctatctatgcaacgcttctgtatcctaaagctccatcccgaagaccgaatcacacgtttgtatacatgtacacacactcgttctctgttttgatagttatcatcttgggagctaatacaccaaagccaaactaaatctcatgacttaactgaagttaactgagggactgagattatgggggtggtggggactcttggcatccttacataatcttttttgcttcctctctctttaggccccttatgttctggatcttgagaaattgtttccattgtttcctggtcttctgggtggttgctctctggggcctctgccatgctgtcttcattctcttgttcagaagcctgtttttcctccagtgtgccattactttcttcaaccaaagcactgtcttttggctctgaagataacatcttggcagaaaatgttccatgtagaagactgtccactttgttgagagggaattcataaagaccactgagaaaagatttgggaaatccaaaacatgctgttgctgcccgaacaggtcctcctccagggtatagctgaataatggagccaaaacctgaacagataaaagaaacaaacatctgcccgtggagtgactctagactacgtaaaccctcagtgagtcctccacagtaatgagactgaaggtctttctattagtactttattcagaggctgaaggatggtgcagctcctcagggagtctgtttggagtctatgagtattaccaatggaggtaatataattctaaagcagatagcaggaagactcaaagaagcttatccccacttgatactattgtaaaaccctgtgtctgcaaatttggatgtcacatgattggtgacggactctgcttcccctcactccgatcctcaaatggagcagttacaagttcttaccttctatggggtcagaaaaaaaccagacaaatcaggctgtgttgtattcttccagagagaatacatgcttagtaatcttcccactcaatcccttcaatttaggcccaatgaaatgagcaccagctacccaggagtttactaaaatcactgtcccgaaagccctagccagccacaggctccagcatcatgcccactgacagtgaagctagaaaggacaattgccatgggtttgggggtacccatgggtggggggctgggtgatggagactgtgtaagaaggtccccatgctaggagccgtgcaggttcacccaagtcactttgttaaccctgaagtaattcaatttggctttccatgagtttacatttttggaccacctttactcacatcagggtggggttttgttgaaaatggaaatattaaatcttacctcccattcgttccatcattgcacccagcaccaagcctgcacacgtttccatcacaatcattttgttgccagcacggatatttcccaacgtcaacatctgggctagtgtatcgtatctcatgtggctaaagtaaaaacaataatttgttcatttttagctaagtaaagcctattattttaatcatcatttttcaagttttgtttgctttattaaaattgtgttgataagattattgattgctttggaggtgacagtaaaaggacttacaatttatgaggtaggaggatactttatgcaggtgagcaagctttttcattttacttaaaatcatgactttcttaaagacatatttcccccaattatacttttgaaaggaaacaaagcgtacttaatttttccaggttctcttgcataatacataattgaaagaatacgggtggatggcttcacaacagtaatgatggcttcatatctgggggaagaaaaaacagaacgctgatttaaaaaaatgacttaaaatattttatttgtaataaaatgtatattttataaacatataagaagtttaatattgtgggccttttaaaataaaaactacttacttttttttcttctttttaatatatttatcttgggcaaattctgtcttgtctcggaatgttgtactattttcaattaactgctgaactatttcctataagaaaaggagcaagtagattttctgaaactttactttcacaaaacaagtaatttccaaaggcttcttacccaagaatggatccaatggtctgattctccaatcccttttccacagaagtccaaatagatgaactttatatttctatactctatttggaatttataataaaatacaagtactttataactccacttaaaccaacgtaaaagaacagagatatccaacaaaaggagaagagaggtaaaggaaactaatttctgaagacactggctgaaaacattactgaaaatgaacaaagttaaatcctgatatgcactgttattacattctctaccactgacattagtaatgtcattcacttatattcctgtatataagacataaaatctttgaaatgttgagtaacatgtacatttcaacctatttctatcaaagctataacgttatttttttgttttaccttaggtacagtctgctttaaaaacccaacagtttcctaaatgccaaacagacaaaaacaaaactaaaaatcctttgaatattacctctcctttaatgcccttgtccttcaaagcttttatgtcatcttgagtaagtttctgagatttcccatcatcaactatatttcgattatcagtgcccgcttctttagtctctaaggaaagaaattgctctattgacatttatggtctgaaattatttgacactttctttttctgagttcatatccacatccagtccatcagccactcaagtctggcctcccagctgcactgcccccatcacactatcctttcctgccaaaactactccaagcctctaagtcatcttcctgctcccagtcttgcccccctactatccacctggatgccagagtgctctttgtttaaatgcaatttgactcatctaccccatgcttaaaaccatacagtggcttcccatagcaataagaatacactccaaagatgacctgcaaggtcataaatgatctggcccctgcctatcattcctggcctgatctcttgacactttagcttcagccacaatggccttctttctgttccttgaacacacccagcaaggtcccacagcaggcttttggcacctgctgcttcctctgcctggaaggttctacgacagatgtctgagtggctggatcctttctatcacttgaggctgagctcattctcttgctttaccaaattagtacacgcccctgctttattatcttcatagcatgtgtcacttcaccatcagaaatcatgctgtttgcttgtctacttgattatttttggtgttccaactggtaagcacattttatacgacagtctatcttatgaactgctataattgcagcgccaaattatacctggcatatatttggtgcttagtaaaaatatggatattaatttaaatgtatctaaataacaggtttgactcaaaactttaacagtatttaacttcaaataattacttgtgttttaattaataagatactctcaatgttcattttaataaatataattttaattaacaataacagcttttggacaagaggttgttaagaaataataatagtaatagctaaaattatgggcccttactaaaagcaagacactattcagaacttcctatgagtcatatcatagaacactcaatacaacctaggcattaaatgtgtttatgaccctattttacatatataaggatataagactcacagaaatcaaataagttgcccaacggtacaaggcaagtgatgaaggtagaaattgaacttagctggatccaaaaccagacctcttaacctctacaccatatgctaaccacctcacagctgttacataacttctgggcactgaaagaactttacattatgttcttgcaatgacgcagcaacgactcataggattaaatgcctggcccaagaacagagaaccatttaatggtgggctggagccagaatccaggttatctcatggccaaaggcagtacttgcttcactccactgagctgcagttcttagattatgagttaagatttcttttgggatagcatggcctagcacttgggaattaggtggaggctgagatgtttctgactagtcagttggagagcatctatttcacgcatccaaaatgtgcacctgcagtaggctcttccctcttcttcttgggctgtagacttcctccactggtcacttcaaatgcagttccataactatggccaatgacgttatccaggtagaaccactgtttttcgaaagttacttttctagggaaaaaaagtaatcaattaactgaatatcttttctatccagtacagaaaagacatgttcactacagtttatttcaaaagtggtctccacaatggatgatcagcagcattatctctgaacataaagcaacaaaggaactagagagaacctggttgggatagagacgtaaaattaatgaataagccacaagaacactgaattttggaaaggggaagcaaagactcatcgaagtaacaaggatttaacaaatttcttgggcttggtctgatcggccattttatttgaaaattatctaataaaagcaaattatacttgcaaataaacactgacaatctacacacttggaaatggagcctaacactgacaatgctctactgaggaccaggcaacttgaggtttcctatgacatagattttttatcttattgcaatttaaaagagaaatcccacaggaacacaatgctttcttctcaaaagaaaactaacatctgctgagtgccaaccaggggctaggcagtgtgtgcgaggtgtgattcacactttttgatttaattctcacggtaatcctgggacatagctctttccagaagagcaatccgaggcccagggagaagtatcttgtccaagattcacagttgcaaggtgttgttggagctgggattcaaattcaaatctgtgtctgaccccaagcctcattctttccactataccacacggtctactccagcaaagacctaaggacggtagaaagcccacctagcttcaggacatggcccatgtgcacagaacactgaattctgggaatcatgtggtggttaattctgattgtgccccatcccactccttctcttcctttctctgtgccaccaggaagctgattacgacagaatatactgccacatcacccacgctcccgtgtcagaggcttaccaccattgctggtctctgggtgtgtcacctttattggttccctaaatcggccacacttttgagtcacatcttcattaaagcttactcaaaccatctgagggaaatcctgtatgatcgtaagtgattcagatatggccaattcttgttatttgctgggtccctagatacttacatacaacagaatgtaacagacactcaaaatatttgctaatgtaaacctcctcagatgttgcaattcagctcagcccagatgtgcaccccctatcctcatcctttaatcacctaggtgctttgaaacactggatctggccaggtgtggtgggtcacacttgtaatcccagaactgtgggaggccaggtgggtcacttgagtccaggagtttgagaccagcctggctgacggggaaaaactccgtctctacaaaaaataaaaaaattagccaggtgtagtggcacacacctgtagtcccagctacttgggaggctgaagcaggagggtcacttgaattcaggagtttctctacaaaaagtacacaaattagttactgaggaggctgaggtggaagattgcttgagcccaagaggcagtggttgcagtgagccaagttcacgccactacactctagcctgggggaccgagtgagatcccgtctcacaaaacaaacaaacagacaaaccaaacaaaaacactggatctgagatgggtgggtttacctctctgagagcctatgtgatatgcagaggggatgatgcgtgtcacttaaaactggctggtttgacaggtcactgccccagtcgggaatgtggggccccgttagagggataaggaggccacatctttactgggaaggagtaggatttgcagagtctacttctcagagagcctggactgttttttgcccaatcagatgagtgtagccccaagggtgatgagggagtctgacctgggatgcagctgagctgagagagtcatttcctaaataaaatggaaactgccactatgacttctgcgaagaagagggcctgttgaaaagtatttccaaataaatgtttagggcagtggtctccaacccttttggcaccacaaaaggggaaggtcaactactgttcatgcctgtaatcccagcactttgggaggctgaggtggccggaattacttgagcccaggaattggagactagcctagacaacatagtgaaactctgtctctgcaaaaaaaattaattagtttaaaaaagaaaaaaaagaagaatttaaaaatggttaaaggttggtgcaggtattacatttccggactaaaagaaacatacccctcataaaagaaactttttatctttactaaattagtgcttgtgcaaaaagcttggttatcaccagcttagtgctctggagacttgtttcttgactattttatgatgcttgcttcaccttaaataccagtcaacagtttgcttaaaccaggagtaaaagaattcatctgaagtaagtacttatcagaaattccaaatctcatacttcccagtctgcagaaagctgttctcctgacattgcattcaacttatctctgtcaaaagtaatacaataacctagctcaaaagaaactgtggccaggtgcggtggctcacacctgtaatcccagcactttgggaggccgaggcgggtggatcacctgaggtcaggagttcgagatcagcctggccaacatggtgaaaccccgtctctactaaaaatacaaaaaaaaaaaaaaaagattagccgagtgtgatggtgccagagtcccagccactagggaggctgaggcaggagaatcgcttgaacctcggaggcagaggctgcaatgagccgagattgcactactgccctaaagcctgggtgacaaagcaagactccgtctcaaaaacaaaaacactgtggttgtatttctcagataaattaatccaaatatcccaataaattttcaccattaataagctcttaggacttaacaacctcaccagcccttccagaaagttatcaaaatcccacttctttacttctataaaacagagcgatactagccagcaggtgcacaaaccaaacctaatttggagttctgaggccttgagcaaattgctttttagcaattttcccagcgttgaatcctttggtgagtaaaacgagggaaactcaaagtgattccacactctgtggtgaattgtctccttcatctattctgtgtatcctgcttgggtagagaagaggatagaaagccagactaggtaggagacgtttcattttttgtgggatagatcctgactgggggattagggaagaaggaggatctatggtggaaaaaaagggggaacctgaaggagactctggagacaaggatgagatcctaaagtgaagaaaggagggggtgtctctggaaagacagtgaagatcccaaggtcctagggaaagaacttcaggacaggtgattagggtgtggagagggaggcattggcaccctagggccaagaatggaattctggggaaggaactctgtggaaagactgaaaaggatgctgaaggtggacggccagatatgaaatcatggagggggctccgggaaaaacaggagggttaagggagattatgaggttcgaagacgggatcctggtggaaaagccttctgtgacagaaagacccgaggagacaacgagggcggggaatggggaccgagagagccaagaatggcaccctggcggaagaattctgtggagaaacctggagggagggggtatctacaaggtgggggcgggagacccctaaaatcagcgatctgacttactttctccgctggacttgtactgctttaaacacatcttcacgtttcagcaccacgaagtcgccgtcgcggatgcggtggtctccgggatgctgtggttgtgggcccggctgctcccctgagccctccatgacgctcagccggtcgccgtgctccacggcgtcccgcccctcctcctcggttgtcgccaccgccagcctcacttcccacaacctggcgcactaggagccctccgaccggcaccgcccccacgtgttgcacgccgcttccgctttccggcccagacctcaagaccgcttccggaagcctctcggcttccgtctggccaaactccttgattggctgcactccgccccgcccctctcgtcttgccgcttctttgagcggaagttggatcactgaagcgccaaaaaagaatttaggggaagacctgattttcgcttgaggcatttttgcggcgctgtgcgctacagacaccttctggaagctgcggtggggaaactgagtttcccgagccgttgagacagatggggttcagcaccgcgcggggacgacaggaaagctgcggctgaagagaactgcggacttggcaggagtcgcctgaggagctaagatcccggagactcttagccccgtggtgcttctctacgggagggagggagggagaatccggccggacagatctgcgcgtatcctggagccggcccagttgtgaactaggagagctttgggacctctgtcccaagcaagtaagaactttagccttaggagatgtaaataaagtagtatttgaagaagcacaggtacccaactgtttctttttactctttctccagtcctacttcttaacgtttttttgaatttgttactgttctcagcatattgtctcgtttgagaagggtatggcacgcagcgttgttgaaggagcgcctcagcttgggaggctgaaagttttatctctgtactgtcgacaaacaactttgatcttgatcggtttgcttaatttctttgagcatcagtttcataatgtgtaatgcctaattattggagccctgtcatgccgttaaatcgtgaactttctagttactatcttgttttattaactaaaccccttttaagtaaggatttgggtagagtatttgataatgaattgcactgcagcgtacaggtatatctttatttacttgtatacttaggatatgaatcatttttaagtagacgtgtattttataagaacagttttggatttacagaaaaactgcacaaaaaatggatgtgacactgcaggattgactgtatgtaagaagctatgatgatgtatccctagtgtctcacaggccagaattatgttcatcctgtcctgccctataataagaagtctcaaatactgcaaataagttttcatagagttaattacctgtcctattttcatttctgtaatggggacttgtaaacaggtacagtacctgtccttatttttaacctgtgagcgtctagtatacgtaaaccatatttaatagttattaaactattatggtataccttaaaaagcgatagagattagaaacttaactgcagaatatttgggtcttgtatcatagctgtacaactttgcaagcctgtttgctactcttgaacctagaatacattaatttttccctttttattaatacatttttaagagcactattttccttacagttttggtgaagacctttttaatatctatcttttaggagagatgaatggagagtatagaggcagaggatttggacgaggaagatttcaaagctggaaaaggggaagaggtggtgggaacttctcaggaaaatggagagaaagagaacacagacctgatctgagtaaaaccacaggaaaacgtacttctggtaggtgaggtcaatgattgttcaatttttttcacttaaggaagcaattcacgtctatcatacaaggcggtttatctcatacttcagtttgtcttttatttcatgctactccttagtaagtatttgaacattgatgtcccagatttttactaaaacccctaatttggatactctattaatgagagtctcatttggaaagagaagcatattggaaaaatgttcactctgtttctactaacctagtattttatttttttcagaacaaaccccacagtttttgctttcaacaaagaccccacagtcaatgcagtcaacattggatcgattcataccatataaaggctggaagctttatttctctgaaggtagggtttaaaaagtacaaaaaagcaccataaatcatattttcttaacttgtctttggatgctacatcttgtattactgtaattcatttactaacatatacctgctttaatcttagttcacccaaacaattaaatgatgtttatgtttcaaaagcattttagactttatatcagtcaggaaagcagaaaccatactaggtatttcaaaaaggggacttaatacaagaaattggatacaaaaatggaagactgaaagagcagaaaggaaatattgaggtaactccccagaaagtagtaattcaggaagcagcaaccatccttatggctaagagactaaaagaagttctgaggttaccagaatgtgggaattcaaaggttggagaggtcacagcatagctgttattttgacttttgaggggcaccctacaaagctatgcttggacttctgaaggctaccttacagagctgtgcttagaccactaaggcaaatgaagctggttgccactggtaactgagggggcatgactcagtggtgcttggaactggaggctagcactatcgttatcttctgcagctgcagagatgctgaaaagagttggaaacaagaataaattcctttctcttcctgccaccttcccgtctctaaagtgccttcaattggcagaatttaaagagaatctgagacatgtagggtacagatctgaattatagcatcgcagagcaggaagtagaacagtgggcctgaaatcaagggacaataacaaatacagctttgtgtagaaacacaggtaaggaatctccctttgataattaggaataccaattaacctacatcagtctgtataggtgcagggaactgtcttttttgtgctgttaaaatacccatttgtttcttatgtctcatgaggggtgtgtgtgtgtgtgtgtgtgtgtgtgtgtgtgcatactttttatttttttttgagatggagtcttgctctgttgcccaggctgaagtgcagtggcgcgatcttggctcactgcaagctctgcctcccaggttcacgccattctcctgcctcagcctcccgagtagctgggactacaggcacccgccaccacgcccggctaattttttctgtttttagtagagacggggtttcaccgtgttagctaggatggtcttgatctcctgacctcgttatccgcccgcctcggcctcccaaagtgctaggattccagacgtgagccaccgcacccagccgcatactttttttttttaggaaaactagacgtttgaggtccaggaccctccctgccccataccaggcatgcagtagtcattttgtgaatgaatagagtactttacaaatgttttctttattggaaatctgttcgtttttttccatcaatagaatctgtttcatgaatgatcttttgttcctttaggatgtattagccaccagcactcccattgctcccctagcagatagctcagaacactataagtgatctttggacagtcctaaagatggagttcaagaggtgccttagccttcaccatctgtgcttccaaactactttattgtactgttcttctgtgagagacatatttgaaaatgtagaactttagagtgttaaaaaaaaaaaggcttttcagttttgccaccagggtcaagtgttggtctgtctcctgatctcaggaaagactgtgattgtgattgtcttcagctctgtcagagtaagagcttagtttatgtgtctggctttggctttattataatttttagtttaagcttattgtctaaattatctgaactaacatgtcctattaggtgtcaaagatgcaaaacaaagtttcccagatagtggggcttttagagagagagagtttctgtctgcatttcacattatgcaaacctaaatttgttttagaatcttaagtttacattctatactagttcttatatgaatgtaatcaaaatacaaagcaattagaaaaaaatcatctaccatgtatatagtgctgcttttgtctcatgaaaaatgtgcatgtacctgtgtgattatttgtgctaatgccatatttgttggattagtttacagcgatagctctcctttgattgagaagattcaagcatttgaaaaatttttcacaaggcatattgatttgtatgacaaggtaagattcctctacagcaaagctaccagtcatgtgccatcttaccaatgtattcgaggtacttgtgattatgatcgtaggcactggagtcagacttccttggttcagacctcagttctgccacttacctgcagtatggactttgattaattacttctctgtgcctcagttttctttcatttggagatagaggtataaatacctacctcaaaggattgttaagaggcagtaatacattaatatatttaaaatatcagaaccatgcttggcacaaagcttatacttatgtcatacttaccattatcacatataaacattgtatgctttctcaaagtctataatagaatgctcagttaatggtaattgactacagaaaagcaattattgttttcatacttttatattttataggatgaaatagaaagaaagggaagtattttggtagattttaaagaactgacagaaggtggtgaagtaactaacttgataccagatatagcaactgaactaagagatgcacctgagaaaaccttggcttgcatgggtttggcaatacatcaggtaactatttgtcttatgcatacttttgtctaaacttttttaatgtttgcacacacatgcacaccttgtctaagtttaaaggaagattttacagtgactgtactttctataagagatacttagcttttacgaaaagatgttggctagaactgagaggttgcagttccgttctgaaagataccattcattctatatacaacagcttatctaaatgaaatatttacctccaacttatttggatttgcttaatcttgctaaagattgtgcagaaattaaactttgctttcaagaagttatacaatctcatagggaagataaaacaaggaatcatggtgttatcggttatgaacttagagcaaaaaagagcaaccttagatttaggttctgtggcatgaagcaaaccactgagtgtccctgtatatcaaatgtaaataacagtttgtactgtgcttgcctgagttttttttcagggtcaggtaatacaacatatatgaaaacatttttaactttttaaattttttaaatttattttttatttatttttttgagatggagtttcactttgttgccaggctggagtgcagtgtcatgatctccgctcactgcaacctctgcctcccgggttcaagtgattctcttgcctcagcctcccgagtggctgggtgcaccaccatgcccagctaagttttggagttttagtagagacggggtttcacgatgttggccaggatggtcttgatctcttgatcttgtgatccgcctgccttggcttcctaaagtgctaggattacaggcatgagccaccttgcccggccaaaaacattttttaggctagcaaacagatacatgcttcaaggtaatgaatagcaaatctcaggacaggcatacacaaagtgctggggcattcagaggggcattcttctacctcttgcctgtgctgtccattcaacatagaatccccttcccttcacatggacagattatttgggcctagctcagttgtctgtctgtaaaacctttctcatgaccacttttcgaaacttgcatggtattttgtctgtacatctttatggtccttatgacaattacagctgtatatatgcatcttattttgcctcttaggttgccagcaaactgctgtgtacaagtggtattaaatgtttgtttgttgtttatttatttatttattttgaaatggagttttgctcttgttgcccaggctggagtgcaatggtgtgatcttgcctcattgcagcctcagcctcccaagtagctgggattataggcatgcactgccacacttggctaatttttgtatttttagtagagatggggtttcaccatgttggtcgggctggtctcaaactcctgacctcaggggatccacccactttggcctcccaaagtgctgggataacaggtgtgagccactgcgcccagcgtgtttatattatttaatgttaaatgccaagggagtgagtattaggtattttaaaggtcatttttattttctgtgtcttgattggtcagtgaatatagagaaataggaatgcatttttttttttttaattagtatcaagaggtgatggttttggggactaatgtaagggcttttaatgttaggtttagttgggacagaaagtagcagactgggatgctggagtttttcagcacagggacagcaaaatccaatgtaaaacatccactataaagtaagtagtcataattaaatattagatatttaaagggctgttaaagttttctgtttttattctgtttctgtccataaactttatattctctataaaaatagagttctgtataaagaggatgttttgttttccaacttcagagtaaatgtctgtcctgtttaggtgttaactaaggaccttgaaaggcatgcagctgagttacaagcccaggaaggattgtctaatgatggagaaacaatggtaaatgtgccacatattcatgcaaggtgaggaatttgatgtattaaagtattacttagaatgggacattgaaggccatttaagaatgaaaacgctcattttataaaaatgaggaaatcagtaaaaaggacatgagttccttgccatctcattgatcatcacactgaaataaactcattgaaaattattcaaagacatcatgacagatacttcctaaataaggaagaaaatgttgatttcctaacctgcagatttttgtaaacattggttttggatgtgaacttatcaagaccctgctgtgtaagtttaataatccatgtatgggttgagtatccctaatctgaaaatctgaaatctgaaatgctccaaaattcaaaactttgagccctgacacgacactgaaaggaaatgttcattggagcacttcagatttttgaattagagatactcaactagtaatattgcaaatatttggaagtccaaaaattccaaaatacttctggtcccaggcattttggataagggatatactcagtctgtaatacactaagtgttctttgttaaattattaggtttttgttagatacaagggaataatgaaattattttgtttttcttgaattcatctttaagattttaaattcattagaagaattcattataaggtaatcatcagcattttgtttttcttttccagaatttatagaagaaaatttcctagcagttctttaaaaagaacttagaaacccaaaggtttttgaatctgtagattttccttttggcattatttttttccttaaatttcttttttcttttttccttgagaacagcctgtgagacaagaagaaaaaggaagatttagtgttgtttcttgttaagaatggtttggctgggcacggtggctcatgcctgtaatcccagcactgggagtccgaggcaggcggatcacgaggtcaagcgatcgagaccatcctggccaacatggtgaaaccctgtctctactaaaaatacaaaaattagctgggtgtggtggcacacacctgtagtcccagctactcgggagactgaggcaggagaatcacttgaacccgggaggcagtggttgcagtgagccaagatggcacccctgcactccagcctggcaacagagcgagactccatctcaagaaaacaaaacacaacaagaatggtttaattcttgtgatatttctgatatatcgaagggatgatttgatttgagaattccatagttgctcctaaaaggaacttgtgaaaatataaaaaacatcaattttctgttcattacttcctgttttgtctttagggtgtacaactatgagcctttgacacagctcaagaatgtcagagcaaattactatggaaaatacattgctctaagagggacagtggttcgtgtcagtaatataaagcctctttgcaccaagatggcttttctttgtgctgcatgtggagaaattcagagctttcctcttccagatggaaaatacagtcttcccacaaaggtaatacgttctttaactgcttctttatttatcttggtaaagaaggcaaatcagaatacagaaaacatttcccagtgtttctgaacacagagcttatttttattttttattttcaattttctgcttttatattatgaaatacttcagggtaagaaaaatacagaaataaataaaacattccactactcatcaccccgaatttacatttttcagctccggacacattttttaatgatataaagcattactggcacaattagtgtctgttttttacctataccattcccagggatgatcattatcctgaagttattataatatgcatcccttccattcatatttctgttgacttctaggtatacacaccaagttttttttcccctttatttcttctactatttagaagtgatgggttttttaaatctttattagcctttattaaactggattttaaaactatagaaaagtgcagagaataatgtaattaacatttatctactctatgatttggcaaatattaatattattttagcttaatttgtaacaaaaatatggttatataaagttgaagtctttctgttctcagttttattccctttatttgctccctagatgcaaccactatgctgaaattggcatgtattcttcaagtttacatttttattcttgactacatgtgtagagttagttttttgtattgtgtttacgtaaatggtatcctgaatgtaacacgcagctgtttttttatttggttattttgtagttctacctattttaatacatatcaaattctttcatttttactattgtggagtgttgctttaaataaatagccacaatttatccattttcctggaggtagacaattgtgctctttccagttttttataagaacaaatgatactgcagagaacattcttgtacatgtctccttagcagaggaatactaagttgtaggctgtacttttttttttttttttttttttttttgagacggagtctcgctctgttgcccgggctggagtgcagtggcgcgatcttggctcaccgcaacctccgcctcctgggttcaagcagttctcctgcctcagcctctcgagtagctgggactacaggcacgcgccaccatgcctggctaatttttgtatttttggtagagacaaggtttcactatgttggccaggctgttctcaaactcctgacctggtgatccgcctgcctcagcctcccagagtgctgggattggccggctgtacttatttttaactgtattagatgttaccaaattactttccagagtattgttcccaacttaaatctttgctggtagtgttaagtagttaccatttctctgtcttttcattaacacttggtattgttagacttgtacatttttgacagtttgttaggtataaataatactgcatttataatgtgaatttttctgatttctgttgtggttgagcatcttttcatatctttactggccattcagtttctttatcgaattttctatttatatctaatgttcattttcctgtttattggtttattctttaattttgttttttagagatggggtctcattctgttgcccaggctggagtgtagtgacatgatcatagctcattacaaccttgaactcctgggctcaggtgatcttcccatctcagcttcccacgtagttgggactacaggtgccagccactgtgcctggttctattagtttattgataggagttctttatacattctagatactaattattgttgattatatacattagatattttctcccagtctttggtttgtcttttaactttgtgggtttttttgttgtacagttttacattttgacatgatcaaattgttgtcttttcctccctaatttgtatattttatgccctgcttaagaagccgttcttcggctgggcttggtggctcatgcctgtaatctcagcactttgggaggccgaggcgggcagatcacctgaggtcaggagttgaagaccagcctgaccaacagggagagaccccatctctactaaaaattctaaattagccagacgtggtggcacatgcctgtaatccaagctactcgggaggctgaggccggagaatcgcttgaacccaagaggcagaggttgcagtgagccgagatcacgccattgcactccagcttgggcagtaagagcgaaactccgcctcaaaaaatacataaataaataagaagcccttttcactcaagcattataaacatatttcctacattgcttctaagaatcctaagttttgttttttatctttagatcttttgtccatctggaatttaagccattggtgaagggcataaaactagggatttaagctgggcatggtggcatatgcctgtagtcccaactactcagtagtctgaggcaggaggatcgcttgagccctggagtttgagactagcctgggcagcatagtgagacccccatctcttaaaaaaacaaactagtgatctaatttttaggtgaaaagctatttatcctgacaccatttattaattaagcccttgttaccatggatgtataatgtttcctcggtggtacccagagtcatcgttatcaccattgggctttactaaatttaacatttgctaaatttttgctcatgtgaagggttgaatccttagtgaggtaaatagtcccttgaagaattaaaaagggaaacataagatgtttatgtttgaaattcctaaggcttctttctctgactggaagaagagggtatgtgagattcagctattggttctgaataatcagtggtgttgatagatgggtttcatctggtgtttgtcttggcttaaggttcaaggtataacctttagcttagaggccagaatttaaatcctgatttaaaccagatattttcttccttttattttgaagacggggtctcactctgtcacccaggctggagtgcaggggcatgaatacagctcactgcagccttgacctccttaaatcagatattttctagacagtatttgttcagggtattttcatgccccctaataaattaggtagtagcattgactcatgtgtgatgtcgtgaagaggtcctccatttgtctgaactgtggggctttgaagtgacagaaagatggctgtttcagttgatctctattcccgccactattgttgcgtaacacatcactccaaaactcagtggccgaaaataaagccaatcattttattagttctcatgatatctgtggatcaggagtttggaagaactactcaactggctagttctggctccaggcctctcatggagttgtagtcagatggtggctggagtacagcaaggtggctgggggctggccaggcatcttcttctccatgtggctgtgtgggctagtttgggcttcttgcacacagtatagcagctcaggcactcagtctgcttatatggctgctgacaggttcaggtcaagaagtgcagttggtaggcagaaatggccttgccttttgtgagctagtctcagaagtcgtgcaacatcactgtgtcacattctgttggtaacaaagtgagtcccaggccttctcaaattccaggagaaggaattagccttcatttctttttttttttttttttttttttttttttttttgagacggagtctcgctctgtcgcccaggccggactgcggactgcagtggcgcaatctcggctcactgcaagctccgcttcccgggttcacgccattctcctgcctcagcctcccgagtagctgggactacaggcgcccgccaccgcgcccggctaattttttgtatttttagtagagacggggtttcaccttgttagccaggatggtctcgatctcccgacctcatgatccacccgcctcggcctcccaaagtgctgggattacaggcgtgagccaccgcgcccggccttcatttcttaatggaggagtagcaaggttctaaaaagtcttgaagataaatattgttgcaatcatatttggcaaatacagtctgccacagtctgaatttataaatgcttcttgagatccaaacaccaaacaagtgcctgtgtggcataataagtattacactctacagaaagtgcaaaaggagcctagatgagaaagctggggattaaagaaaactctggaaagccttttgaaaaggagaggattggcattgggcatgtgggacagaatgagagggttgttgaaggagcgagaggtggcatgggcacagaggaagcaataagtgcttcatgtgggaggcaagcaaagcaccttgcatacccatagcaggatacgaacagtaagtgagaaggatcaattggaaagtgcctcaaaagctgtcgatattaaattgttgcaggaggaaatagaaagtcattaatctctcagtggattttactttactagcatcctgagaccaacttttaaaacaatattaaatgaaatgttttaactgaattttcctgaggtgtgattatagtttatcaaaatctgaatgtgaattacttttgtttcattcagtgtcctgtgcctgtgtgtcgaggcaggtcatttactgctctccgcagctctcctctcacagttacgatggactggcagtcaatcaagtaagcgatcagactgttacataaaaggcaggctttagatgtcacactgttgagaaaatccataattttactgtattatattgtacgttttatctaaatgacaaagtgtataatagtgtataatagatggtttatttgatgaagagtttgtatgttaaaataattctttttttttttttttttttttgagacggagtcttgctctgtcacccaggctgcagtgcagtggcgcgatcttggctcactgcaagctctccctctgggttcatgccactctcctgcctcagcctcctgagtagctgggactacaggcgcccaccacaatgcctggctaatttttttgtatttttagtagaggtttagtttagaggtttcaccgtgttagccaggatggtcttgatttcctgacctcgtgatctgcccgcctcagcctcccaaagtgctgggattacaggcgtgagccaccgctcctagcctaattgtctttatttgaaatttattctctgtcagattccagaaaggattcattatgcaaatattgtgtcctaatgagaaatagttgattttatatctcaattatgtgattaattgaactggatataggccataagcaaagctgtgtgcttcattccatattgagctgtgatagaaataatattgttttgaagttttcaaataaagactccctttgaaatggcatgtttcattttatgttctcaatgttgcaatggggcattttactatagggttttttaatagctttttttttttttttttgcaagtcagagttttctttgtgtatgtgtttttcatcccataattgattacattttttctagctgtagatctatagctcatccctaaatataaaataatgaatggttttgaagtcagtgctctctagcaaacctggctgaaatgagatggtcctaagaactaagaacctagggaaaagataagatgatctgctgctaactgcttcacccccttcttccctgaaaaattaagaccaacatatataataattaattgtactatagtgagatctttacaaacaccccattttataaaagaggaaatggttaagactcttgagtatgatcgtgtggcctatgagtatggtagagcctgatttccaacctagtctgtgggacttttaccacttaagagggacaaagggttagtctggaggtagtaagttatttcagttgattattcacagtcacttacagatcaaacttcttgttctactctttcctcccttctcactactgcacttgactcatcttaaaaaagtgggtgtggggggtgaattgattgtgaagtggtgagtgatcttggagcaaggtttgaagtcgtgcaggttaggtggatgccagcgcctggcccatgacctgaaaaacattgagaggtagtctagatgtatgatgaatgtattccaaagttattattttaatgttcaatgattgtacttacattaattaagtaaaaaaagctttaataacatgtgcatgtttttaaaaattcaatcagtgtggaaaggcacagtccccacaacttgctgttacattatacataactttagataccattcttgtgtctttcatccttcgctttactgcagtcattctatgtgagctgaggacattagaaacatacttgttcttttatcttctagactttctccgttccgacattactttaaattgtcaaggtttaccttttgtcttctaattataattgtcttccagagtttatttataggtcatgtctaacaaaaacaataaacaggcatttacatttttatgttaataaaaatgcccgatatggcattccccgggataaataatatgagcttctgacttctccctccatcttttctactcctacttgcgtcttcagtggtcgaagccagtgctggaactggctggacagtttatccccccttagcaaaaaacctagcacatgcacaagcctctgtggatctgaccatcttcacgttccactgtctcttccattttaggggccattaactttattaccagaataattaacataaaacctccagctttgtcccaatatcaaacaccccttttcgtctggtaagtccttattatggcggtccttctactcctttcccttcccattttattaacataaaaatgtaaatatagctcaacaaagaaccaaatgaatgatcaaatgccaagcaaaggagctgtaatttatgtcactgggttttgttttgttggtttttaccccttaaatgaaaatgactcaagcatcaaattatcttttcttatactctgctagttatttggaattatcccacattttagtgtgcatcatatttggactgtaactttgtcatttagtactttatttttcctaaggtttctaagtgctggttttacttcttagagtatgcctgtaccatttcaccataattttccattctctcttcaatatactatggaatacatggaatccaccttttattcttaaaaaacaaaaacaaaaaaacacaccttccttctgcttgagtctggatcagtagttctccagacctgcattcctgcttcatcctgggatcttgcttcattgcattttttctaaggaatattcccaagtaaattttcagaaagtatacaggacaggtaaaaagttctaagcccttgcatgtctgaaaatgtctttatttggatcttagtctggctaagagtttgctagctattgaagtctatttggttttaattttctctgctgtttatgagaggtctggtgctcatctgattctcattcctttgaggactggacttttcctcctctttgtaaccattttatctatcatgctgtgaaacagtgaaagtgtatctagttgtctctatcctgcttgattggcaggatcttttgtcttcaactctagaatatctgactgatttctcagcttcctatcagatgcattgcttggattatttgttttaagtttttcctcattctttcattttctttgttctgttttctagatttctttggctttttcttatatcttctctataaatgcttgatttttatatacatgctttaaattttcttgattttgtacttgtttccccattgttccctttttgtagtggcttattcctgttttatcatggcaatattttctcaaaactcttaggcagtttgtttttaatactccctgaattattgccatttaattttcaaatgtctgatgaggaatgagaaagtatttgaagtaggtaggataggtttcctttgcaattttttaggtagtagttttttctcacaagactttacctctaaatacaaagataggggtttgggctatcagattttgctttatgaatgtgtttttgaattggaattgggtttctcagatggtagaatgaagagtctttattctgaagctctgatattctcactgcacagtttagctcccttcacagaggggatgggtttgtttccttagaacagtgctctggtttttgccagatgataaagtacgcattcttcccctacccacctgtccactcaccttctccaaaaattctcaacagctattccatgacttgtctttcggttgattactgttttcttccagccatctactcctgctctctattcctgccacatccaacttggaagcttctctggggctctgctaagaacgttgggtcccactttgcttgtacgcttatagcttttgcccatgtgtattctggactttattttgttttatccatcaatactttaccatttgctggtttcaaaaatttcattaatatctcatttgctgatgatacctctacatacccccaaatttttagtgactcattttggtggacattttggagggaggctaggcaaatacatatgttcatttggctatcttgaattggaaactgctgaagtaattttagatataccattaaactgttaataagcaaatctgcttttatcttcctcagcatcatgtgaaccctgaatagttaatatcttgcagaaaccatccaaagtaagtattctaactgaaaactatttaaactttttagaatccaggaattgatgtctgatgatcagagagaagcaggtcggattccacgaacaatagaatgtgagcttgttcatgatcttgtggatagctgtgtcccgggagacacagtgactattactggaattgtcaaagtctcaaatgcggaagaaggtagggtacaactcttttcattatttgtctctcaataatgattcatcaacgttcatcttttctaagatgctcctgaacctcaaataatttgaggaatttcttgttgcttacataagatgaaacattcccttttaaaaaaacatgtatttgtagctccctatgactttgttttatattctagttgagtcattgtagggaaaatgaaaataccaactattgtatttaacacttttaatttacaggttctcgaaataagaatgacaagtgtatgttccttttgtatattgaagcaaattctattagtaatagcaaaggacagaaaacaaagagttctgaggatgggtgtaagcatggaatgttgatggagttctcacttaaagacctttatgccatccaagagattcaagctgaagaaaacctgtttaaactcattgtcaagtatgtatgctgtcatttgaaattttattacataaatgcacgttgggggttctcttggctacaggtaacaaaaaactagtcaaaatggtcggcaaactacagtccatgtaccaaatacagtactccatccccttgagtatggcctatgaactaagaatggtttttatattttttaatggttgaaataaattaaaagaatatttcacaacacatgaacttatatgaaattcagatttcaactggatatggtggctcacgcctgtaatcccagcactttgggaggccgaggcaggcggatcacttgaggtcgggagttcgagaccagcctggccaacatggtgaaaccctgtctctactaaaaatacaaaaattggccgggcttggtggcgggcgcctgtaatcctagctactcgggaggctgaagtgaagaatcacttgaacccgggagatggagattgcagtgagccaagatcgtgccattgcactccagcctgggcaacaagagtgaaactctgtctttaaaaaaaaaaaaattctgatttcagtgtccataaataaagttctattggaacatagccacactcattcatttacataagtgtgctgcttttgtgctacagtggcagagttgaatagttgtgacagagaacatatatatggctcacatatttttgctttatccttttatagaaaaaatttgctgatctctagtttaaacaatacagaatatttactatcttatacaagaagtttgtcactcaacggaagagtgagggaacagtgaattccaaagccatttcaattagttctgtgtagggtgttgctcatagagattcaaatcgaattaacatatattcaaaaagtatttgataattttatttccatgctattgccatgccgtggagaagcagcaaagtataggcattttttgctttagtggttaagagcttttctttggagacaaacctaagttagactcctgctttgggcatttacttccagtgtgatctgggacatattacttaatttcccctttatttgtatcaccttaaaatggaaataataagacttacctcagaaggttgttctaaagattaagtgggattttataatgtacttaacataactactgcaacatactgttacttttgataattttttgacaactgtggggtaattttgaagaaataggagaaaatgagagagactgaataatagatatatctaagagaggtaaagaactgagaacgttttgaaatgcattgtattataaaaagtgatcttggccaggcacagtggctcaagcccgtaatcccagcactttgggaggccgaggcgggtggatcacctgaggtcaggagttcgagaccaaccggaccaatatggtgaaaccctgtctctactaaaaatagaaaaattagctgggcatgatggcaggtgcctgtaatcctagcttcctgggtggctgagacaggagaatctcttgaacctgggaggcggaggttgcagtgatctgaaatcgcgccactgcactccagcctgagcaacagagcaagactctgtctcacaaaaaaaaaaaaaaaaagtgattttgtcatgcttttctgttcagtaggctcaggtctgtaagaggatttgatgctttttctttctggctttaatatgttaattagctgactgagtaaagaatagtgctccacaggggttttttgtccttaaatcctacttccctctgaataaaagccattcagacccaccctggaagagaggctgctctaacttagcgttgctggggtggtcttggagtgagtcctttgagcaggtggccaaggaagcaacctggtcgacaatccaaacatctttggttcctcttaacagttgtaaattaaaactgaacatttttagtggtccctcttctcccatacttatagaagagtaagtatggaaaactttagttttcttcccacagtttgctttttccccctccatgtttgtgatttcagcatcaaaactagaatttttcatggtcctctattatcagtctagcagagattggcaaactaggcaggctgcctgtttttgtaagtcaaattttattaaaacacagccccacccagtttacttacattactgttcacagttgcttgcacactacaagttgaatagttgtgactgagacagtatagcctgtgaagctgaaaatactttctggccctttaagaaaaagtttgtcaacccagcctaggtgacagtagaagtttatgttttagtttaggttccttcagaagcaatgatttggatcaacatagtttacttgggaggtgattctggagttactggtagggaaatgatggcagccagtgtaggtgccttaacgaacaggtgacccactagcatctgggacataatcctcctgggccagtggaaaactccactgtggaaagccagcttcagtatttttccatttaagggcctacatttgggactgcccccaggagtattaaacacctcagcacttctggcctgcccatcctgcctgccaatgatgcttgtgtggccatagaaaggtctttggcagacaggtgcagatgccagtaggaagccggaacatactgaacagtgagtgccaaggggatatgagcacaccaccacctccttctgtgtttacatatattaaaagggaataaagactcatgttttactcctgattttctctcccaccctatttttgtttgttccttgtttataaaattgacaaatgtaaatgtactgttttatattctttctcttaattttttttagagacagggtcttgctgtgttgcccaggctggattgccgtggcacaatcagagctcactgtagcttcaaactcctggccttaagttattctcccacctcagcctcacaagtagctaggactaaaggtgtatgccaccatggctggctaatttttaatttttttttttatagatatcggggtctcactttgttgcacaggctagttttgaacttttgggctgaagcagttcttccaccttggcctcccagagtgcttgctgggattacaggcatgaacctgtaaaccaaaaataaaattccaaggccccccacccatttaaacagacttccttctcagccagggctcttaagatttaacctgaaagactgattcaggccacaaagggaagtgggggtcagacatgccttattatacctctctggcattaacatcaacacagattttaagtctaataagaaacattttacagcctgttctctctgaaacctgttagccaaagcttcatctgcatgataaaactttggtctctacaacctcttgcatcccaaacattcctttctattgatcccaggtctttagacaaactcaaccaattgtcaaccagaaaatgtttagatttacctgtaggctggaagcccatgctttgagttatcccacctttctggactttctggttctacaaatcactgcacctggcctcattttcttatttaatttgaccttttgacttgaactgaaaaaaatgaaattttatcccatcttagagtattatatactgagttcacttctcagtctcctttcagtgacttggctgcacagtctcaagatgtctgttcacataaaatacaatataatcccgtatcctaaaatggaagaccatgattgtgacgcattttaaggctagttgtgtaagaagagcaacattgtatttagttactttaagatgctttgcaagtatcctctgttccttatgcagagtttttaaaaaattctaacctttatagattaaccaagaactttgagaaatgtactgtaagaataaaatttcagttgaggggatgtaaattttttacatttgtctttgttgatattaagcaggttaaacaaattgtagaggagatctcctaatggatcaatgaagtataaattagaatttataagttgtgttctgtttttcagctcgctttgccctgtcatttttggtcatgaagtaagtattttacttcatctttactcaaaaagtatataaggttagcaaaaataacatataaaaactttacagaaagtagcaaatttctattggccagttatttatatcttaatatgctttgtaaattaatgatatgggaggcaagcaaactatagcttttttttttttaatttttttaattttttgagacagggttttgctctgtcacccaggctagagtgtgatggcacagtcatggctcactgcaacctccagctttggggctcaggtcatcctcctgacctcagcctcctgagtagctggaactacaggcatgcaccaccatgtgcagctaatttttttgtattttttgtagagatggggttttgccatgttgcccacgctggtctgtaagtcctggcctcaagtgatccacccaatttagcctccaaagtgctgggattataggtgtcagccgtatagctccttttaagaaaaaacttttaccaactagagtaaatatgaatgggcttttattttatttatttatttttttgagatggagtcttgctctgtcgcccaggctagagtacagtggtgcgatctcagctcactgcaacctccacctcccaagttcaaacagttctcccacctcagcctgccgagtagctgggactacaggcatgcgccaccagacccagctacttttggtaagaaatgggcttttaaagtgactagacactgccagtattaaagcaaaaacaaatatttctcgtttttgtggaatggatttatgccttgcaaggtagctcttagtaatttctaagatagctctgattttatatgttttcaagtttttactttttaatcatttacgtgatagaagtttgtttttagacttccttttcttagaaaaaaattatcatgcttttaaaacaatccccaaacaaattaatattatagaaggaggaataccccctttactagtcacctttatgttttccttacttctgttttttgttcttttttcgcacttgagcttgttaaagcaggtttggcattagcactctttggaggaagccagaaatacgcagatgacaaaaacagaattccaattcggggagacccccacatccttgttgttggagatccaggcctaggaaaaagtcaaatgctacaggtagacaatcagtcatttagtgtttgttcttttgcttgtaaaatgcgttaataattcacaagtgaattttctcaaagcatgtagtgtgtgtgttccagaggacatggttaggtggcgtaaatgaattggaatttgtgtgagtaatatgtaacttatatctgaccatatttttaaattgagccagtctcctgttacagaggctgtacaaacatcttggtctgttgagacatcaactattaggaaatattaaccatttctctaaccattgttttgctagtctttgttgttgttagttgttatgtgacctcacctatgaacagaatagttcaggggagttaaagcagggtcacctattctccctcatacaagtacataaacactgtattgggctttaagaacagtctgctaaaggtgtgggatctgtctgtatatatctccactgcttgtgagtccaaatcaaggcaacctttttttttgagacggagtcacactctgttgcccaggctggagtgcagtggcatgatctgggctcactgcaacctctgcctcccacttttaagcaatccctgtgcctcagcctcctgagtagctgggattataggtgcgcaccaccacgcccagctaatttttgtatttttagtagagacagggttttgctgtgttggccaggctggtcttgaactcttggcctcaagtgatccacccaccttaacctcccaaagtgctgggattaccggtgtgagccaccacgctctgtccaaagcaaggcaactgctgtgatcagtcatttgtagatccccaagaaaattctgcctctgccagtcagagcctagtggttttcctttcctgggttttatgatggctttagaaggtgctgcttattggtatgcttgtagtttccttaaagtgacaaccggtaagccagccgtaatgtgctttctactttatttttttgagacaaggtcttcctcttttgcccagactgaagtacagtggcgcaactttggcttactgcagcttccaccttgggctcaggcaattcttccaactcagcctctcaagtagctgggactatagacatgtgccaccatgcctggctaatgctttttttgtagagatggggttttgccatgttgcccaggctggtctcgaactcctgggctcaagcagatccacctgccttagccttccaaagtgctgggattaaaggtgtgaaccactgtgcttggccactgtgctttctaaaaatgcctgtggcccccttcttcactcgatgtggaaaattgaccagggcttctctggccctttagtaagttgtagtagtatggctcctaaatctttttccaaggattgggatcctggctgcacatcttaattacttttggagctctttgaaaataccatagcccactgcaagccaattgagttaagagtttctaagttagggtcctagtgtctatatgtgtacaacagtccacagatgattctaatatgcagccagccttgagaactgctttgatcttgtcattacattataaacccactgtccttcatatctgagtcatcctttattgcctgtggttgagtgttaaaccagtcattttaattcctagatattattataattccatagatatttcatctatgtttggttccttttggccatctggggctactttttaaaaaataaattctgttctgagacctcgctacaatgtagcctgacaacagaggctcagggtaccccttacaggtgaaacaaagctcatcatgaacaggaatctgggtgcagtggcttacgcctgtaatcctaacactttgggaggccaagtcggaaggattacttgaggcctggagttcaagaccagcctgtgcaacaaagtgagaccctatctctacaaaaaagaaaacaattagctgggcatggtggcgcacacctgtagtccctgctactccggaggctgcagcaggatgattgcttgagcctagaagttggagaatgcagggagccatcgttatgcaactgtaccccagcctgggcaatagagcaagaccctgtctttaaaaaaaaaaaaaaagaaaacattatgtttagaatatgtaggaaaagatgcaagtggggatctgaattgttacagctttcttttctgtcttttgtgtggtatacctgttcgtgtgtgtaactttggaattagtgaattataggtgggagcctgttttaacccctagagtgtcttatctgtacaaatctcataatttatacatactgcttgcagtatataaaacttcctttttttgctctttttttttttttttttgagtcggagtctcgctctgccgcccaggctggagtgcagtggcatgatcttggctcactgcaagctccgcctcccgggttcacgccattctcctgcctcagcgtcccaagtagctgggactacaggcgcccaccaccacgcccggctaattttttgtatttttagtagagacggggtttcaccatgttagcgaggagggtctccatctcctgaccttgtgatccgcccgcctcagcctcccaaagtgctgggattacaggcatgagccaccacgcctggcctttttttttttttaataaatgtttcttggcagatagttgttctaaaatgtgtccagtggtattgaaagtgttaataccaagaagttacattggcagtttttcttgttttcagacctggaataatgcctttggctcaatttaaaaatagaatctgtaatgttagtggaaattaaacatcctgaatagagtatggcatgtaagccacactaagccagggtttttaaaaacgagactaacaggctgggtgcagtggctcatgcctgtaatcccaacactttggcaggccaaggcaggaggaccaagctggacaatatagtgagatcccatctctaaaaacaattttaaaaaaaattaggtgtggtggcatgtgcctatagtcccagctactcaggaggctgaagtgggagaatcacttgagcctagaagttttagaccagcctgggcaacatagtgagaccttgtttcttacagaaaattaattagccagtcatggtggcatgctcctatagtcccagctactagggaagctgaggttgttgtaaccatgcgagttatagagaaacgccacactttgagacaaattaaagagtcctttattagccagcgacccagagacagctcacgcccaaaattctctcagccccgaggaaggggctagttttgtttttataccatggtctaaatagggaggggggattttagctgaagcaatttttacagaagcagaactggcagaaagttaaaaaaattaattggttacaaatgcagttacaaaaaaataaacagttccaggtaccggggcttaaactatcacaaagagataaatgtaggggttttgggtgccatgcactgcgcgtgcccccaggagctgctggtgcaactcgcctcagcatctcatcaacaggtgcattcctggacgtgctttgagtcagttttacactagctatgcctggagggaggtgaaagggtttacaagtgaagaagctaaaatggagtctgtccggctctctctctgctaggagagagtcactcgggttaaaacaaggtaggatatcacaaggtgggatgatcacttgagcccaggagttcaaggttgctgtgagctaggattgtgccactgcactccagcctggacgacagagtgagaccctgcctcaaaaataataaatataacaaaacaaattaaaaattaggctaacaccaactgttatgaaccatttactttatatttttgtgttttcttcttaccacctagtaaaccatcatactctgtgtgttataaggtttctcagaaagactatataagtaacaaaaataatgataattactatttattgagccagcagcataggataacagtgggtgtttgagatgtgaatactgtcccctagaattgggcagtgcactgccatacacggcagttttacattgggcacttatgtgccaggtaccaaattaaatgcctttcatacatgatttcatttattgttcagggcaatgctgtgataaaacataaggaagctgaggctcagagaggtctgagagccacacagctggtgcatggtggagccacgatttaaacaggtctgtctgactccagagagctatgcttttaactcttgtgctgtttacttttctggcctgttatagcatgtttgctcagaaggtgagcatgtattaagtcactttattacctgatgtttaaagaagcattggaaccttcaaaattaaaattggtactcatgtttttgcttttcgaacttgaaaatgaagcataaattggaattgtgttgagtatttatatgaccacagacttcagaatctgactgcctgggtttgattgaatcctgactttccaccttgatagctgtgtagttcctcattcactctttgttggccttggttttgacatcagtaaatcaggatataataatacctttctctgctggtgatggtgcaccttgtacactaaagctcttaaaagaatacctagcatatacctaacgtttgtgagcaactgctgttagctattacttcccttttactttggatgattctcttaaactttttgtttccttaggcagcgtgcaatgttgccccacgtggcgtgtatgtttgtggtaacaccacgaccacctctggtctgacggtaactctttcaaaagatagttcctctggagattttgctttggaagctggtgccctggtacttggtgatcaaggtgagaggccaaagggaataattagtgattctgggactttttgaaaagccttttccttttcagttaatttctttacattctgtttaagagaaacatttagatagcaaagtcctaaccagtaagttgacactgtcagaaataatcattggaaatgcagtatcatcatttttatactacagaattggaactgtacttaatgtcattcattttcagaatcttatagccgatacaagtatatgtaaaaatcaaataaatatgtgtagctccctgaacttcccatttcataccacctatcatatttgtgatcattttttttaaaagcctgttttgaagctttgtagtaagctccctgtatggtgggatttggatgtcttgtggactgccatgttcccattgcctagtacataggggcacagtaaatacttattgaatgcgttactatgatttagctctaaatagtttggaaaccttggcactgacaaaaaggtggatgtcatcctttgctcacagaggacttgcaataggagattacaggtgttactttcgatgtttttttctttttatgagacagagtcttgctctgtcacccaggctggagtgcagtggtgcagtctcagctttctgcaacctctgccttccaggttcaagccattctcgtgcctcctgagtagctgggattacaggtgtgcgtgaccacatccagctaatttttgtatttttagtagagacggggttttaccatgttggccaggctggtcttgaactcctggcctcaagtgatccacccaccacacctcccaaagtgctgagattacaggctacaggcgtgagccaccacacctggcctacttcagaatgaatagttttgccgtattgtaactgaactcattggttttttttcaggatttgagtgacaggtggtaagaagtccaggcatagggcccagcaagaagaaacctctacattgggctttgtcacctaagtttctctttgtgatgccttcaccttattgggaaaacatgtttccatgcatgtgtcaggcagtgtccagattccagtccagttaaggtcgttcattccttctggtttgccagtgacttccatattctgaacccaggacctggtagccacatttgacacagttaatcactccctcctccttgagacccttgaaactctcattggtttccaggccactttacttcattctttacttctttctcagtcgtttactggttcttcatctccacaacctcttacctgttgttaactaaggtgcttagttcttggaccttttgtcttctgggtctgtatttaccttcttggtgatcttgtatcgtttcattggctttacctacctatccgtgaaaaattctaaatttataatctcgtttcccttaaatatcaggcacatacttcttattgtctacacagtatctccacaaatttctcaaacttaacatgtctaaaattaaaatcctgattttgcctttcaaatctattttcacagtcttcctcatctcagtaaatgacaactctcattataattgctcaaatcagaaaacacggagccatccttgactttttctcataccccacattaatctgtcagcaaatcttgttggctgtaccatcaaaatatatctgctatctaaccacttcttcattaccctggtccatggcaccatcatgtctcacatggattattactgtaatctcctaattggcatgcctgtaaccacgcttgccccttcctgttgtttttaatacagtaatctcattaaaaattagattgtgttactcttgctcataaccctccagtaactgcccgtctcgctcagagtgaaagccaaagtcttgagagtggcccagggccattcatgttctggcctttcacctcttttgcctccttatctgctgcttcccatgtctcctcttctctagctccattggtggctctgccttggacaccaccagcacaccaggcacgtcacatttcctcataagggcctttgtacttactgttctgtttgcctggaatgttcttaccccagatagagctgcaaaggcttgttttctttcccccttaatgttttgctgaactgtcctgaccccagtgaggtcttccctaaataccgtattttaacttataacctcccctgcccctgctgcaccttagcagaccttattttccttaccctaatctactttttccttccatagcactttttaccttctatattgtttacttttttattgcctggaccccctattggctgagtagaacataagcttccaagagcagggaattttgtcttttcagtgccatactcggcattcctagaacatagtactggtatatagaaggcattcagtttattgaatttataaatttattgcatttatatctagtaaatatttgctgaataaataaataccaaaaacatgtatctcgttattatatagctcatcagaagtgagaatatctttgctaagttaccaggtaaaatatagtaataaaaagatgatactcatgaaaccatgcaacttcattaactagaagtagaaggtgatttggaggttttttaaaaaaattttaatgccagcactttgggaggccgaggcaggcagagcacttgagaccaggagtttgagaccagcctggccaacatggcaaaaccctgtctctactaaaaatacaaaaattagttgggtgaggtggcgcatgcctgtaatccctgctgctcaggtggctgaggcacaagaatcgcttgaaccaaggagatggaggttgtagtgagacatgatggtgccactgtactccagcctgggtaacagaacgaaactctgtctctcaaaaaaaaaaaaaaaaaaagttcaaagtttatgttttatgctttaaaacaaggggtcattaaactttggtccataggtcaaaccagccaacagtgtgttttagtacagtccacaagctaaaactggcttatatatttttaaaagattgtaaaggacaaacaaacaaacagaaaagcccaagaatatgtaaggttgtgcatggcctgtgaaacttaaaatatatacttctgcacatttgcagaaaaggcttaccagctcctgctttatactttgaaaagtgacagccaaagtaggaagtagcttgactttgttcctaccccatctctgaggaattgcattagcaatcttgataatttccagtaataccatgaatccagagaggtataggcagacggagcaataggcagctcagggaaaggtggagataaagcctgtgagtctaccactgctaggatcttagcacaggcagggaaggctcactatgtcccagagctccacattgaacagcaggaacaggctaatgcactgggatcccctgccatgaatatgggacacattcccaacagaggggggtgaactctcagaagagatcagcaagaaaggtggcacaaagttcaacaaagccccccttgcttccccctcctaaatcattacgttaccaaaaagtgcaaactgtagctggaaaggaaaaaatgggtcaaaattacattgggaaaagcgtattgacaagaattcatatatactgtgtcggaagaaataggtttggacagagcagccgttattatacatgagcaaggcaaagagacagcatagcagctgtgaagaaataacgtaggaagaaagaaagacatttaatatgcccagtaaaagacctcactgtagacaaaattataatctaaggaacaaatgaaaatttcccatgagtgtttcatgtttgataagaacattaatgaaatagctcaaaacaaaaagataaggctatgagagacaaattgatgactaacaatgttattaaactaatatataaaattgacactgctgaatgagaaattataaagaggaaaggcttgagataattgcagtgaatgcaaaagaacaaagcttaatacaattagaggggaagtaacagagatagagaacaaaggaaattcaacataattggttccatgaagtagaaaacccaaacatgaaaccagaaatggattcaaggatagaagaaaatctgttgaaataaactaaaggcactgtatgtgccaggaatgtcatgtctattgcacaagttattggggactctctaacattagtttacaatatttgtcttccctgctccccataccagttaggttagcagctggggatcaaaaagactaatcagcagttattttccatatactcctctgtgctagtaaggcttacttaggtatagagtagatacggaggggtttaaccacagcaaagcccttcagatgtgacccccagatactaacctaactggtatggggagaaaggaagacaagcattacgaggtaatgttagagaatctccaataacttatgcaatagacatgacattcctggtacatacagtgcctttagttagtggtggtgcattgtattatgtttaaagagattaagtgatttccctataagtgcatacaagtgtatagtcaatacctggtataggttttgaaatatacttattaaacataataaacttactatatgtgtattgaggtatacttattaaattgtgcatgtgtgtttgtgtgtgtatgtaacatcacacccatttgaatttaactccttaagcattttgagaattactcttacctcctcttcgtttttgtaatcctcacaacatagtgctgtgcgtatgaaaaatgctaaaggaagaactattacacaaaacttagttaaataagacaaatgtattaacttgctgcagaacaaacagtaattctccattgtatgacattttataattttaactgctgaaacaaatggaaataattattgtgaaacaatttctatcctataaaatttggaacttgaccaaagaaaaaatgttttttctgctttattctacttcgattgtaggtatttgtggaatcgatgaatttgataagatggggaatcaacatcaagccttgttggaagccatggagcagcaaagtattagtcttgctaaggctggtgtggtttgtagccttcctgcaagaacttccattattgctgctgcaaatccagttggaggacattacaataaagccaaaacagtttctgagaatttaaagtaagtctcttcaaatatttatacctttaatgtattgaatcactttaattcaataagaaaaagaaatagttcacagaactacaggggaaaaacatggatatttcacagaagttataaatgtccaataaatgcacaaaaatgtgcttaaacactgcagagtaaaacaatgaagtacgaatgagatccaccagattggcaaacattttaaatattaatcatttttggcaaagtagtgtggaaatggtttctcagtggctgggcgggtggcttatgcctgtaatcccagcactttgggaggctgaggcaggtggatcacctgaagtcaggagtttgagaacagcctggccaacatggcaaaaccccgtctttagtaaaaatacaaaaattagccaggcatgatggcagccgcctgtaatctcagctacttgggaggctgaggcaggagaattgcttgaacctgggaggtggaggttgcagtgagccgagattgtgccaccacactccagcctgggtgacagagtgagacgccatgtcaaaaaaaaaagaaaaagaaattgtttctcacatacacaatttattattttgtgggaccccttggtgtgttgatcacaattctaaatgcacattctgtttgttatagccactctacttttaggactactgttcacagaaatagtcatacaagtgcacaacgataggtttatagcatgggtattgcagcattattgctgccaaacattggaaacaccttaaaactataataagactgtagtgattatgagaacgaaagtggctttatatgtactaatgggggaacatgtctgtgctgtactattaagtgagaagagcacattaacaaacttaaatatgtggtatgatcctgcttttttcaaaaacaatgtttatatctgtatgtatgctttctcttctaattcattctgtacagcttggacaaaatgtgtggaaaaggaaaaatatatttaagtgatacaaaagtgagaaaaagacaaaagagtacctcctgaaaaattagagccttaagcctagtgggggtggagttaatttcttgttgtttaataatgtatcaatatagaaacagtctttgatacatagtgaaatacacaatgtgtacttggagatttagggtatttaccaccaccaccaaaaaaatcaacctactagtagtttttctttagtaaaatgacaaagtgctatattagaaaaatcagaaagatctattgaacaaaaatccagcagacttggattctgttttttaatggtatcatgaacaaaatactgaactagctaacctctgatatgtcatgtagcagtattgccaattagtgataataggacatgaagaattcagtgggtttgggggtgtgagaaagagccatgtcctcaacctacccagggtagatacatgtaattcttgtgcccatgttgcagtggttggatatatcgaatccaagaagctatttgcttatttctttaacctaaatcttggtttttcaagttctgcgtggaacttgagtagtaaataagtgagtagacagttttctagtttttccttttgattccaatcattgtttcttctttctttcatccttcatagaatggggagtgcactactatccagatttgatttggtctttatcctgttagatactccaaatgagcatcatgatcacttactctctgaacatgtgattgcaataagagctggaaagcagagaaccattagcagtgccacagtagctcgtatgaatagtcaagattcaaatacttccgtacttgaagtagtttctgagaagccattatcagaaagactaaaggtataaatgtttcttctccttattcagtttggttctgtttgaatgtcaaagttcagtgtgtggcttattgtagagcagtaggatacaaactttttttttaccagaactttttaatatttccatactagagtttacgtaaacttcatctgaaataatccaagtcggcctggcgtggtggcttatgccggtaatcccagcactttgggaggccgaggcaggtggatcatgaggtcaagagatcgagaccatcctggccaacatgatgaaaccccatctctactaaaaatacaaaaattagctgggcatggtggtgcgtgtctgtaatcccagctacttgggaggctgaggcaggagaattgcttgaacctgggaggcggaggttgcagtgagctgagatctcaccactgcactccagcctgagtgacagagcgagactgtctcaaaaaaaaaaaaaaaaaggaatctaagtcagctaagatgagacctacagataaagtgtttggttgatttggagagtcttttagaattgtatatttatctaaacaagttatttatttattctgagacatagtctcactcttatcgctcaggctggagtgcagtggtgtgatcttggctcactgcaacctctgtctcccgggttcaagtgattctcctgcctcagtctcccaagtagctgggactccaggcacgtgccaccacgcccggctaatttttgtatttttggtagagatggggttttgctgtgttggccaggctagtcttgaactcctgacctcaggtgatgtgtcctccttggcctcccaaagcgcagggattacaggcgtgagccactgcacctggcctaaacaagttattttagcagaaatattttatttgctacttatccttgttatcttgggccttttaatcatgcttcaggtggttcctggagaaacaatagatcccattccccaccagctattgagaaagtacattggctatgctcggcagtatgtgtacccaaggctatccacagaagctgctcgagttcttcaagatttttaccttgagctccggaaacagagccagaggttaaatagctcaccaatcactaccaggcagctggaatctttgattcgtctgacagaggtttgtttctttttatggtcatgctttttttggcttaaaggggaagggtgtgccttgacttctcttttgaagtattttctgcataattgactccattttcctttctatagagagatgttagaaatggatggatgaaagttttttaaaagattttgtcatgtctataacatatccaagtatagctacttctttctagtcacagaatcaattacttagcatgcaacttttcttttgtttttctttgactgactcttaggagactcctggaatatctgaaaagtggttaggttaactaggagtatgagacccaagttgagtatatgggaacatggaatgtgtcaggtatcttgagtattttatttttttacatgacaggtccacaaggatagttcctgtgtttttaacagcagtaatatctattcacagtttgaaatactaagagaactctggcagtaaaaattagctagctcagagtttgggctttttgctcctaaaatctgattaattcttctttgttgttttaccatattggttaggtatgatttcctaaaagtaaaaggcaagggaaaaccaagtgtatttcatcatcaaatctcctgaaatgatcactcagaaatatacgttaacaagtaaaaatgaggtttatccttattttaagtgagttgtaattttcatagtcaaggtttcacagattttttttgtttgtttgccctgagtcagggtctccctctgtcacctaggctggagttcagtggcatgatcaagcctcattgcagcctctcctcccaggctcaagggatcctcccacctcagcttcccaagtagctgggactacaggcatacaccaccgcacccagctaatttgaaaatttttttgtagagacaggtcctcactttgttgctcaggctggtctcgaactcctgggctcaagtgatcctcccacctcagcctcccaaagtgctgggtttataggcgtgagccaccacccccagcccagagaattacttccatattttgacttttgatgttataaccttcctcgcctaaaggtcagtttttgtgtaaaacaagtaaatgaagtaaagcttagacatactatggtaaatatattcatctttcgtcatctgaaaatggtgttttcttttaaaggcacgagcaaggttggaattgagagaggaagcaaccaaagaagacgctgaggatatagtggaaattatgaaatataggtaagataaaaatttcaaattgttttaaatgaaataccagttatcttcccatctcaaattaggtaataggccaaggctacttttatttagcccattgggtcacttattttcctcctaaacagagtaccgtttcttagtttaaaatatttctcactgtgtaaataatctttacattagaaatttttttgaatgagtaatacatttacatagtgctaaaatcagttccaaaacctattggagaagagctatttaccacctactcgcccttcacccagacacccattgcttttccacagtctgctgtttatactcttctgtactggttttgaattttaacaatatatccagagatctttttttattagagactctttttttatagctagagtattctattgtgtagatatactatatagtatatttgatcagtcccctattgacacataaatattttccattcttgtgcttttaaataatgctacaatgagtaatgttctacgtaagatacttcatatgtgggtaagttgtgcacctacgtgataaattctcagaagcgatatttctgggttcaacagtaaatactataggtttttgataaatattgctaaattgtatcctttgcattttacatcatttagtagataatgattcctagaaggtagaaaagaaaaattagttgagcatatatgtttaccttagacatagatttttaaaaatcagtaatattattttgggtagttttttttattccagataaaaaaatttttttaataggtccatactttcataagcttcaaaattccaaagttcaaaaagtataggccaggtatggtggctcacacctgtaatcccagcactttgggaggccgaggcaagtggatcacctgaggtcaggagttcgagaccagtctgggcaacatggtgaaaccccgtctctactaaaaatacaaaaaattagctgggcgtggtggctagtgcctgtaatctcagttacttgggaggctgaggcgggagatttgcttgaacctgggaggtggaggttgcagtgagctgagattgtgccactgtactctagcctgggtgacagagcaagactctgtctcaaaaaaaaaaaagtatatagtggaaaaagtttcctcctactcagcttaatagttaccccgttcttcctgctagccagtggcaattattagcagttttttgtgtgactacatatctatatattcttttttcccctttgtagacaaatggtaactataacaacataccatatacatgctataccttgcttttttcatttaaaatgcatttttaatatcctctgatagcaatgaaaatacattatctgttaggagtctacttttccaagaccaaaaaatatattgaagatgaaattatctaattttgttaagtaatttctaattcttctaaggtagatgaattcttttgtcctagtagctgctgattctgaggtttgcgtggtgtcagaaccaggtggttttgcccaggtggttttgcccagctattcccctttggctgtgaataaaagtgcagcatagctggaagagcaagggctttggagttcaacctggagctgccatggcaggttacacactgcttctcagtttcctctggtgtaaaacacaccacaaaggattgtgctctgaggtgtcatgcagtgatgctcaataaagtgacgaatacggttctgatacattagagaacactcagtaaacactgtttactatcaatagcgcaagtcttttttttttttttttgagacagtctggctctgtcgcccgggctggagtgcagtggtgtgatattggctcactgcagcctgcgccccctgggttcaagcaattctcctgcctgagcctcccatgtagctgggactacaggtgcatgccaccacacctgctaatttttgtatttttagtagagatggggtttcaccatgttggccaggatggtctcaaagtgctggccttaagtgatctgcctgccttgtcctcccaaagtgctgggattacaggcatgagccaccacgcctggcctgatagtgtaagttttgttgatactcagatgaggctgagcagatccccttttctctgagttataccataaaccaaaggcctcaaaaactggcagatctcaccctagataagaagtttccaaaatcacccttttcaaagaatttttatggtctagtcctcagtgctctccatctaaattgtgcagtatgtcttagctgcagatccttttcttcttgtcttttcctcatagggagagactttacctagttgtctctttgtccccagcctggtactgccccatccctggaggctgctgtcttctctctgctgcctctagaggtatgcagatgggtagaagggcacccatgtcacctcctgaaggtacaagaatctgcaggttgtttcctgcccttagagggagtccatggaagaagaggaacctttctccttaattcagtctcagagtttgtaagcaaccgtgaggttctactggctgtctttgaaagctttaaagattctagaattgacagctcttaattttttattggtggcaccaaagtaactgcctcataataagaaaaattaataattattgactcccaaccctttgagctaatttctaacaacttaccttctgtgtctaagtatcctattggtatggcatcacacagtgcttttttttttttctcttttatttagacagagtctcactctgtcatccaggctggagagtacagtggcgtgatctcagttcactgcaacctctgcctcctgggttcaagcgattctcctgcctcagcctcctgaatagctgggattacaggcacctgccaccacgcccagctaatttttttgtatttttggtagagacggggttttgccaagttggccaggctagtcttgaactcctgacctcaggtgatctgcccacgttggcctcccaaagtgctgggattacaggtgggagccaccgcgcctgacatcacacagtccttgacccatcaattttctctctttatgtgattcagtactagggtttgagggatcttgtagctgaaaattttaccaacctggctttagtccctctccagttgatctcattatgttggagaccctctagttgccatttataagcaaccagatagtctaggaatttactagactttctcatacaacttgctgctaggggcatggtgtgctagcatatgaagtaaaagaatggccacaaaatctagttgtctgcctgacttcttgtgggtatggctttctaagagaccagactagagactgacctagcagagatattttttcccattaggaaagtaagtcacaacccaaccaaaatttcagaattttttttaattttaactttttttcctataaaaaaaacaaagaccaaaaataggcacttcttatttaatgatgagaagttgcttgttgacttacagtctagaatgtgtgcatcttgctttctctgcatcctgcacttgaacactccacctttgggagtgtggctgagattcccactcctgatttctttttccttttaatgatctctggccctctgggtcttctggtgcctggctctcctgaatgtcatgtttctactttgtagactgttcatctgtcgagcaaactaaggggtacactaccctgctccttttctctcttaacctgtaacattctcctcttgaggctttaccattgctcaatttctgcaggccttagaccatagacgtcacctcaactgtttactgtttccccacagtaaattcactggtctgtggacacggtagattagttctcctatctgagcatcatgcttaagcagagtaaattaggctatatttaccttttcagtaaaaatgctatattgcccatttatggttggttatacttggtataagatttctctgcatgtctgaatactcatgttggacagtgtttgcatgtgctttcctgtccaagaggaactcttaagtgttgtctcatggaactctgtatttgtactgcttcccagagttgctttggtggtaaatttgaacaagtttcagatcagtttacatctgggcccctgaaaaaaagaggtcttattattaagtgtaaacagtacccacatgacattaccagattgtttccctgaattgtctcagtatgtttactggcattcataaaaattttcaggaaaaagaaaatagtttgattggaattacctgacactatgttcatggtagagatcaagatccagtgaaacacaatgaaattagattatgaattatctgtttgttatgctcaacatgcattctttccttagtttatgagagcagggaccttatctgactcatttaccagtatattcccagggcccagaatcatgcctgtcataaagtaggccttcagtaaatgtcctgcactgatagtaaagttgaccttagtaatgattcattcattcattaaatcttccatttcagagttttcatctcttcagcttcgttcagtctttgcccttaatgtggttttaaaccttttaagattacattttaactgggaagctgacagttgaataagaaaattcttaaactgtgacatagcttgtctgagttaccagagcacttagctgtattttaaaaaactaaatgcttatatttagtagacagttcacataagctttctcctaaaattgaaaacatactaggtagcagaagagaacagagccaccttcaaaggtgaaagatcattgtttttttctatttcaggaaactagctcaaatattttacatagctttttaaaatctgaagcagtgtagcagattcaaatctgagatatgccacttactagttgtgtaacttctggcaagtcactttaatcttagcataggttggtgcaaaagtagttgcagtttttgccataagaaaagcaatttcaaaaacctctattactcttgcaccaacctaataagaatgttttttcatccgtaaaatgggaataagaatagttcctaaatcacaggattgctgggaggattaagtgggatagcctatgttaaacaaatataattaagataaatgttacctattattattaactgaaagcatttttaacaactttctcatgagaaacaagcatatgggaggttcatcttaaaagagattatgctgtatttcagaggaaaacacttaccatcttactgttttatcatttttaatagttttatttgaatgactcattcctatttgcataacgtaggcttttaactattcaaggaacaaaaggaagctttattgtttataacccattaaaatcattcctgcagctcattaagggaagggattatacctgttttgttcaccactataagcctgttgcccagcaggtgaccagtatgtatttgactaattaattaattcctgattaaataacagttttgccaattagtctggctgtgaaatatagctatcccattgttgaggcagggaatcagcaatagagttggattaaacaggatggttaattatgtttctaactagtgttttcagactttagctaaaattcactatcaagtacgtacttctttccttggtgatattgtgaaaattagagaaagcagaagaaatctggcagtaataggtgcatcctttaatatctaaccagtatcactgcaactcaccataacctttctagttcattcctagagtattttaaataccttttatttaaaatactggtgcggccagatgctgctccaggagatgggacacatttttatttagtgaagtctaaatttattatatttagaatttcttttcttcatgaatcaaaaagaatgtcccaggtatttatattgtagtttatcaattttgtgtttttatgcatttctctctccaaatttagaagtttcttaaaagcagtaactgtgtccaaaatatttttattccttatcaatccatcatagtgaatttcagagtggcccctcaataaacacatgttgaaatgtttgctaagtgagccttgtggctacttccaaatttttcttctgtaacctgaaagcccaggacaacaatttctatggcagtgctacattgggtaattttttcttcctttctttttaagcatgctaggaacttactctgatgaatttgggaacctagattttgagcgatcccagcatggttctggaatgagcaacaggtcaacagcgaaaagatttatttctgctctcaacaacgttgctgaaagaacttataataatatatttcaatttcatcaacttcggcagattgccaaagaactaaacattcaggtatgttaaactagttaatctcttttgtaataatttcaggaggtccttgttaatatatagtagaacagaaacagtttttacttatttaaaattcatacctgcttcttctcaaaggttttcagcatcttgatagtcagagggaaacattgtagtaagacagtctctatgtttttctgactgtctcttgtggatatgtcattttaacatcttttaacgttgcatccctcatctgttaaatggacatgattataccaattcctacttcaaagttctcgtgaaaatcaatgtaatagcacttcaaacatgggctgttacacattatggaaaattaacttcttaatttcaaaagttagcttgatttttttcagctaacctaaaacaaatgtaaaatattctctgcatattggaatttttactttttatttatttaggcattatagaatccagaactcaaatataggcagtttgctctgtaagaaataaaaataattttatttggccaagaaactttacaggtacatattattatttgagagatttattttaaaagtaatattttgacatgttacttaatgggctaaaccttttgatgttttcttccaggttgctgattttgaaaattttattggatcactaaatgaccagggttacctcttgaaaaaaggcccaaaagtttaccagcttcaaactatgtaaaaggacttcaccaagttagggcctcctgggtttattgcagattaaagccatctcagtgaagatatgcgtgcacgcacagacagacagacacacacacacacacacacacacacacacacacacacacacacagtcaaatactgttctctgaaaaatgatgtcccaaaagtattataataggaaaaaagcattaaatataataaactaatttaagaagtgataaagtctccagatgcagtagctcacactgtaatcacagtgactcaggaggctgaggtgagaggattccttgaggccagggttcgagaccaaccttgggcaacatagcaagaccccatttcttaaaaaaaaaaaaaaaaaatttaaacttagctgggtatggtggcacatgcctatagtctcagctacttgtgaggctgaggcaggaggattctttgagcccaggagtttgaggttacagtgagccacaatcacaccaatcactgcactccagcctgggcaataaagtaactcttgactcaaaaaaataaaaaaaattgtagtggtagccatgtgttaattgttaaataaattctccaaagggctaaaagtaaattacttataaattttttatagttgtatttttgacctgccttttatatgtatgaatatttcatagttttgcatatcagatgtaggcatacagacaaatacataaaccaatgaatatattacatattctgtgttccaataaaactttatttatggacactaaaatttgaatttcataaaattttcccatgtcaagaatacaaaatacttgagttttgtttttagctatttaataataggtctcatttattccacaggctgtagtttgtagtcttgcttgaaacaatagaaacagactgattaagcaggagaagttttttgaaagaattttgtttggctcacggaattattagaaggcaggtgaaccaggagggtaagcttccagcagcaatttgtaaaaccatgccttagaattggactaaggaagaagctgctgacactccactgccacacagggcactggaagaaagtgctgctgcctccctgccccacctttgccacttctgcagcaggaataggtagaagaatgcccccacccgcaccggaacagcaacaaaaggattctgcatgagatgcctccctaaattgctgaattcaaaaaagaagttgcatacaaagacatctgattgaaaaagggtatgttatatgcccctttcataggctgctagggagttttcctggttctactttcaggtggtgggatcaataagaccagaatttctcatatgttgtgagaggattcaaatgttacagggttgccagccaaactatcaatcatgtataaatccaacaaacactttgtaacatacaagaactcaggaaatgtgaaccattgttggagaatctactaaaatacggcttcccgcaaacgaagatgaatggaaaatgtaaataaaaagaactggcagtgtatatcagatgtttaactataggaccagaactaagatgtggagactattgccatagaccacaatgtaaatttttaagtgaggaaggaaaaatcaggaatcaaaaggggccaggtgcagtggctcacatctataatcccagagctttgggagttcgaggcaggaggatcacttgaagccagttttgagaccagcctatgcaacacattgagaccctatctctacaaaaaatagattagctgggcacggtggtgcatgcctattgtcctacctactgtggaggctgaagtaggaaatcacttgagcccgagagtttgaggttacagtgagctatgattataccactgcactccagcctgggcaagagagcaagaccttgtctcttaaagaaaaaaaaaaaaaatggagaaagtagatagtagtataaatatagtgaagtctttaaaagctaggagttaaaagatatttaaagcaaataactcaggcatggtggtgtgtgcctgtagtcccagccactaaggaggctgaggcaggagaatcacttgaacccgggaggcagaggttgcagtgagccaagatcgtaccactgcactccagcctgggcaacagagtgagactctttctccaaactaaataagagatatttaaagctgaaaaaaaatctattaatagaatttaaaacatttcacaaaagtcaacacataaataatatcaaccaaaataaagtggtagacagaagagaaaatatactaatttattgttcaaagaggaaaataagtctcaaaggttaaggctattatataaatttatttttaaaaagacataaacctacattttcagaagaagaagttccatgtttccttagattatgtatttagcatccattaatcacagggccaaactaacaacaaaagttgtttagctttcccttacaatccagcttttatgggtgtgcaaacatcacattacagtccctccaaccacaaaccccaacatatagtatttcacttcctgcccaatagtgggtgtccccacacctttcaaccactgtagcaacaaagctctggcctaggcttttcacttgcttctttactgcctgactgactttggtgtttcctcatgtggcctggtgtggcatggcacgccctcttgggagatgaaagtaatcttccataggcaattgtttctgtgtcaccattgctgattaaaacaaatcctaagtacaaatgtcagaacagaaacatgcaaagcaagaaaacattacatcatgaaagtttctttttttttcttttttcttttttttttttttttgagacagagttttgctctttttgctcaggctggagtacagtggcgcgatcttggttcaccgcaacctccgcctcctgggttcaagcgtttctcctgcctcagcctcccaagtagctgggattataggcatgtgccaccatggctaattttgtatttttagtagagacggggtttctccatgttggtgaggctggtttttaactcccgaactcaggtgattgcctgcctcggtctcccaaaaagtgccgggattacaggcgtgagccattgtgcccagccaaaagtttctttttcaagagatggtggtcttgccatgttgtccagtatggacttgaactactcagctcaagcagtcctcccacctcagcctcctgaatagctgagactacaggcatgcaccactacacctggctgcgagatgaaattttaagagatgggggtcttgttctgtcgcccaggctggagtgcagtgacatgatcaagccgtgatctcctgggctcaagcaatcctcctacctcagcctcctgagtagctggaactacaggaatgcaacaccatgcccagctaattttgatttttagtagagatgaggtcttcctttgttgcccaagctggtctcaaactccagggcttcctgagtagctgagactacaggtgtgagccaccatgcccagcctcctctcttttccaatattgtgttaagtaaattgtattggtggtaatcaacttgatcatttcatttttaggatagagatatcaaggtgagggtataactgaacgagaagaggaataaacaccaccctgtgattgatggatctttatagctctcctttgataaagaagggaaatatcgtacttacattagcatgttatagttgctgttgttatacagaagaatattaaacaatattcatatattgtttatgaatgcattgaattcataaacaatggtatggatattgactagccaaagaggtggataaatgtagatacaatgatacggtgatttggtattcagtgtccattctgctctcctagtgtgccttcctataatgcaggggctggaaggtgagaaaataaccacatttcccagactccctttgcaggtagatttccagatgtgaattgggttccactgatcagacacccatgtgtgagatttggaatgcagaactgaggagagagccatcttcctcttgcttgtgttctggtggcatgtgtggttgaggagacatttaatttccctgcagcagaattcttgcagtcagttgttgaggcaagtggcgtggtggatgcaaccctgattcttcacctttctcattattgtggggtagcagcgcctctggcaagccagacagacctgcagtgtttttctgggagttaattctggagacccagtatggaacccactcctagcccttgtgacaatattgcaagcatccagttccctgttttacagtccttttaaatgtggctagctacagtagtttgtgtttcctgcaactaatcactcatacatctgtatctaaagcactccacctgggtcatgtactatacttaaaattataaggcaatattaattcacaaaactacctactcgttttatttaaccctcagaagaactgaaaacaaaagctataccaggcttgctctagagcgtgggcttgggaatggaaaggcagagtgcacctattgaattccatcatcagtttttctataccatggagttacttaccatgtgtatacataacactgattaaaaattttaaaaaaaaggttaaaacaaaaactgagccagattctgacatttaaatcagaattattcttagtacatagacttgcaaagtcactgaataattccttgggactacagactcttagtctttgcttctagaaatgtatagtaatttcaacatgtcatatatatagagagagtatatatgtgtatatatatacacacacacacacactatatagagtatatatatacactccatatacagtatatatactagtgtgtatatatatatacactagagtatacacactctagagtatacactctataaagtatatatattatatatactatatattatatatactatatactctacagtatatatatacactatagagtgtatatatatactatacagatatgtatagagtatatatactctatatatacactatatatagtctatatactctagagagtacagtatatatatatagtgtatatatactctatggagtgtatatatattctctttctctccatatatatatatatagtaatcagcttcctcaggttgaaacatctagatatattgaaaacactggatagtctgcaaactcctcttccttagagaatgtatattatctttagtattaaagtgactcttgtaagtcctgagaaacacctcggaacactgcattcacgtgtttgctaggcagaatagtacccaccctgcaagacatcacatcctaatgcccagaacctgtgaatgtgttaggttacatagcaaggggaaattaagatggctaatcaggtgaccttaaaatagggagatcatcttggattatctgcatgggtccaatataattagaaagaacctttaaagtggaagagggaggcagaagagagccagaggaagatgtgactacagaagaaggcacggatgcagcattgctggctttgcagatgagggaaggaggccttcagccaaggactgtgggtggctctagaatctttttttacatctcagtatgtatgccacagttaaggtttttgtttttttatttttgagatggagtttcgctctgtcatccatgctggagtgcaatggtgagatctcgactcactgcaacttccgccgccggggttcaagcaattctcctgtctcagcctgagtaactgagattacaggtgcgtgccatcatgcccggctaatttttgtatttttagtagagacgaggtttcaccatattgatcaggctggtctcgaactcctgacctcaggtgatccgcccacctcggcctcccaaagtgctaggattacaggtgtgagccactgtgcccagcctcacagttaaggtttttaaacaatctgatttaactgaataaaaaatgctcgcttgtgtggcgacatggtttttaaaaatgtaaacagagctgggcatggtggctcacatctgtaatctcagcactttgggaggccaaggcaagagaactgttgaaggtcaggagttggagaccaaccagcccagggaatatatagggagaccctatctcttaaaaaaaaaaaaaattacctgggcatggtggcatatgcctgtggttccagctactcaggaggctgaggcagtaggattgcttgagcccaggagtttgaggctgcactgagccgtgatcacaccactgcattccagactaggtacagagcgagtctatgtggagtgcaatgtctctaaaaaaaaaaaaatacccaaaatataaacagggactatgaggtatgtacaggaaattaatagctgaagaatattttaccatgttcaaaaactaaattcttcatgtggctgagagaagaaagaaaaaaatggtatgtttgtgttccatttgcaggtattacataaacccattttaaatgaactaaaatgcctaggatttgggggggaaaaattatcttgtgctcgcatttgaaggttcttctcagaaataaactgtttaaagagaccacagtactggtttaattttttttctgcaggaccagagggaaacaggtggtttaccatttttggaaactctgtcacatgatctgaatagaaaggatagttggatgtaacgttaaagctttctgaaccagcaatccccaacctttttggcaacagggactggtttcaaggaagacagttttccacggacctggatgggggaatgtttcgggatgaaacttccacctcaagtcatcattagttagattctcataaggaacgcacaacttagattcttcgcatgtgcagttcacagtagggttcaccctcccatgagaatcgaatgcgctgctgacctggcaggaagcagagctcaggtggtgatgctcgcttgcctgccgctcgcctcctgctgtgtggcctggttcctaacaggccatggattggtactggtccacagcccaggggttggggacccctgtaacaaaaggaaaacaagattcttaaatctttacaggaaggaggaatggaatggaaaataaagctagttgtacactaaatgatgttaacaatccctttatcacctttaaaatatgagcagagaggaaagaaatattaaaaccaaccctttttactttcttatttgtagataatgcctgccttacgagaatgttatttcttttaaaggttccaaaacaaccatataaaaacttagtaatgacttaattgttcacatattctagtgacatcagtacattttcaggaagaaatgtggaaaggttggcactagaagttgacataagaattagtttagccaggtgcagtggcacatgcctgtagtcccagctacacaggaggctgaggcaggaggattgcttgaagccaggaattctgggctattatagtgtgctatgctgactgggtgtccacactaagttcggcatcaacatgttgatctgggagtggtggaccaccaggtttcctaaggagggatgaacctgcccaggccagaaatggagcaggtcaaaattcccgtcctggtcagtagtgggatcgccccgtgaaaagccacggcattctagcctgggcaacatagtaagaccctgtctcttacataaaaaataaaataacaaaaatgaaaaggagaattagtttagatctcttgataatttaaacagtaatctaaattatagagtttaggtggagttaatctctgcaagtcctgaggagctatgcccaaggtgcttggccctaccagcaatgcactcttttgcttacatgtgtttcaaatcttaaatcccatcatttagttttttcctatttaggctgtgggacggtgcgtttattacaatgattgaaacctgtgccttatttggattactggttattcaaaacacatctttgggtttagtgcctggtaattacagcttactcctgtaagatttaactgtcattgattcctagagaattttttttgagacaaggcctcggtgggtcacccaggctggatggagtgcaggggcacaatctcggctcactgcaacttctgcctccctgggctcaagcgatcttcccacttcagcctcctgagtagctggtaccacaggcacccaccatcatgcccaggtttatttttgtatttttggtagagatggcgggcggggggagccggggggtacggtgtgcggggcaggggggtgggggggtggtcctcacagtgcccaggctggtttcgaactcctgagttcaagcagtccacccacctcggcctcccaaagtgctgggattacaggtatcagccaccatatccagctgttttaatttgatttaacttccaatcaatatttacataagactcatttgcaaaactgccttctttacattatcttcttctggttttaggaaacaaaaagtagcccaagtttattgtgtcctagactaaataacacaagtaacactacattacactgcatatctgatataagaacgcagtacacatatttctagactttgttcatttatccccaggcagaaaatattcataatagatttggaataagattttcttctcaaaaagcttaaacttcaaatagaagtgataagtgagaaagaatgattgggttgcagaattttcaaaagcctaaaaacagcctgggcatggtggctcacacctgtaatcccagcactttgggaggccgaggtgggcagattacttgaggttgggagttccagaccagcctgaccaacatggtgaaatcctgtctctactaaaaacataggagttagcagggcgtggtggcatgcgcttgtaatcccagctgcttgggaggctgaggcaggagaatcgcttgaacctgggaggcggaagttgcaatgagccgagatagcgccattgcactctagcctgggcaagaacagggcgaggattcatctcaaaacaaaacaaaacaaaacaaaaaaacaaaaacagaaagcctaaaaacaggttccaagaagttgtagcaaagaggtaatttgttccaatatacagcacagtcatacacagcactttgcaacttaaccaaggaaaacattaaaagtggcaagacaatactaccctctaggggccaaatttttatgttcacaactcagcaaaggatcaatgaaaggatgaactaaacagttaataacaggccagttattcaagattgaacaatcctttctcttttcacgttctcttggggtaagcactacatgattgactacagaagttgggataagacacctgaccagtacattttggttacttatgaaaataattctgatacaagggtggagagagaaaaatttgaaatgaacttcatgaaacgtagaatttatatatagatttttatttatatttttattacagacttactattctaattttttccccatttgggaaaaaagttcagtgacagatattcccagtcccttcagacatatgaggtgcctgtgtgtttaatctacttggatagaaattattacagaattcataaaacaggaaatgaacattataaaccagttactaactgtagaatattttggtttcctctgccccctgccctgctctaaactctacttcactgggtttctgcattttctccatcctttatcccagattaacctgttcatttattgacttctgtcaagttctagaaaatgagatcaaagactgatagctggatgttctcccgtcttaaaatgttagggaaacagtttgttaaaagcatgttactctttagtcataagtattgagcagtcattgtctttcaggccaaaatgccagccactttattttcctactttttaaagacaattagccatcagcagtttgtagtagagctggctttttaaatacaaaacagtttattatattttaattggcggactctattgtatcttggagtttttttctctaattttatattgaagtgaaaaataggaagaacataaaatttgctacatagataattttggggatgttctattttaaacattgataacagtataattccatattttgaaatatacaaaaaatatatacaactaaaatggtatctaaaacagaaacctatgaatgctagctccaaacaataaggcaaataagtgaagagctcaggtaatggtgttattcttgagggcacaaagcctggataaaactagattaccataaatagtagtacggaagttgaagaaatcaacacagtaactagaattaatttagaaaaaattaataaaaggttggacaaataccataagtaatagaaataaaacctatgagagcaacaaagggaaaaaacacaaaaacaagtttgtgtcctcagtgccaaggattagaggcagatgaagtacaggctgaatatagggaatagaaagaagtcccaagacacaatgagtgtcttaggaagcggagagtgaataaaggcaatctcatgaaaggaagggagagactggaatcctgcccactccctcttgccagggttatccagaattaatgtttacctatgagaactgtgtttttaaatagtttttaaattttttaaaatttttacattgctgttgcagaagtttccatttttctctcaatgtcaggatttcaatgtaagaaatagattttttttggataaatacccgctgcttcatctacaatgttgctcactttcagttggcctttccctttcctaactacccgaattaagactttaaactcaactgtaaggtagttcagccatcatagatggggttagtggggcgatagtggagaggcggcaataatcattcaaattcagttcaacactgaattcaacaagaaaaaattctgtaacattgcaaatattgatgtatcaatatgtttagtatactaatctgaatatattaatcagctaattaatggtgagctgattcataactgtctcggatattataggcaagtttcttaacctctctaaacctaagtttccttatctgtaaaagtaataatggaaccctcatcttgcagtcgttgggaggattaaacgggatgatgcactatagcctggttatatagtataattgaaacttttgtactagcaatgtaaaaatttaaaataaaaactatttaaaaagacaattctcataggtaaacattgattctggataatatagtattactgttttcagcaaaacaatcagccattgctattactaacatttactaatgcttatatttttagcatatgcatctttattcaatgctcaaagaggagagaattacagagccaatatttattaatcatttcttctgcactagatactgtaaaccacccacaagaaccgtagggcgccgcacgcaccttggagggggcccttctgccggccacccgcctcagagggtttcaggccagggcctgaggtggctccggccccctcgcggctacgtcggctgcgcggtcatcctatcttgttcgtttctcccctttccccgcccacccccgggccttggctcccggctgcgggccaggagaagagagcgccgcgtacccgctgcttcccaaaacccactgagcctgatgcgcgcgcctccgctgtgccaggggcgccgggaagcccgacgacgacggtgtcgtaaaagcgtcgcgaaggcgtccgcccttggcggcttcctgccacctgtataagtggagtgtgctggggtgtgtaaagtagtatggaggcagcggtagcccagtgtctgagtggttgccgggtctccatggagaagcggctcgccagtgtcccaggctgctgagctctcgccgcccgagaccccgcggcgcggccgcagggccatgctagccttgcgcgtggcgcgcggctcgtggggggccctgcgcggcgccgcttgggctccgggaacgcggccgagtaagcgacgcgcctgctgggccctgctgccgcccgtgccctgctgcttgggctgcctggccgaacgctggaggctgcgtccggccgctcttggcttgcggctgcccgggatcggccagcggaaccactgttcgggcgcggggaaggcggctcccaggccagcggccggagcgggcgccgctgccgaagccccgggcggccagtggggcccggcgagcacccccagcctggtacgtaccgatgaggcggcggcgggccggccctgggctggggtcgccgcccctgcactcaggtaacaagctctgggtggtgcagctcggacgcttccgtttcctaacttttagactcttccctgaaaagaagttactggcaggtcattcggtcgggatgaatttcagggtcaccagcggggtccacctacggtctctgtggtcaagttagaaatcctctcatcccccttctatctgcacccgttgctggaagggccgcctctgcatattgcattgataaaggtagccttcgcttgtcttactaaaagcctatttttaattcttttgaagtgaatccccagtgtttagggcaagtctttgggaatatttagaaaggtatacaggcccttctgtttgcttgtgcaagttccgttcaccatcatttgacctttggtaaccttacacattataggatgaaggtaattaaataatttaggtcgtaattaaaagatcttttaacctttaattatagaaaaagatttaaactattcttgaggtaacggagggaagtatttgtccacttacctgttgatatgctacccagacagaagacacccgagcatgagtgtgggagagcttttgatgtcatgttagcaagactcatgcaattattacatcttcaattgttatgtcttcagtggcccctgtactgctttcatcagttgtacagcatgggttgaggtggccagatcctggcaggggtctcaactccactgatagctaaagcatgttggggtttgaatgctggatactttgaagttgccatatcctgactgaagtccttcccagaacggcagtagttggtcgagtatgccacaggttatctggttgagtaatctgagattagctctcctaacattaactttgaaacttttacggatttaatgattacaaattaatgagacaccttaactgaaatattctatgtggagctaaaaagaactcccttcactgttccagcaacattgagttctgtttgttaattcgccaaatgaaatgatgtttctgtttacaactttgtctttaattttgccctgtggataatttctgaagttaatttggggaccttttttctgatcttttgcttactgcttttttgcaaccgtgtgcagccttctcccctcccactcttccctttgagttgctgtaacctttgatcagtatttgacttattctctaccatagtatggtcaacagacttatcttttttctttggactctgaaacactctgatatttgaacttgaatttgggatgtattccaagaatgttttcattgtataatgtggattactttcagtaaaagatctcagagtagaggtttgtattgcttcttgttttgtgattgctcttcggataatttgaagtttttctatagctttcaatgacagtattctgccacctgaccccagcaataactatttaattatccctccaagctgaggtgctttcttgctgggtttcttttataaacacagacatagtgtctttagagaatacttttttttttttttttttacaggatagttcatagaattttaaaagaatcttcagaaatggaattttaaaagaatcttcagaaatggcctttgccaccttttttacaaccaaaattaagattcaggcaagttggctagtactgattaagaaagaggttaaaaggggttctagagaagagaaagtcccatggagtggaattggcagtcttgacacagcggagaaaaaaaatctaggcttcagggaaaggcgttttcttgttgttatttctgtaccctgttgtgcaaggtgtcttagctccgctgggccgaggcttttcaaagctgaaatatcctctcatgagtcagattctgtttggcaagaaggggatgttcttcagacagctgccaaagagctcttttgttagtgccaacttcaaacagcttggctccaaatgagttgtctaggaattgcaaagcccccagatgggagctgtgaaagtccttggtttttagttgaggatcttaacatttccatgactgttttgaacaaatttacacaatttctcgatttccaaatatcacaatccctattcctatctccattttcttctagcagttctctgacttagtgatgaggttatagaattaaatctgtttttgttctcttcattcaaacctccatacactctatatagcatttagcattctttagatatgtgtaagggagtgagggagattctttgcagtatttaaagctgaatgcctggagttgataatttggccttttttcctgacacttttacttgtaagtagacactgtttgtctatttacaagatcttcctgaagtttcacctttaaaagcagagtgttgaaagttctgagttcttacaatgaagttatatattaaaggcttagcttatatggcagataatacatgtgttctgtcttccctctcttaagaaaacctataataggccgggcatgctggctcacgcctgtaatcccagcactttgggaggccgaggcaggtggatcacgaggtcaggagtttgagaccagcctggccaacacagtgaaaccccatctctactaaaaatacaaaaattagctgggcatggtggcgggcacctgtaatcccagctacttgggaggctgaggcagaagaatcacttgaacccgggaggtggaggttgcagtgagccgagattgtgccactgcactccagcctgggcaacagaactagactccatctcaaaaaaaaaaaaaaaaaaagagaaaaggaaacctataatatgtaagacaccttaccctgtgtttcggtacatgatacatcttcatcttttgtattctttttttttctttttttaattaaaaaaaattgagatgggattctctccatgtttcccaggctggtctctaattcctgggcttaagggatcctcccgcctcagcctcctgaagtgcagggattataggcgtgagccatcatgcccagccatcttctgtattcttgaaagaagattttagggagatatctgtaaaaagaacagaatggattttaaaattcaatttaatgtactaaatttaaagtttatgtagcttctgactgaagttgatgaagtatatttttctaatgtatgtatatagttattcaaagtatgaattcatagtattttacttaaattttgttgtctttgtgtttcagtatgaaaacccatggacaatcccgaatatgttgtcaatgacgagaattggcttggccccagttctgggctatttgattattgaagaagattttaatattgcactaggagtttttgctttagctggactaacagatttggtaagttgtaaatgcactcccagtttgctctccttccaaatcctggtctgtactactaaaccgaaatagcatagccttagcctgcttttccttgggaggaaaacctcaagatgaatttgacgtggtactttttgtgaggactttgtctttagcatctatatgggatttttttttttttttttcatatgatttcaaggaggaagcgaaagttgtagggaagtaaaggaggggatactttgtactcttggtttttaagagtgaaagaaacacccttagaaatttccaaagagctgagtgcttgctttagggatagaaataaaggagaggagatctgagatgacttttctatgtattgtggtaaagaggaatactcagatctgcaaaaaaaagttggttttcctagtggagagggaaactggaccagttgttatgacccagggaactgggatatgaccagaagcatgtagaagtcatagctttgctcaggtttcatgctagcagaaggctgtaggtacccccacagatttattttctgatctctgctctacacccctctgactgccctgcagaatactctgctctgggctgacaattggacgtccttccttcattctcctccctcagcagatggacaaagaagaggagctctccttgatactacattgttagttttgatagaggagaggaggatttattcagatgatctcaaattagaactggaaaataattttataacagaaggctacattaaataggcttttgtggactggctagccatcatcatgtatgacattatttgtattaccaactttatttcaaaaaagtttcgaaatgcattataaaactggctggacacagtggcttacacttgtaattccagtgctttgagaggtcaggagtttgagatcaacctgcacaacatagcaagagcctatctctacaaaaaatttaaaaattagctgggcatggtggcatacgcctgcagtcctaggtactcaggaggctgaggcaggaggattgcttgagctcaggagttcaaggctgcagtgagctatgatcgcaccactgtactctagcctgggtgacagagcaagaacttgtctcttaaaaaaaaaaaaaggaaaaacttcatgctgtataaaaacatagttgagggaagtgtggaaaagatggaggaataattttaaaccagggcagagttagcaggagaaatagatacattatattcttgtacaaggttggtctgagatctatatgagcatccagacaggcggtgctttggtgcctcttcaaactaatttatgtttgaaaagctttgctcaatatttattgagtgagaatcgagagaaactagttttatattaataaaagttgtatgccgtctttctttgtaacatcagctgttctcttcgaggttcatagaaacaaaattccaccttcctagtagcagtagcattggtgggcaacataaaattaacagaagattttggagtgcagacaaaagagagcatttgcattgttacatggcatttccaaacctgcttcaaacatagcctcccaaattggctttacctctctttttccagagtttagcgtctactaatatttgtcactacctcttcccattctcacaatctttctccttttcttttgtccctgcttttttttttttttttttttttttttttttttttggggagactgactctgtcgcccaggctggagtgcagtggcgtgatgtcggctcactgcagcctctgcctcttgggttccagcagttctcctgcctcagcctcctgggtagctgggattactggcatgcaccaccatgcctggctaatttttgtatttttagtagatatggggtttcatcatgttggccaggctggtctcgagctcctgacctcaggtaatccacccacctcggcctccctcggcctgggattacaggtgtgagccaccacacctggcctgtcccttcttttatcccaaagcctgcattcattgttaatattatctccaagtctgtcaaaggccattatactgataacagtttttttttaacataacagacaagatctttttcagttactgtagtctccttttttgtctgctacgtttttttttttcttgtaagctgccacatgagattgcagtattcattgaatgttagagaggccccattaacattttactaaatatataagatgatgtttgtggaaacctaagttaactggtgccacatttcacatttgttccatggagattttagtgcctttcaattggccactgggaggtggtcggactcatcagtttaagccagggaacgacaaagtctgattgcgttgtgtgtggaaaatggattatagacagctaagagtggaagctgagtaagtggttagggggctgaccatgatccagcaagagtggaagcagagtaactggttaggggctggccgtgttccatggcagccgtggtgggagcttagactggggttggagtttggagttggagagaagtgtgtgggtttgagatatattttaaagacagaagtaatatgtggatggattagatatggagtgagagtgggaggagtcaaatatgaatactagggacttactttaaaaaaaaaattctcttctaaaaccaggttcatggaaatgacattttctgtgatgggcaacacttgagtagggcagagtttaagggagaatactaagaattctgttgcctatccacatagaagtatcagttgggcagtttagtagtttggagttggaggaagtcatcgttacagagagagaaatttgggagctgtcagatatagatggttggatctgggtaaaatcatccaggctgaggtaacaggaatgaagggtcagagaaatgagcaacaagtaaagcaccagaaaagaagccagtcaggaaccctgggaaggaatagctggcgaggaagaaaattaggcagtgagatttcccagaaagtggagaaagtgcttcagttgtgtcgaggtcaggtactctaaaaatgcggagttccttggtgacctttatgagcctcacctctggaggggtggggacgattggagtgggtcgatgaacacatgtgagatggtaatgacattggacgttcctttgaagcagttttgctttgtagggggatagagaaataggatcacagaagggtcttttaaaaagatatatactggggaattatatctatgtgtatatagatagatagatataaaatcctatatataaaaatatatgctggagtatatgtatatactggggaatttttgtttggcctttttttttttttttttgagataaatctcgtgttgcccaggttggccttgaactcctggcttcaaacgatcctcccacctcagccttccaagtagctgggactataggtgtgccactgtgcccagtgaatttttgttgttagttaactgattaattaaatgatcaggtagaaagattaaatgaaagggagagatggatgatgcaaggggagatggggaagaagggaggcaggtcacagaaggtgagagggcatgggaacggatgaaggaaggcagagagaatgaatggatgcaggtaggtgggggatttgatgatgggaatatgaggatgggctgactacggttttctttttccttaaggaaaatacagacatgaccatgagcgagagggatggagttaggtctgaggtgagagcagagacagtgtggaagagacagtgtgaaaagagagggtaaatatggtaaacaagtgtgggattgctaggcagtattgggtgcccatgggagatttgtggtcatcagtttgaagtgagaccagtcttcccatttgtgtgttttccttaagcactattcagctcttaggtgcaggcccagagtacatggagagttgcttttaagcagtgttgaaggagagtggagtgaaggggagttacagatgtttataaaggaatgatgttgatgaccttggaatctagtgtggattagaggaatagtgaagatgagagggtgatgatggcgaaaaagtgaaaggttaagttccctgaggtcagaaactgaactaaacctgatcttccaaggtcccagctccccaggctaggtacttttctgttcgtatgcttaagaaggaaatagattttttcagttgcaatagcaatagctagtaactgctttttttgaggatttactaagtgctgagtgctgaacaagtattaatcacattgtgtgctgaagacaaccacccctttgaggtaggtaatttatctctgttttacagatgaggaaactaaggcttagtcaggccaaataacttatccaagatcacacagctactaagtggcagagccaggacttgaacagcttctgttctgctacaaagaccacatttttttttaccacggtcctggactaccgctgtctcctctaactcattggaatacttgagatatggacaacttacttgttctttaaaatgaaccatgattaattgcgtctaaattaatcttttttccccttagaaatagtattagagaactcaaacatttgttgaaacttgaagttaaatgagtaaaagccaggaagggacttggataaaccagaaaatatctgccttgtttaatgtgaatagacagtacttgatttcagtccattttgtggccccagagtggccagaccgctcccttctcaagttaggatggagacctgggtttttatgggaagaattgaatacttacatgttgataactaattacagtttttaaaagctctgataggtcaaacagaaccagcttacaggctccatttggcccactagcaactagatgtgacttatgctttaaatggtttatttttaatcacaataatataaaaataaataatttaagtatcagaattttaactaggccaggtagagaggattgagttttctattcaaatgtaggtaatgcagatacagtcagagtatggaataaacagtggtattgagcaaaatgagttgaaaaacagaaaaatggtaagttttaacagagttggattatattatcctagtccaggctctgccgttcatgctttctttgagttttctttgggttctttatagctgtaaatacatcactaaccgtatctctaaatgtgtatttgggttcatcccacaaaggggccttgtgaaaataccgagaaataaccagaaggacttgagggggaaagaaaataaatgtgcatttattttaagaccagttgctaatttaaaagcgaaatgtataccagcaaaagaatgagaatgtttgggggtaagaaacagaagacattttgttaacattttatgagagtataattgttattctggtatatcttaagcttcagaatatctgctttgttcctgttatgacatttatatatataaaaaaaaacttctattttcagttggatggatttattgctcgaaactgggccaatcaaagatcagctttgggaagtgctcttgatccacttgctgataaaatacttatcagtatcttatatgttagcttgacctatgcagatcttattccaggtaagaacgcgtcatgcgtacttttgaatagcacagggaagaatgacattagtcagcttaggatttctcttgagagacaaataatttttgttccaaaaatatagttttcaactttaaactgtttccctaattttaaactgttgaactgttttgtcaaactacttgtggattttagaatttatgtccttgttttactagtaaaatcagttgctttcctagtaagattgtttaaaattaaaattgaataaatatttcacagtgccaattcatattactctgaaattttttggtgatacattatgtatttttagtgcctagcttttcaaaagcaatttagttttcctacgtttattatctttattaatatcgtttaatcataagtgagaactctgaaattctgaagatgtctataaaatttcacattatgtagaccctattatgcaatttttaaatcatatatatagtttgtacattatatgaatactttttctgataagatttcatgatttttttgctttgtattttgcatgtgcttttctgattgttcattttcttcttcagtcgtatttctcagtttttctccctcagaccaagttaaactgtttttttcccaagagctaggaatcatatctgatcacactgggacttcccttcactgtcagtctaagagtttgcatttttgaggtttaggaaaagggaaaaaaaaggaagaaagaaagaaattgtatctgagaacaaagaagctgccacatggtccctcggtatcatgttattattgacacttggtagaaagaagtatagtggcatttcagtctagtctcccccaactggaaattatttttctttctgatttttagtcttttaagttctcgtaccaaaataaaaaataaattggactaatgtttacttttatgtgcttctttgaaagttagaattgaggtgtgtatgtgattggggaatgggggtgtgtgtgtgtgtgtgtgtgagttttcttgcctaggctggtctcgaacttctgggatcaagtgatcctcccacctcggcctcccaaagtgatgggactattggcttgaatcaccttgcttggcccctgccattttttcaaagttacattgtattttgatgtagtattttacaaaggttggccagtcattttgctattgaacatagaaattgtttccaggttttttggaattatgggtaatgttgctgtgagttttacttatatgattggtgtaggttgctttccaagctgagacttcccttcactggcaatcttagagtttccattttctttcttctgtgttgagtctgtttttccaggctcccatgtcttcctttgctttaagttactccttttctccagttgttttctgtagaaggatggagtgtggcagccagatttttagaggtcttagacatctcagtgtctctattttgtcttccatacatgattgacagttgaagtaggcatcacttttttttatcttttatctttttttcttttctttttctttttgagacagggtctcactctgtgacccaggctggagtgcagtggtgcaatctcagctcattgcagccttaacctcccagctcaagcagtcctctgacctcagcctcccaagaacctaccaccatgtgcatcaccacgcctggctaatatttgtactttttgtagatatagggttttaccacgttgcccaggctggaggcataatttttaaactgcagatgattttaattcagaattgtgaagaccctcttccatagacttggagattccaacttgctacggaacagtctcttatcatttggataccttttcctttacatgggattgtgtttagtattggaaagcttttaggattttaagaaaatgtgattcctaattgatgttttctttaaaaagttatctctcttaattcattttctaatgcttatatggctacccagttatcctagcactttttatagaaaaatttgtatttttcagactcagtgcaaggtaatttctaagttgttttcttccccattgtttgtctgtctttgcatcagtggcattcttcttattgctttgctaaaagtcttgatatccagtagagtgagtccttccaccttggacattcttagccctttccatttgtttccatttgttacaaattttagaatcagcttttctaagaatcagcaattttccagagaaaaatctgtttggattttgattgggattgcaatgaacttatgatctgtttggaggaatttgcatctttacaatgttaagtcttccagtccagtatctactccattgaggtctgctttaatatctctcaaagttttatagttctctccagaaagataataaacacttttgttagacttattcctaagtacatgatagttcttggtgcttttataaatggtagcttttaaatttcattttctggccgggcacaatggcttgcccctgtaatcgcagcactttggggggctgaggtgggcggatcacttgagattaggagttcaagagtagcctggccaacatggcgaaaccctgtctactaaaaatacaacaattagccatatgtggtggcacgtgcctgtaatcccagctactcaggaggctgaggcatgagaatatcttgaacctgggaggcagaggttgcaatgagccgagattataccactgcactccagcccgagtgatggagtgagactctgtcctcaaaaaaaaaaaaaaaaaaaaattattttcttataactccatgttgatatgaaaaaatcagtactgtttctaatgttgattgttatgtctagcgaaacttgctaacttgtattctaacaatatacatataaatttgcttggattttttacatgcttatttatgtcttgtatgtaattaatgacaacgtatttcttcttttccagtccttttaccctttgtttcttttacttgccttactgcactgagtagtacagtgttggcaaggagtggtgtcaatgtcttattcccaacctcatagaaaagcctttagcgtttcactattaaagatgatgtttgctgttggtttttgtcagtatcctttttcaagttaagaagttcacttctgttgggagtttaagagtttttctcacaattgggtactgaatttttttgtgttttttgtagagatgcggttttgctatgttgctcatgctgatcttgaactcttggcctcccaaagttctgggattataagcataagccaccacccctggcctggatattaaattttatcaaactccttttgtgtattcctatggtcatatcatttttccctttagctgttcatgtgtggtgaattacacatattaatgcaatattagttctaatgttaaaacaagctgcaattcctggtataaatccaacattgccatgatatattatgaagagattgctggatttggcttgctaatattttgtggaagatttcaaattttaattcatgagattggcttggaattcttcatatattcttgttaggttttcatatcaaatttataactagcctcataaaatgaattggggacttttttttttcttccattcttggaagatgtttgattatgaatatttctacttaaatgtttggtagaatctgttaaagccgttgaggcctggagttttctttagggcagagttttaaaataggtaattcattttctttaattgttacgggatgattcaggtttaaagtacatctttttttttaaccttcaaccaactcactccatattacaccttttgaccagtttttaagttgtgatgtttttctaggaatttgtccatttggtctacattataaaaaatgtatcatacggtgtttatggtatcctcattaactttatttatttacttactactccttgtggagcagggctaccctataggcagtgggcccagaatagctctcattaaccttttgatgtctgtaggatatgtagtaatgtcctccttttcctcttgattattttttgtcccttttttttttttttttttcatcttttttgccagaggtttgtcagttttatgaatcttttgaaagaatcagctttgggttttgtcaagcctctctgatctgttgtttactacttcattacatcttgtagttttattttttttcttcttcaggttttctttgctgttctttttcgaaattctttttttttttttttttttgagtgcagtggcatgatctcagctcactgcaacctctgcctcctgggttcatgtgattctcctgcctcagcctcctgagtagctaggattacaggtgtgtgccaccatacttggctagtttttttgtatttttagtagagacggagtttcaccatgttggccaggctggcctcgaactcctcacctcaggtgatcctgaagtgatcctgaccttaggtgcctctacctctcaaagtgctgggattacaggtgtgagccaccatgcctggctctaaattctttagatcaattctgtctagaaataaaatgaagattcttatgtaattaaaaatttttagtagtttttaaaaaaggaaacatgaaaattgatatattttaagtaatccactatatcaaaaatattgtcattttaacatgtaatcaataaattaatgagaatttttttcctatacgccttcatagtctagtgtgtgttttgagcagtgcagctataagtggatacctaacttgtttttcagcttttcttttctaaagattgcatataagactgtatatgttcctctaagtgtcactttcattgcatctcctatgttggttttagtgtgtcattgtccagtatacaatattttcctatttccattattattctttcattgacctgttaggttaaaaataaatatatcttaatttgttgccatttttgtggggatttttttagttacctttttgttacaatttcagtcataataaccttgtgttcagagaacatgctctgtgatttcagcctttcagcccactactgtcagattttataaatattccatgaatacttgaaatgaattgaaatgaatgtatattctgcagttcttgggtatgatgttcttcataggtctattagatcaagtttttaatcctgctttttttttttttgagacggagtcttgctctgtcgcccaggctggagtgcagtggcgcaatcttggctcactgcaagctctgcctcctgggttcacgccattctcctacctcagcctcccgagtagctgggactacaggtgcctgccaccacgcccggctaattttttgtatttttttttttttttagtagaggcggggtttcactgtgttagccaggatggtctcgatctcctgacctcatgatccgccctcctctgcctcccgaagtgctgggattacaggcgtgagccaccgcgcccggcctaatcctgctttttaagtcttctctttcttcactgactgttcttttgcttttggtttgttcagcagttagagtttcctactgtatgtctggttctccagtatttgtctctgtagttgtgattttgttttgtatctttttttttttttttttttgagacggagtctcgctctgtctcccaggctagagtcccatggcaccatctcggctcactgcagcctctgccacctgggtccaagtgattctcctacctcagtctcctgactagctggaattacaggtgcgtgccaccatgccctgctaatttttgtatttttagtagagacggggtttcaccatgttggccaggctggtcttgaaccccagacctcaagtgatctgcccgcctcggcctcccaaagtgctgggattatgggtgtgagcctctgcacccggcctgctttgtatgtcttgaagttatgctgttaaagtgaatatgaattagaattgttacgtcttcttggtgaagtgaatgttttgttatgaagtgaccctctatagctgtagtaatgatttttaccttaaaatatattttgtgggttcttaagctctgctggcttgcttttggtagtgtttgcatgataaatgttttaccttctacatttctgcatctttttagatatcacttgtaaataacatatttatgtaaatatatatgtaaataacatattttaaataaaacccattttgtcttaacccatatagtcttttaacagaagcatttaacccattaatatttattgtgattgatagatgtttcattcagtcttttattttacttgaagtattttatttggcacatatgttttgtcctttttagtatttttaaattatattttctttcactctactagtttgaaagttttacacggtttccatccagttttcctccaagttaaaacatttatctttataaaaatatgatcttaataattctgtactcattctgggcatgggaggcaccttagaattcttgaactccaattatttctctcagcttaggctactgttgtcatacttttatatatttcttaaactcacagatattgtttatacaatgttcatttaaatttatcttcatatttattactttttgctagtctgtcttgtttgatgtattttagacctcccatctgagatcattttccttttgtctgaagtatgttcttttggaattatttttaatgtaggtgtactggtaaattctttttctctgaaaatgtttttattttgcctttattcttgaagaatatttttgttatgtatagaattccaagttggtattagtttttcttagcatgtttaaggtattgctcagtcatcttcttccattgttgataataagaaatcagctgttaatccattgcttttttttttttttttttttcaagacagggtcttgctctgtcacccaggctggagtgcagtggtgtgatctcggctcactgcattctctgcctcccgggctcaagcagtcctcctacctcagccttctgagtagctgggactacaggtgtgtgccaccatgcccatctcatttttatatggtttttagagatggagttttgcctgttgcccaggctggtcttgaacttttgagctcaagcaatccacccaccttggccttccaaagcgctctgattacaggcaagagccactgcacccggccatgttgctttttttgaaggcaattttgctttcttgtggctatttttaagattttctttgtgttttgtttttctcagtttcacaataatatttcttgttgcaagtttctgttttattctgcttgggatttattggacttttcaatctgtgcattatatcttgaagtcagtgctagaaaattctcagccacaatctctttaaatgttgttgttgtgtattctttcttttcttttggggctacagtatacctatgttagacgttctccccgtatccattacatctcagtgggttttttctgtgttagctcattttatctttttgagctccattctggctgtactaatgggtttactatttttcatttcattacctgtctctgtagctgtaccaaatctatttaatcttactttattgtattctgtaactatagaacttctattttattcttttttggacttgctaagttgtcttttatggtttttagttccatgctgaagttttcagtattgacttatccccttgaacatgagttgttttatagactctgatgattcaaaaatcttacatcttttggtagtctctttcatttgttcactgtttctgttgattcttactcatggtattttaattcttcgttattttttttctgtttagatacattctttgaaaaataatttggaggaatatttgattcttatgaacaaggcattactcaccagagaagatttttttgttctaccaggtgcctaggaatgctaacagtctgggaccacatagaccaccaggtgatgagacaatcctgggagtcctgttttactttggcccatcttttctcccaaccctgtgggaatagtcattcatatcctagctgcaggctagaaggtggtttatcagagcccaacttcgagggctctgggctttagctactgtcaccccatcataactgagcttcatggattgattctctttttatctttcagattttcttttaaaaatctttgtttttttttttcttccgaaagattcccccaacattaccattccccaccttccgttgaatttttttggctctcattttgaatttttcaagagctcatgttctttgtcttcattaaaaaaaaaaagttcttatatcgtgtatgaatgtcattcgggatatctatacatacatgcacatacctcatttttattgcatttcactttattgcactttgcaaagtgacattttttacagattcaaggtttggcaaccctatgtccacaagtctgtcagcaccatttttctaacatatgtgctcattttgcctctctgtcacatttttttttttttcctgagacagggtcttgctctgtcacccaggctggaatgcagtggtgtaattatgcctcactgcggccttgacctcttgggctcaagggatcctcttgcctgcgcttcttgagtagctgagactacagaggtacaccaccacacacccagctaagttttaaatttttttatagagatggggtttccctatgttgcccaagctgctctcgaactcctgggcttaagtgatcctcccacctcagcctttcaaagtgctgggattacaggcatgagccacagcacctggtctctgtgtcacgttataataattctgccaatattccagatttcgtcattattaaatctgttatggtgatctgtgatcagcgaactctgatgttactgtctaattgctttgggatgcagtgaacccgtcagagtcatccatgagggttggaatcaacttcttccaaaatcctgttaatcaagagtgaacttaatcgattaatgttgtgtatgttctgactgctccaccaatctgtgggtcccctatcactctccctctcctcaggcctccctattccctgagacacaataatattgaaattagaccaattaataaccctgcaatgtgaaaggaagaagttacatgtctctcactttaaatcaaaagctagaaattattaagcttagtgaggagggcatttcgaaagctgagagaggctgaaagctaggccggttgtgccaaatagctagccaagttgtgaatgcataggaaaagttcttgaaggaaattaaaattgttactccagtgaacacacaaatgttaagtaagcaaaacagccttattgcttatggaaagaaagtctgaatggtctgaatagaagatcacgtcagccaaaacatgtccttaagccaaagcctaatctataatagatcaaggccctaagtctcttccattccttgaaggcacagagaggtgaagaagttgcagaagaaaagttggaagctagccaaccttggtttgtgcagtttaaggaaaaaagccatctccataacatggaagtgcaagatgaagcagcaggcactagtggggaagctgcagcaagttatacagaaaatctagctaatgatgagggtggctacactaaaaacagattttcaatggagacaaaacacccttctattggaagaagatgccctctaaagctttcataggtagagagaggtcagtgcatgggcttgaaagaacaggctgattctcttgctagaggccaatgaagccagtgagtttaagttgaagccagtgctaatttatcattctgaaaattgtagggcccttaagcattatgctaaatctactctgcctgtgctctagaaatggaatagcaaagcacgaatgacagcacatctgtttacaacatgatgtgctgaatattttaagcctacaattgagacctactgctcagaaaaaaaagattcctttaaaaatgttactgctcattgacaacacacctggtcacccaagagctctgatggagatatacaagaaaattaatgttgttttcatacctactaacacatccattcttcagtccttgtcattttgactttcaagtcttactatttaagaaatacattccccaaggctataggtgacgtagatagtgtgattcctctgatggatctgggcaaagtaaattgaaaaccttctagaaaggattcaccattctagatgccattaagaatattggtgattcatgggagaaagtcaaaatatcaccattaactggatttttggaagaagttgattccaacccacatggatgatttgaggggttcaagactagtggaggaagtcactgcagatgtggtagaaatagtaagatagctagaattagaagtggagcctgaggatgtgagtgaattgctgcaatctcttgataaaaattacctgagttgctttttaaagaggtttctagagatgaaatatactcctggtgaagatgtcgtgaacactattaaaatgacaacagaggatttaaaatataacacagacttagtggataaggccgctgcagggcttgaaagaattaacttcaattttgaaggaagttcttctgtgggtaaaatgctatcaaatagcattgcatggtacagcgaaatcttttatgaaaggcagagtcaatttatgtggcaaacttgattgttgtcttattttaagaaattgccacagccaccccagccttcagcaaccaccacactgatcagtcagcagctgtcaacattgaggtaagatcctctactagcaaaaagattatgactcattaaaggctcagatgattgttagcatgtggtgtgagtgtttgtgtgtgtgtgtgtgtgtgtgtgtgtgtatatatatatatttagacagtgctactaccgtacacaaaatggattatagtgtagacataactttcatatgcactgggaaactgaaaaattcgtgcaactcactttactgcagtattagctttgttgcggtggtctggaacagagccttcaatgtctctgaggcatgcttgtatttatttatttatttaaaaacctctatattggttgtgtttccttcagattctattttttgtttgtttcggcctctcttttgtgatggagactttattgaaatgtatggtgatccttggctgctaacttatatttgaatgaggcatgaaaagttcattgggagctccgtaggcactgggtgcagggcctgaattctcagtatctttaagtctattctgtagatcctagctctccatctgctgcttgggaagtataaatgccttcccaccagggttttgggagctaagctgtgggaggaggctgggatctcagtgttcggtatgtagaccttcgcttgatccctattgcactccagtgccccttggttcagagagtaacatgtggagttggggttggtaacttttcctgcaaagggccagatagtaactatttcctgctttgtgggtaatgtgatctctgtcacaaccactcagctttgctattgtagcgtgaaagcagccatagaaaatatacaggtgagtgtgaatgtattccaataaaattttacttatagacactggaaattgaatttttttttttttttttttgagaaggagtttcgctctgtcacctaggctggtgtgcaatggcgctatctcggctcactgcaacccccgcctcccgggttcaagtgattctcctgcttcagcctcccgagtagctgggattacagccacccaccaccatgcctggctaattttttgtatttttagtagagacagggttttaccatgttgaccaggctggtctcgaactcctgacctcaggtgatccacctgcctcggcctcccaaagtgctgggattacaggcgtgggccaccatgcctgtttttgtttgtttgtttgtttttgttttttgtttgtttgttttttagacagggtctcacactgtcacccaggctggaatgcagtggcgcagtcttggctcactgcaacctctgcctcccaataactttcaataagtgattattgtgcttcagcctcctgagtagctgggattacaggcatgcaccaccacgccgagctaatttttgtatttttagtaaagatagggttttgccatgttggccaggctggtctcgaactcttggcctcaagtgatctgcctgcctcagcctcccaaagtgctgggattacaggtgtgagccaccccgcccagcctggaaattgaatttcatagcattttcatgtgtcttgaaatactggtcatctgactttctttccccccaatcattaaaaaatgtaaaaatcacgcttagccacagggagccacagccctagcagtaaggtgttagggaacgcttggggcggggatctaactgctctttatatggacttctgagtttctcttgtgggaattcctttctaaaggacttaggttttggctcttctcaccttattactaataagcctggttaaaactttgaaatctgtctcctctacttattctctttgtgtttttatatcctttcatttctttactgtcattttaggagaattttggaaagtagaatgatgcatatatgcagtcttgcatgttcctacttttatgctgcattttttaaaagtcacatctaccttcattttaatagctttgtttctctaagagtaagaaatatcttctgcaggattggagatcaagaaatttttttgctttcttccttcgctagaataataaatcattctgctattctttttggtctttttatgggagggggagaaggatgaaaacaaattctttggcttatatgttaattagagagtggaaggcaaatccaagttaatttctacttagatttatgtccactgaacttagatctgtgtgtatttgttctgccacatttttgtattattttatttttattattttatttattttgtattattatattttgtattattatattgtttctggtttaccatctggtaaattcttatttctggtttaagtcaatttctagaatattctgttaagtttaccgttttcagtgtaaaaacctatagtgttgatgttaaccatttttaatatgtaaacgattttatgaactatttccctttaatgctaataaaacttgtccatgatgtctggctttgtgggctatgtgatctctgttacagctactcagctctgctgttgtagtgtgaaagcagccacagaaaatatttaaattagtgagtatgaatgtgttctaataaaattttacttacagacactggaaatatcattgcaaatattacccatgtttcagagttagcaagtagggaggaaaacctggagaaatccttgacacattttacactgtcctgcccatcactttcttactctagtaggcaaaatgaaaactgttttaactctagaagagaagaggagtccaagagagaaagccaggaaatttggtaacattttttaaccacagtaggagcccatatccttcagttggctgaggcctttgagaccacctggtacagaaatgttctagccttgctgtgcataggagtcacccagaggagagctttcatctaggcttttactgagctctctcaaggtgacttttggatgggcagtcagtttggggaacccttgatttttttttttttaatagctctttcccctaccagatggttacagatggtaaactgagtccagagatgctaattgttaggtcacactgttgggttggaacctaatgcgctgacccaaacatagtctgaatttcataggcctacattcctggttaaatgcagtcttgcatgttcttccatgcatactatacatagattttaatttgcatggatttgctgctcttttttttttttttttttttttaaagacagagtttcactcttgttgcccaggctggagtgcaatggcacgatcttggcttgctgcagcctctgcctcctggcaagcgattctcctgcctcagcctcccaaatagctgggattacaggcatgccaccacacctggctaattttgtatttttagtagagatggggcttctccgtgttggtcaggctgatctcgaactcctgacctccggtgatctgcctgccttggcctcccaaggtgctgggattacaggcatgagccaccgtgcaggtttgctgcattttaaaagtgtgattgttgttagattttgccagctaatgattgctacagaaaagtttgtttaccggtacaaaaatgttcctaaaaattatgactcactgttttcatgcttggctcatatagccacatcttgtttgctccaaatgccgtgacttgagtggataagcattttttctttggaatagtattatccatcaaggactaggccaaggatcaatatgtacatcatagctataacagcagagatttaaattttaaatctgtaattagagattttcttcagattgcagagccaattgaatgtcaaaactggagaggaccataagtatagcctccaataattcataaaagatttgtttgaaagtattttggaagggatgttcatgatcctttttatttttatctttatttatttgaaatagtttggatgctgttggaaccgagtgtttgaactcaggcttttttttttcccccctttttaaaaataataatttttttttcttataaaagatatgttcacagttaaaaactttctatggtgcagaaggatataaagtgaagcaagttctctgccatctcattcccattcagtaaggaaataggggttccttgggtatttattttaaaatatccttctattggctatggctctgggaccatggtgtaaaatctgaggaatgatgacaaaaatattgacaagttgcattcattgaatgggcagggagaaaaacagcaatccctgggaaggaactggctggataagtatacaatatttcacgctgggcacaatggctcatgcatgtaatcccagcattttgggaggctgaggcaggtagatcgcttgagctcaggagttttagaccagccaggacaacatggtgaaatcccttctctacaaaaatacaaaaattaggcatggtggcgtgcatctgtgctcccagctacttgggagggtgaggtgggaggattgcattgagcccaggaggtcaaggctgcagtgagccgataccgtgccactgcactccagcctgggcaacaaagcaaggctctgtctcaaaaaaaaaaaaattctgtttctctactagttgcacataacagcaaattttactcttcagagaatagtctaaaatgcagaacaagcaatcaaagctcctgagatttcagaagagtttgaggcctcccacatccttctccacctctttataatctcttttcatgtaattctgagtatggtgatcttttttcaaatgtgcagagcttagaagtagcaaaggaggagatagcgctgagtagagctgatgctgataactgcggactaatagcttaaaaacatgcaagaaaaaaacacaaacagatgagaagatcagcatactgaaaggcagatacagacttcaaagccatagtctgtacttcactttgttttgagggcgggttaaagaagaatataaaaatcagtagtttgctataggggaccctaaaccatcgataggtgttcattataaaatttctatttgtgaaaacagcagtttgtggtaaggctgaatgacatattattgtattcataatgcatatgagtactcttcagaatcccagttaaaattattttatgtttgattttcagttccacttacttacatgatcatttcgagagatgtaatgttgattgctgctgttttttatgtcagataccgaactcttccaacaccagtgagtttgtttccaaaaagtattcttttagcattatatatgatttaaggaaaaagcaaaaagacatatttttgcgtcaacatcttttcaattgatggcacgtgaaacccagactagccagcccctatccctagaagcaaattctttaaaggtgtttcatataggtccaggccatattgtctaatttaacctctaccatggatagtctagaattggttttaaaaatcacagttgtatgaacatgggatggtttgtttgcatatttattcacaggctctataaatacttgaacacatacgcatagcatattaacctcttttggctcccaatgtactgaaaatagagcagtagagcagtattttgttcattttattttttaattcaaaaaagaaaatagtgaataagggaattttgagtttagtaaaattttataaagcaaactatatgataggtattgtgttcgaattttacagcaattgaaaaatctatacattttttaaaatcaatattcagtatatattgaatgtatgatttataaagttatgttgttacctaagtataataacaaaatgtctattttaaataaaaatgttattttaaacaataagttaattactttatcttttttggtcctctgccagcgaacacttgccaagtatttcaatccttgctatgccactgctaggttaaaaccaacattcatcagcaaggtaagagaatgcaatgttctttgaagttattcctttgtaaatttttattatacaggatataaaccttagtcaagaacagctgaaaatgagacaaatttaaatgcattgagtatagaggctagagagtagcgttgggcaggcagttttaacctagtttgtcctccgtgttttttggatcatccttatacatgttgtgccttgagttggtggtctgagagtttaagctctgaatgaggtaatcgggccactgtttagggaaagggaattgaaatgtaattgttcctttttttttttttttttttgagacaaggtcttactttgttgcccaggctggtatggaactcctggcttcaagcaattctcctgccttgggttcccaaattattgggattacaggagtgagccaccaagcttggctgtaactgcttcttaattcagtttcacagattatgaagagtccctggtggtttcactccctccttccctgtggtgaaaataccaaatggctgttcattttcaggattgatagttaagtggaaagggataggaaaataggaaaaagttttgttcactaataaacaactgctactcttagttgtccattctgttttcccgagcattcagggcaataagtatatgccagtctacctctcaagccatatttgtttttctagtagctttgataagttttctcagttcattcttttgtcccatctttaatgtcaaggatttaacaggttaagaatgcccatcatttttgggagagaagggtagttgcttctatacagaactccctggggtggactttcatctacatgcatagggtttggggtttttttgttgttttttgtttgtttgtttgtttggcttcaagtgacttgtgtttatattgtatggcaatttgagtgtagcgttacatggaaagtgcttaaagaggtacggggacaagtgccttaaacccttataggaagcccttaggataaaatttacattttattttattttatattttatattttattttattttaatttaatttaattttattttattttattattttttatagatgaatttttgctcttgttgcccaggctggagtgcaatgacgcgatcttggctcactgcaacctcctcctcccgggttcaagcgattctcctgcctcagtctcccaagtagctgagattacaggcatgcgccaccacgcccagctaattttttttttgtattttttagtagagacggggtttcaccatgttggtcagactggtctcaaactcctgacctcaggtgatccacccatctcggcctcccaaagtgctgggcttacaggcgtgagccactgcgcctggctattatttattttttaaatgaagtagaatccttctcatttggctgcagaacgggtgatagaacagaggtgctcgtctgcttcactcgctttttcatactttgcagactcttccatggagtgcttctcatgatgatagagggagtctccagtgtatttcttgttctattttcttttctccccagtgctgtcttttagtgtagggaagcctactcatttcctccttgagagaggttcttttatggagatgagtgctttttctttgaaacggggtcttgcgctgtctgcccagccttgagtgcagtggcgcaatcatagctcactgcagccttgacttcccaggctcaaaatatcctaccacctcagccccccaagtagctgagagtacaggtgcacaccaccatgcttggctggtttttaactagctggtttcaaactcctgggctcaagtagtccttctgcctcagcctcccaaagtgttgggattgcaggcatgaaccactgcatctgtcctgagatgagtgccttttaattttctaacctcacaaggtttgacaggtaggcaagaaaggagcatcggataaggccccaggaaatctaggttccagctttggttctgttgtctgctgtgactgcaggcaagtcacctaactcattacccttttacccatgaagaggtagcttagttattttcgtattccattttaatgggcagttggaaaaaaggcaaataattttgtaacatttttgagttgctgtgagaattcaaggtagtggtattttctgacagttgtcattactcttgctcttaagggcagctgtgcagacagatgggtcagttagtgaagctgacccttttgtgtgtgctcacctgtgaatgcaagcttattgggcagggatagtgtagatgaacagcaagcatgctgagggtatgtcatgttatagtgtgatgggctgtgcttttgtcttgaaagcttgaaataggatccagttggcactattcacttagaactttttctttttttatttaggtgaatacagcagtccagttaatcttggtggcagcttctttggcagctccagttttcaactatgctgacagcatttatcttcagatactatggtaagctaaatttagaatcactctcttagaatgtcaacagaatgacttatggtgatagccctagaatgaccttgttcttacagcatttgttgagcactgactgggtaaagctgtggctatatttggtgattgataccattgttaagacgcttcctgccaagtatgagatggagaagttagctttcatacaaattaaaagggataaaaggtactgataatgtgttaagggttttggaggaagagataacttcgtaggaagaagagggacagtttcaggaaggaagtggcatttgttgcatgaagtggattgtgtgtaggaagagactgagaggagaccactaggtgaaagacagggcctaagccaagagatagagtgtaggagagagggtagggaagctgagtccagcctgttgaaaagggtgttgtaggagggaaaactggagagaggagtttgaattttattatactaattgcttatttatcatcttaaaagtgtgtcaaattcacgctttcagagttcaaaatagtcacattgacattggagtattatattttggcacaattttaactagaattaaaattatcttgcttggtacagtctggaccagaaagtggtggctaatcacagtcagttaagccaggcagtcttttaaaaaatgacaactactctaaactttttattttaattaaaaatatttaagtgtacatttatcccagttcatcttataccttctgatataggatgaaggctttttgagtgtaggtccatcagtgggagttttttctttctcggataaactacatccataatacaaacctctctgattttcattttttacttctttaaggtgatgcaagaacttaaaacatttgcaaagcagtctaagaactgtttagatattttccctagtcttttcacaatcatcttgtctatttattttgacagtatttttttcccctaggaacccatgaagagagagacagtattttttttttaatcaagtcacctttattgagtctttctaaagcatccaatgtagttttcagaaatagcaattaaaaaaatttttattttatttttttggagacagggtcttgctctgtcacccagcctgtagtacagtggcatgatcatagctcactgtaaccttgaattcctggcctcaagcgatccttcagcttcagcctcctgagtagctgggattacaggcatgtgccaccaccacacctggctatttttttttaattaattaatttatttatttttgagacagagtctcgctctgttgcccaggctggagtgcaatggcctgatctcagctcactgcaacctctaccacccgggttcaagcgattctcctgcctcagcctcctgagtagctgggattacaggcgcccaccaccatacctggccaatttttgtatttttagtaaaggcgggatttcaccttgttggtcaggctggtctcgaactcctggcctcagttgatccacccgcctcagcctctcaaagtgctgggattacaggtgtgagccactgtgcccagccactaattttttgtattattattttttgtagaaacagggtctcactatgttgcccaggctggtctcaaactcttggcctcaaacaatcctcctgcctcggcctgccaaagtggtaggattatagtcatgagccactgcgtccagctagaaatagcaatttttctaacacatatatttcattggtttatgtatgaatttagaatatcaaagtggcatgaacaggttcaagatccaacaaaagggaatcttgattctgcctcacctaataaaagcagaagtgcgtgggcgcactaaaaagtaatctagctgtgggcatgcagcatgccatgggtgtcaggtgatgtcatttcaaggagaatccggttaagggtagtttggtaaagaaagctgaaatttatttaaaatgactcaggtatctttagaattctcaaaagctgcaggaaataagagtctggtaccctgagaagcatggggcagtagaaagagcatgtgggctttagagttcaaacgaagtcaggctcaaacatagttctgtgataagccctgagcaagttacccgggtcttccatttcccccttctggagaagtcctttggaggatgagtccttctggaggatgagtccttctggaggatgaagtccttctggaggatgagttcgttgtaagaataaaatgagaatgtaagacacctagaggatgcccgagtaaaaaatgacagttgctagtagtagtaatttgtagggctcattatctagaataattttgtttgacgttactaattaaaatgaactcttaaagaaaagcagtgtatttagactcttgtagttaagaaaaattacaccacagagccctttttactttttaaattcatttttacattttaaattcattgcatgtattcattatgattcccgttgctactattttttagacttgacaactacattttatttcttttcttccataaaaggtgttttacagctttcaccacagctgcatcagcttatagttactatcattatggccggaagactgttcaggtgataaaagactgatgaaagtcatccctcactgttagtaaggaagcagtatacatcaatgggaacagggcccatggaaatgtacaggagtttccctattttggtgttcagcttgaaaaaggacttgtcagaatcaactgtgtcatcaaaatttaagtaatgtgcattgaaaataaggttgatcatgggaatatgcagaatttccaatgtatttttaaatacaaataaaattgtaatttagaatttttaatcttaggtttcttgattaatttataagagatcaattattgtcagtcttttttgtatgttttttaaaaacatagtccagagcatgggcagaattgacacctctcttttaagtgaaatttggattgctcacaaagcactaggaaatgtcatggggttcaaatatatatcctacacaactgggcaatacatttttgtttgatttttaggtctgtgtatacattaacagttcatgtaattaatacctgatcatttgggataatgaaagtgaagttagttgtagatgaagtaaagttataaaagagattaaaaatgcggtaactttttaagataataatcatacagaaggtatgaagttcattttcggtagtcttccaacctctcaggtgcctaataatttatgtttgaggataacaggtaacaaagatagtcgagataggagaacgtgtctattagtctttgcatctaaaaggcagtgagttacgttcctgccttccactgtgtttctgacatagcaatgtttgtttgatattggaacctggattcatattttatgtaaataatatcaagctgtatatttttcaaaggttttttaaactttggagactctttcttttgttaagcagttaaaggaataaaagagctggaaaaaaaattgtaccttcaactcaggttgttccatataacatacgtattctctgctgttacgtaagttttccgattcacagagtccattcatgtacatcacttacacttaaattgtaaaaataattagtctgaccatctgactttaaaagactgttgctacacgtacatcatgtttaggagaatgtgggatatggggaaggggagaagaagacagtccagtggtgactagttgctgctgcttaacctatggcctattgctgcccattgtccctggttttaatccaagcctattatggaatactgcagtgagattatccattctcagcctgttgagctgcattaaattagaatgggaggctgtaagtaaaactcatgcctcttggccaggcattctgcaccagcgtgtccctctgtggcttgctggtcctggttgttctcagactggcagctgagctgcgcttggcttgaagcatactgaagcctgcagccagggacaccgccattgaatcagatggagggggatgaaaaagcagagaagggggcatgtggctggctattcttgctctctggagaacagcttcattgttaggagtagttaggctgaaagtggacttcccactgctgagccacccaagaggcacactgagcattagtgacgggtgagccacataagaataatgtttaaaaaagagaggacttgaagtagctatgcgaaaatttagaactttgcactttgttaacgcttatttatggtttagtgttgatgccatttggagtgacctatgggttggacccatatctttttattattaaggtctcaatctggctctggttaataaacgtttcccgcttcatcccttaggaaaatggtccaagtctcctcaggcttttggatactgaattgttataaaacacatcaattctgccagtttataaaacactggaattgtattagacatgtctgagtatgtacttgtttatagactcaaaacatgatgaaaattcatttcattgtcttcactgaatagacttaaccttgacagtaagcttaaagcattagtgtcatttaattacatgtctgaggaatttatgctaactagattttgggcttttgcagcgaattttagtcggggcctcattcctgagcccaagtgaccctttcacctcagcttcccaagtagctgggattacaggtgcacaccaactgtgctttgcagttttgtttgtgtgtgtgtgtgtgtgtgtgtgtgtgtgtgtgtgtgtgtgtattttgttttttttacaagcccacaacatcatagctttgcagtttttaaccaggagctggtggagatctttgaaatcatttaggccaattcttttagttacatttatgatgaaactagggatctaccttaaagttttgggaagctctttcaaaacttcagacacctagaaatatatatagtgcagttcagttttagtttctgcagcatggtttggaaacaaaagatacataggatttaaactcgatttgttttcttcttacagtagaagtaaatgctcttgtggcttgaatcgcatctcccaagaaagatacgttcacgttcaaacccccagtactgtacatgtgaccttatttggaaatagggtctttttagatgcagtcaagatagaattagatcatactggattacagtgggccccaataactaggtttttttgttaaaaaaaaaaaaaaaggaaatgtgaacagagagagaatgccgtgagatgatggagggatagattggaatgatgtctgcgagctaaggaatactgaggattgctgccaaccatccgaagctgggagaggagatggaacaactccctcggagcctccaagaggaaccaaccccactgatgctttgatttgggatttccggcctgaactgtaggaaaataaatttctgttcttttaagccatttttaccagtttgtggtaacttgttacagcagctgcaggaaattaataaatgccaatgttgaaaattaaaatctagaaatatggctctaattataatttcatagaatcattttttcccctgagtttcccctgagtttgcataaaagtgaaaaagtagaggacagagtagatgcctcccacatgaagacacagattattaaggcattgtttgatgcaattagggcagagaaacacgggcttctagctagagcctcgggttctcttttgctcatttcttccctctaattaagaaaaaatatttccaaagtttattatgcctcctaaaaaatgaatttataattcatttgtccatttagtcttaggtgaaatgcagtaaacactaacttaaaaggacagcctttccctgtgtttgacaaatgttcccagaaaactggttttaactgtaaagccgggagtacattttcttgtcatgtcctgaaatggaactaataaacccagaaggccttaggaagcaaccattagctctcccccttaccctagttctcaggaattggaactggaaatccactggaattgatttcttgaataacagagctcgttgtgtcttagagcttgaccatgaaggagcttccgctggaaagacctgaggatgtgatttctaacatgatcaaagaggctgggttatgcaacttctctgtttcatcccttcctacgtccatacactattctactggatagagaggcactgactgctgaaaaccgcaaatgaaccaacaacacacaagaaggcctggcggcagtggggagcgatctggcattgaccatcaggtttctgggaacagagttaagtagaaggaagggagggcagcagttccttggacccagacactcagtgtggcaagttccatgtgtgctcaaggcattctggcttcacgggaattagaaaccctaggagcggatggggtcgtttttgaccgtctgtgtcttcctttttgcgctcagatccagttcgatgagacgcgttatcccagaagctgggctaactgacggtctggagccccagcgggtaatcatcaaaggccgggtttttgtaggccaccaggtgcgtgtcgcagcgctgcaggcccagcgtctggccccgcctgcagagacatgcggacagcaccacggtgctggcgagcaacaggccgctggcggcgcacagcccagagagcaggagcgcgaagctgggcttggtggtgaaggcggcgcacgggctcctccagcccgaagaccgtggctggctcaagcccgccctgttggccgccagcacgcacacgcggtaggtggtgcccggcgacagcccgtacagagggtgctgccgggccgtggcgtagatgacccccaccaccgactggttccccgcccagccctccgcagagtagcggatctggtacccatgcactaccgagttgggggcacaccagtggaccagcgccgacgtgtccgtggtctccgtcaccccctgcagcctgggcgggtctgggatggtgtcttccccgctgaggccggggcaccggcaccgccaccgcctctgcagctccgcgcacggggtctgcaggtgcttgcagggatggtaatcacaggggacgtcctggtgaggcgttcccacctcctccttcctcccttcctcctcctcactgtagtcgtccagcagcaagactggaatctcgccctcggaaagactcgggttgggggcttggggtgtggcgtgtgtcctctggccgggctgaggcgagcttatgctgcggtcccacgaggtagggaaggggcccaggagcttgctggccagtggggtggaggcagctgagatatcaggctcaaggacaagctcgggggcatgttctcctcggtgctgggtcctggtggtgctggcagccctggggaaaacgctggagttgctgtgacctgctacagagttggtcgtggagggggcagtcccctcccgtgcatcgctgtgcggccatgcagctatcgtgcgagagcccacgttaggggccttggagacactctgctggtctcccgcaggccgggtggcgggggctgcgctgggcgcgacggtggtaccctgtgcgtaggtggagcggttgaagcaaggtgggtgtgaagccccgagagtggtgctttggtcggactggcacactccgggcagctgggagagtgacagggaggctgagaaggggccgctggatcccgcagctggcgcgcacatagtgtctgctgccctggaggggaggccaaccagttagaagacgtctggcttcagggacacttctgcgcagagctttgaatcctcattgccgacgtcaccccctgccaagcccatcaacgcgtctctgccaggcaccccagggcacacacgccgcacacacacatcacctcattgattctggggaaacctttggaggaagctcctgtcctcactcccactgggcaaagaagcaaacagaagtttagaaggaggaactaattgcccaagacaccatagctagcaatggcagagcctaccccggggcaagcactgagaaggagtccagattctctgagtgtcatttgccattttgttctcacctgtctgcttcctggcaagaaagcactagtaataaaaatcatactcgggccggtgcgatggctcaagcctgtaatctcagcactttgggaagctgaggcgggcagatcacaaggtcaggaggtcaagaccatcctggctaagacggtgaaaccccctccctactaaaaatacaaaaattagccgggcatggtggcgggtgcctgtaatcccagctactcaggaggcagaggcaggagaatcacttgaacctgggaggcagaggttgcagtgagctgagattgcaccactgcactccagcctgggcaacagagggagactctgtctcaaaaaaaaaaaaaaaaaaatactcatactagctaccatttctgagtgcttcccacgtgctaggcgctattcttcacactccaatgtgtcaactaatttagtctgcactacttttgcagtagactctattaccccattttacagatgagaaggtagaggccaaagtaactcaggtgaaatagctcagctcaaatcaacagtagtaagtagaccaggtacagtggctcatgcctggagtcccagcactttgggaggcccatgtaggaggatcacttgaggccaggagttggagaccatcctggtcaacatagtgagacctcgtctctaccaaaacaaacaaacaaaaacttagccaggtatggtggcacatggctgtggtcccagctacttgggaggatgaggcaggaggattgcttgagcccagtagtctgaggctgcagtgagccatgatcatgccactgcactccagcctggatgacagagcaagaccctgtctctaaaataaattaataaaatagtagtaagtaggatgaagctggactctctggctccagagcctgtagtctcagcttcatcattaatactgtgatgagacccttgactgcaaagggcccaggtgcttctctttggagggaatgtggggttggggggcagactgagccccacctcacagctgggcttgggtgggagatgagaaaagaatcttggccgggcatggtggttcatgcctgtaatcccaactctttgggaggcccagatgggaggatcacttgagtccaggagtttgagaacagcctgggtaacatgatgagactccatctctacaaaaagattaaaaaaaaattagccgggtgtggtggcttgcacctctggtcccagctcctctagaagctgagtaggatgatcgctgagcccaggaggttgaggctgtaatgagatatgattgtaccactgcactccagcctgcgcaacagagcaagaccctgtctccaaacaaataaacaaaaagaatcctgcagaatggtggtgaggggggttgcctcccaaggtatagtgtttacttggtggaaatggtttgaaagtgctcaggactgggggtgttcccagccccccagctcccactgtctcctggtggccagcctaaatgtggctcctcactgcaaaaacagctctttctagccaatagtcttcataggaatttcccaagagagctctgtaagcccacgggcctaggactggataacccgggagcaggaggccaggctccatcttgaagattcagtagaacccagtggttaagccagactacacttcccagcctcccttgcaggtaggtgtggctcctggctaatgaatgtgagtggaagtgaggagtaacacctcccagcctggctcaccaaaagcctccaggtctgctcctccatgctctttgccccttctggctggctggaatggaggcagcttccatcacctggatccctgagtatgactacatgggaaaggctgcccagcccaacatggccaaagtgccaagcatggtcacatgagcaagatgtaagctggagaacttcagctcctgaaggctgaccctctgccctcagccatctgctttgtaaatgtgttacctgcttaggacagttctctttgcatccgtgaggagccaagacaagtcacaactgcaagtgagggggttgccaaagaggttgatcgataggacctgggaggaatccagggtccaaggagggaaggaactcaagttgcagctgaaatacaaacaaaaaaattaattaagtcaggtttttacaattgtatcaaagatattcccagagaggcatggtgtcagaaccatgcccatggtatcagaagcattctgataggggttggagaataccgctttgggcaaaactcttaatgacctcgaacttcattttttgtcctctgttgtaaaatggagataccaacctaacaggaaatattatgcttcatatcaactggggacaatattccttcatatcaactggagacatagctagaatggaaatgttagaatgagagttcaatcagtatttttgtgtgtgtgtggaaaggaaatgcttttctttttccctgaagtgggaaaggaagaggattacattttttttctttgagtaacaccgttgagtcctttacttacattgtctcatatcaactggggacaatattcccatgactgatcgttgtatcaaaaagaatgtgtgttggctgggcacggtggctcatacctgtaatcccagcactttgggaggccaaggcaggtggattatttgaggttaggagttcgagaccagcctggccaacatggtgaaactctgtctgtactaaaaatacaaaaattagccgggcggtagtggtgcacctgtaatcccagttactcgggaggctgaggcaggagaatcacttgagcctgggaggcagaggttgcggtgagccaagagcacaccactaccctccaggataggcaggagagtgagaccctgtctcaaaaaataaaacaaaacaaaacaaacaacaacaacaaaaacacacacacaaaaaagaatgcatgatgataaaagtgtttgtaaatgcaaatctccacatacaaatagatattgttattatggaccagtgttattgcactgtggctggtgacactcaacaccagtcctttggaagatgcctcatttaagtgcatcagtgaactcttgctaagtagagagtatcctccaaacttagtaacttaaaacaataaatatttattcctttgcatgattctgtgggttggctcagtggttcttgtggtctggattagctcagctggggccagatgatctgggatggcctcatgtgtaagcctcaactggctgtgctgggacttctctccatgtgtctgtcatcacccaggaggctagcctgggcttattcacatggtagtggagggatccccaatagcaggagagggcaggccccagtgctcaattgctttctagtttctgcttacatcacatttgctaatatcccactggccccaagcaaatcacaaggccaagcccagcttcaagaggtagagcaatagactccttgaaatatggggcctggtgcaatggctcatgcctgtaatcctagccctttgggaggccaaggtgggaggatc

SEQ ID NO: 61075 - DNA, 4382 bp, Homo Sapiens; identical to SEQ ID NO: 31065

SEQ ID NO: 61076 - DNA, 569 bp, Homo Sapiens
  misc_feature (552)..(552): n is a, c, g, or t
  misc_feature (555)..(555): n is a, c, g, or t
  misc_feature (566)..(566): n is a, c, g, or t
  misc_feature (569)..(569): n is a, c, g, or t
agcacaattccagttttaatgttcaaatcaacagcaaaaattatgatggatagcaattcattctcactaaaacacagctaatacatgttccttaaatcatgaaggtaaagtggaaaaactaaatagtttgatgaccttagagaaatcatttattctctcttatactcagttaaatgggagcctggttatcacaatagagatgagtaataatgaaggtaaaatgcctggtaaaatgcatcacagtaggcacccatcttattatacacatgtcaataaaaataagcatctattttttaagggaagaaaagaaatgcttcttaataaagctctggatgaaccatttatcttctttcaaaaaatgtaaaaacacataaaaaagcattatctgacaaagaaaagtagaaaagatttttatctttaattagagtttgtagtatacacttaactttctgtaatctgcagtgatgaatctctatgtaaacattcagaaaaagagcgaatactgggtcatgacttatgaactataaattttggcctggatactaggccagnacnggtttataccnttn

SEQ ID NO: 61077 - DNA, 578 bp, Homo Sapiens
  misc_feature (467)..(467): n is a, c, g, or t
  misc_feature (486)..(486): n is a, c, g, or t
  misc_feature (515)..(515): n is a, c, g, or t
  misc_feature (524)..(524): n is a, c, g, or t
  misc_feature (552)..(552): n is a, c, g, or t
  misc_feature (576)..(576): n is a, c, g, or t
agatgttatggcagatttaacccaaactcatgggattctgagccccctgggaaaggcattagatcttataggtcagactgttaccatggagaacgtccgtgctgaaggattaatagatagccgggtatcctggaaaagtttgtgtgcttcatacacagataacattagcatactcataaaaaaggctctggccaaatgggatcatttgggttttgaaactctagatatttgggatatccagtggaataatacatggggatgaggtgggggatgggaattcaaatgacaggcccttgtgccagagagacactcagaaagtcaagcaagcaagaactgagatgtgtctcgagcatattttgcattatttggttccagaatagcaacaagagctgggtgtagctactgtttctcaggctgggttttacgtgcttttggtagcttcataagccccaaatccttttctgggntcaattctataacatgggncgtcttctaaactcctcggtactactggnaagttgggncacgggcaacatggacctatggaatcanaatctgcatttaataagactggcngg

SEQ ID NO: 61078 - DNA, 1419 bp, Homo Sapiens
gaagcactttgggggcaaaagaagagaaaaatgaagacgggacattttgaaatagtcaccatgctgctggcaaccatgattctagtggacattttccaggtgaaggctgaagtgttagacatggcagataatgcatttgatgatgaatacctgaaatgtacggacaggatggaaattaaatacgttccccaactgctaaaggaggaaaaagcaagccaccagcaattagatactgtgtgggaaaatgcaaaagccaaatgggcagcccgaaagactcaaatctttctccctatgaattttaaggataaccatggaatagccctgatggcatatatttccgaagctcaagagcaaactcccttttaccatctgttcagtgaagctgtgaagatggctggccaatctcgagaagattatatctatggcttccagttcaaagctttccacttttacctcacaagagccctgcagttgctgagaaaaccttgtgaggccagttccaaaactgtggtatatagaacaagccagggcacttcatttacatttggagggctaaaccaagccaggtttggccattttaccttggcatattcagccaaacctcaggctgctaatgaccagctcactgtgttatccatctacacatgccttggagttgacattgaaaattttcttgataaagaaagtgaaagaattactttaatacctctgaatgaggtttttcaagtgtcacaggagggggctggcaataaccttatccttcaaagcataaacaagacctgcagccattatgagtgtgcatttctaggtggactaaaaaccgaaaactgtattgagaacctagaatattttcaacccatctatgtctacaaccctggtgagaaaaaccagaagcttgaagaccatagtgagaaaaactggaagcttgaagaccatggtgagaaaaaccagaagcttgaagaccatggtgtgaaaatccttgaacccacccaaatacctgctccaggtccagttcctgttccaggtcccaaaagccatccttctgcatcctcgggcaaactgctgcttccacagtttgggatggtcatcattttaatcagtgtttctgctataaatctctttgttgctctgtagttttgatgcattgttttatctctcttattcctttacttgaaataacttatagggatccacaggagatcaaaaggaatgatgtattttttacgtgttggccaaagtcactggataaaatgagaattgtatatttgttattcattttgcaaattcagaaagttggtccagatatatgtcacagaacttttcacttgtatactactcttacaatggaaaaaaatcccgaaaactgtatacttctgattaaattcaataaaagattttgattagataaaaaaaaaaaaa

SEQ ID NO: 61079 - DNA, 3938 bp, Homo Sapiens
ctggaagcctcggagtgtcctcctgtcatcttgggtggtgcaggggcgcagatggccctgcagcagggtgctggcagggtggggtcataggagccatccttcagctttgcctggggtctctggtggagggcagttccgtcaacaaaagccagggtgggatcaggccaacttggtgtgggttggaggactcaggccttggcgatggcctccgtctccctgctccctcccctgggtctcagcccttccttctctgggtcatcctcccttgcctttgctctcccagagaactcccatccctgactcctccgagttctggaaatgcttcttgagactgatttatggctcagatagatggtggcgtggagcggggggagggagagatgggaggtgcggggaagggaggtggaagctcctgtgtcgcctgggctggggcctcccgcccagtcctcgcaggccaaagggtgacccatttcttttttccagtcaccaggagctcggatggtcactctgaggtgtgaatagatatgtttttccttcagtccacactgaattcaactcaaaccagcaaaggcctttgggctggggattctgtggttgcagaggtctagagggggtggacttttgcagccagtgcctccgcctcaccgtcttggtgaagaaatcagcgagtttgttcacagccgttggtgtcttcccagcccctggggacagaggacagcagggggatggagctgacaccctggagtatttggacccaggccagcacaaacacacccccctgtcccccactctaaagggagagtcctaggactccttagaggaggcttcactgcggagatccctgagcagaagggggcggggtagcttctcccggtgacggtgacgcaggtctggctggccttgggcaaccaacacacctctcccactccaagatgcctccaggtggctgaggccaacgcccacacccaggccagtcgtgtgcttgtacagcaggctgtgcctggggacctagatgtgccatgggagggaggagggtacccactgacaggcctctgcctccctcctcaagccctctgttctccctgcccccactctggacactgcttagtccccagccaggcagggcccctgggtttccacttgcagcccccggactgccccagagccgggaagcaccagtgccaacagctctggacttgttggacccacaggcacagagctctgagtggtgcccaggagacccaggaaccttccctagtgccaaatgcctgcagggaccggtgcctggggagcctctggcagccggactgcaggagccaccccatcagcccaagtccacctctgttttgttcacctcggtcatgttttggaccttgcaccaggtgctgggacgtggcagaggacaggccctgggaaccaacagtgtcctaccatggacagccagggccagctaagctaagccatcccgcccaacacagaagacatggcagttatttctcagcagcaccacgctgggtgaggccagttgttccgcttactctgctccgaactgtaaccccaggctcagaagcagccggcaaaagggggatgctggccacgccccacctctaaggccatcaccctggaggtggaagtcactgggctggagggctctccatgtcccccagcagccgccctcagaacacagtggccagagcaccaggctgggtccaggcctccaatccaggccttccctgtccctagaactggggctggaggagtgggtgctcagcccttcctgccctccatccccagcctgcctttctcttcctttggatgctccatcctccttggtttcttgcactgctctcaatcctcccaccctagcctgggggtggtccttggtcctcaggggtatccggggagaaattctctccctgtgcatgacacctgtcatccatgtcgtaaccagcggctccatcttgtggggtggtgactgagggtgacaaatgagatttggctccgtcgtggatgtggatgtgggaggaatgttgcgagtgacacgtgtgggtttctaatccacagtggtcctgcgtgtgccctgaggggccatggtaacctctccgatggctcggatttagcaggccaagcagaaactgatttctacgaagagcgtctttgccaaactcatgaaaattgtgcctgccactttcatgcctatgggccagttttgtgacctgcgccgctgaccatcctaagaaccaggtcttggccttccctctgagcactgatagaggtccccaaggctctctggcctgaggagggtgtggggtctgcccagccccaagcagagagcacagtctgggcccctgaccaacagctttggcattctgggttccatggggaccctagagctcaggcacaagaacaacaccatacctgctgccaggacgcagctgtctcccaggccctccccacagcccagctcccactggcaggaactggacacatccctgccctccatggtctgcactggtcttctctgagtattcttaggagcagaggcagccccaagttccaacttgcaagccctgtaactaagctgtctataaaccccagcagggaaggccaagggatggtctcacccatgcccttccctttggccaacatgagtcctgcagtggggagcttagcccctgctcccacctaacactctacagttagcacccaggggttgattcaggaagttcttcctttttctagcctgcatccttcctggccaccccctttatttctcagtctgacctggtgcactcttggcaagtgagtccattgcagtcccaggtggatatttaatgagcactcggactgtttcctccaagtcagctagtggcctgccctcctccttttcaagaagtctggggcacagagcctcctctggctgcctcttctcttctctgagcctctgggagccttcaggcaaaacctggcagttctcaggaacccagacctgaggctccagctccgcggccaccagagattcagtgtgcagtgccgaaggcagtcacccccaggcagttcctgctgtcaggccgcaagcctagagcgcaggatcccagcagcccagggaacagggccggcgtgtgagctgctgccgtggggtctgtggtagggctccccatctcccacccctcagcaagaagagtcctgacccctgaccccaccctgcccagagaggagctggggcctccagacagaccccactgcagccagatgaaggcccctgtcaaagaaggggcaggctgggggaaaagcagaaagaatggcccccagtccaaactcctggatcccctccatgagagaggggctccccctggaacagaagctctcatccccaggcccagtgcacaagaccaccagcagagacccaccgcccttcctggcagagcaccacttcctggcagtgcagctccgaggcaccactactgtcctccccttccctccccacccctcccctccctttccctcctctcccctcccctccacacctgccctgttactcccacagctctgggcagccaggccctcccctcctgcctcctggtcttctctactccgctggttctgacccatcccctggctctgcccgccgtcccccaccctgcccctgctgagtatcttcttcctccccacgcacccccctcccccatctaggcgaggtgggctcgggcgtcccaggccctccttagaaaagccgtctctctcgagtgcagtggtcccacctcccaaccccatcactgctgcccaccccatattaactgtaattttgtaagaagagtgacttgttggtttaataaatctctagttattgtaataatttattggctgccataatgtatttattagtcgcctaccgttaataaaaagtgcccgctttcctaaaaaaaaaaaaaaaaaaa

SEQ ID NO: 61080 - DNA, 428 bp, Homo Sapiens
ttttttttttgagacagagtctcactttgtcactcaggctggagtacagtggtgtgatctcagttcactgctatctctgcctcccgggttcaagcaattctgtctcagcctccagagtagctgggattacaggcgcacaccaccatgcctggctaattttaaatgtttacttttttctgataaaaaattctatcaattatagaaaataacaaaaagtaacagaataaaatgacaattacaaccattcagagaaaactcctggcaacgtttcagcatatttcccttctgtcttttttccacgtgtgttttgcaccttagagattactatgtgtcatgtaattttgtatcctgctttctaggtaacaagatggtgaatttccatttatgaagaaaagctttttaaatatcattgaaaacggctgtgtaca

SEQ ID NO: 61081 - DNA, 547 bp, Homo Sapiens
  misc_feature (514)..(514): n is a, c, g, or t
  misc_feature (538)..(538): n is a, c, g, or t
gctttctttctcctttggggggaaaaaagagtaggtgagagtatatataaaacacgattctcttggcaattggtgcctggttttccactttttttttttttttaattttttatggttttggagtcagggtcttgccctgttgccgaggcttcagtgcagtggagcagtcatggctcactgcagcctcgacctcttgggctcaagttgtctttcctctgtggtcccctgagtagctaggaccacaggtgctagtactcctggctaatgttaaaattgagggtcttgctgtgttgtccaggctggtctcaaactcctgggatcaagcaagcctcctgcctcagtttcccagtgttgggattacaggtgtgagccaccatgcctggcgtaagatatatttaagtcagcagaaaacccaagtgacattttaatataattcagataatcctgagtcaagctttgtaggctgaagtaaatgaagggccttccttgaggccctttggctctggggcattgnggggcaccaacccctgggggtggncctttgcaa

SEQ ID NO: 61082 - DNA, 1766 bp, Homo Sapiens
aagaaatgaaattattcatcaacaataactttggcactgcaaaagactgagtcaaaggttaaatcagtcacacagatatccaaggccaagttgaagatcacaagtatatcccatttagagatttgcatacttagagattaagcccatgttcattaattatttagttaattcaaaagccattaataaatccatgcccagcctacgcaacatagtaagacccagtctctacaaaaattttaaaaattagccagccatggtgacacgtacctgtagtcctacacacttgggaagctgaagccagaggattgcttgagcccaggaggtcgaggctgcagtgaaccgtgattgtgtcactgcactccagcctgggtgagagagcaagaccttgtctcaataaataaacccaagttacttcgatgactagatactggaggtctgaaggagaagctttaaaaatacagattgattgcttcagagaaatcctatttataattatgatctgaacttattctatgattagcaaatatatcatctgaaaataaaacaggagttctctccccagacttttgtttttcaggatggtgagttttggtctgggaccctcatggcacccattttgataaaaggaaaaagatagtaaaacaggaaataggaagtttccagagatttgggcatctcaggattccatgaaatgctgagactaacccactaaatccaaattttattggctatggtaaatctaaatctgttcagtgttctgaacagattttatgagtttatgtctaagagtttatgtctaagagaggtacataattcacaaacactatcatgctggcagctgttttgtccacatcaattcccttgatttaatgctctgatttcaatttagaaagtactgagacatgtaaagtctcaaaataggaaaaacctatcctgtttataaggtgtggtcaataaatagaccacagataatcttagtctattaattaactctcagatcatcttagactattaattaacattctgcttgctgctgattaaaaagaaaaaaaccctaaaaccttcagcaactgaagtagtaatataaaaaataacctttaatagttatggtcaaattacgcttcacttggataaacctcaaaatgtagtctgagtttttttgtgcacagtttacaaatcctgggggaaaaatcttttttccacgttatctgaaaaactatatggcgaagataccgctgaaaaataatttgttttatgaaattcctgaaaagctaattttgaattttttaaagtaactacctcccttttgtgtcctaatgtccttccttcaaagctgcttatagtttagaaatgaaagatgtcatgtctcatgctttgactggttttcggtggcatatttgatgtatttgccaagtggcattactgactttacagtaactgttacattattttgtactatattgctttatgtggttcaaaaatagtatatgccatattgaaatatgtaatcctcatgttgtgaaactcatcatgtaatacaaatgaaaatcattacttaataacttacaatttatccatatgtagtttcaatatgattgtgtctatgactgtaaaacaaaactgaaaaaatatgtaatgtatttctgttgaaagcgtgaatgtactaattttttcctaatctttgtctagaagaaagattctatgtcattcattgtacagctgctctggggtgttacacatttaaagtacaatccaacagttgtttg

SEQ ID NO: 61083 - DNA, 393 bp, Homo Sapiens
agcggccgccctttttttttttttttttttttttcagggtttaaagctattttctggcaataacaatttctaacttctaattaccctttttccggcttgaaaatctaaagttggattgaagaaaaaaaatgacaacatctcccttttacttatccaagctgtgaatttaaaatacctttcgtttttgtttgtttgtgcctatcaactttgacccatagctcccagaataattttgatattttctgaataaattgacactagactttatacatcactcatgtctttatttagggtaggccactgtcctctaattccatactgattcttctgggtacctctggtgagccactcaaaaaacaatttctgccaaacctttgggaaagtatcagtggt

SEQ ID NO: 61084 - DNA, 341 bp, Homo Sapiens
gaaatacttatgtgctatctccctccttccattcattccatgaggccacaagtgtgttttgctcatcagtatctctcattgcctagcgtagtgttgggcatgttccacagcatggagagccagtgcttctgggcattgcagtaggtaccagtgagaaaaaaggggaaaatctgcatattgagtatttattaaaaaaaaatatgatcatgacagggaagtcagtggtaaggtatcgcagagtggttgtcagagggtcatcgatttggccctgcttggggtaattgaagtgtgctagcgaatctaattagtccttgcggtcgttgctgtggggtcagcgagtg

SEQ ID NO: 61085 - DNA, 571 bp, Homo Sapiens
  misc_feature (514)..(514): n is a, c, g, or t
  misc_feature (543)..(543): n is a, c, g, or t
  misc_feature (549)..(549): n is a, c, g, or t
  misc_feature (566)..(566): n is a, c, g, or t
  misc_feature (568)..(568): n is a, c, g, or t
ctttcccaaccaggttgtcctggctcgagaactggcaacctccagagaatatgcgagtgagtatgggctgcagggagctgtgcgtccgggagcagggcaagcggctccgtgcagggcggctggggtggcagggccggtgtttctgtgctgatttcagggtacaggacactgttggctttagagaccaccaggctgttgtgtacaatgtttgaaagactttaatttgtaccagttacctttgtgagtcatgtctttagtgttttttgttgtttctgatagtaactcacttctctctcacctgaagttaaaattctggagaagcgacatatcataaaagagaacaaggtcccctatgtaaccagagagcgggatgtcatgtcgcgcctggatcaccccttctttgttaagctttacttcacatttcaggacgacgagaagctgtgtatcctttgcgtggttggtgcccgctgaagccacaccagtcaccccttttacttggaatcagaccctgtgngttccacaagcagccccgttccttgccantggggncccttaggccgttacantnagg

SEQ ID NO: 61086 - DNA, 416 bp, Homo Sapiens
agttgggacatttagtgcattgattttcagctattcttcataatataaacatttaaagctataaatatctctcaaagcaacacatttgctgcttctcaaaaatgttaataaagaatgttttcattatcacttgttcacataggagacgggaaactgtggtgcattcatacaatgcactattatacaacaacaacaatgaatggactataggtacacacaataatgtagatgaatcttagttctgacactgaataaaaagaacaagtactagaagactatacatcttatgacagtgtgacacccttgtctaaaaagttcctaagacaaactaaagatacatacacaaatataaaatgcaagagcatgaaattcagcatagtggttaaatctgcaggggaggcagggacacaggttgg

SEQ ID NO: 61087 - DNA, 260 bp, Homo Sapiens
gaaaaagtggaaggcataagcatagaaatattttaggatattttaggatatgtgaataaagctagactcaaaccatcataataaacattttttttttggacaaaagatgatacgataaaaaccaacttgtgtgaactgagtcagtggagaagtgcatctcgtattttaacctaaggcttcagctcccacacacgactggacagaggggtgtgttagcctgatcttcagttttctcattgggaaagcacttgttccactgt

SEQ ID NO: 61088 - DNA, 2722 bp, Homo Sapiens
catagagccagcgggcgcgggcgggacgggcgccccgcggccggacccagccagggcaccacgctgcccggccctgcgccgccaggcacttctttccggggctcctagggacgccagaaggaagtcaacctctgctgcttctccttggcctgcgttggaccttcctttttttgttgtttttttttgtttttcccctttcttccttttgaattaactggcttcttggctggatgttttcaacttctttcctggctgcgaacttttccccaattgttttccttttacaacagggggagaaagtgctctgtggtccgaggcgagccgtgaagttgcgtgtgcgtggcagtgtgcgtggcaggatgtgcgtgcgtgtgtaacccgagccgcccgatctgtttcgatctgcgccgcggagccctccctcaaggcccgctccacctgctgcggttacgcggcgctcgtgggtgttcgtgcctcggagcagctaaccggcgggtgctgggcgacggtggaggagtatcgtctcgctgctgcccgagtcagggctgagtcacccagctgatgtagacagtggctgccttccgaagagtgcgtgtttgcatgtgtgtgactctgcggctgctcaactcccaacaaaccagaggaccagccacaaacttaaccaacatccccaaacccgagttcacagatgtgggagagctgtagaaccctgagtgtcatcgactgggccttcttatgattgttgttttaagattagctgaagatctctgaaacgctgaattttctgcactgagcgttttgacagaattcattgagagaacagagaacatgacaagtacttctagctcagcactgctccaactactgaagctgattttcaaggctacttaaaaaaatctgcagcgtacattaatggatttctgttgtgtttaaattctccacagattgtattgtaaatattttatgaagtagagcatatgtatatatttatatatacgtgcacatacattagtagcactacctttggaagtctcagctcttgcttttcgggactgaagccagttttgcatgataaaagtggccttgttacgggagataattgtgttctgttgggactttagacaaaactcacctgcaaaaaactgacaggcattaactactggaacttccaaataatgtgtttgctgatcgttttactcttcgcataaatattttaggaagtgtatgagaattttgccttcaggaacttttctaacagccaaagacagaacttaacctctgcaagcaagattcgtggaagatagtctccactttttaatgcactaagcaatcggttgctaggagcccatcctgggtcagaggccgatccgcagaaccagaacgttttcccctcctggactgttagtaacttagtctccctcctcccctaaccacccccgcccccccccaccccccgcagtaataaaggcccctgaacgtgtatgttggtctcccgggagctgcttgctgaagatccgcgcccctgtcgccgtctggtaggagctgtttgcagggtcctaactcaatcggcttgttgtgatgcgtatccccgtagatgccagcacgagccgccgcttcacgccgccttccaccgcgctgagcccaggcaagatgagcgaggcgttgccgctgggcgccccggacgccggcgctgccctggccggcaagctgaggagcggcgaccgcagcatggtggaggtgctggccgaccacccgggcgagctggtgcgcaccgacagccccaacttcctctgctccgtgctgcctacgcactggcgctgcaacaagaccctgcccatcgctttcaaggtggtggccctaggggatgttccagatggcactctggtcactgtgatggctggcaatgatgaaaactactcggctgagctgagaaatgctaccgcagccatgaagaaccaggttgcaagatttaatgacctcaggtttgtcggtcgaagtggaagagggaaaagcttcactctgaccatcactgtcttcacaaacccaccgcaagtcgccacctaccacagagccatcaaaatcacagtggatgggccccgagaacctcgaagacatcggcagaaactagatgatcagaccaagcccgggagcttgtccttttccgagcggctcagtgaactggagcagctgcggcgcacagccatgagggtcagcccacaccacccagcccccacgcccaaccctcgtgcctccctgaaccactccactgcctttaaccctcagcctcagagtcagatgcaggaggaagacacagcaccctggagatgttaaggcagaagtcagttcttctgtccatccctctccccagccaggatagagctatcttttccatctcatcctcagaagagactcagaagaaagatgacagccctcagaatgcacgttatgaggaaggcagaatgtgggtctgtaattcctccgtgtcccttctccccctctgcaaaccgtcgtaacaataatagttcctaacacatgggacaattgtgaggattaaatgagttagcctgcagaaatcacttgatgcacagcacatgggaagcattgtgtgtatttattaatccttcacaaagtctttgagatatatttttatcaaatatttagcatggatcccggtacactttcaatacttaataaatggtcaatgttattctttttcactatt

SEQ ID NO: 61089 - DNA, 6486 bp, Homo Sapiens
gaaagacggagtttaatttcctaaaatgtagtgagcagttgagttcaggacaagacatactttgcggtgattcatctggggccttatttccactttgtaattccagtgaattgacttcccatcaggtgagtttcctttaagtataatttaatgctcattgcctacccatttctccatattcacaagaaaatatacatatttgcaggaaaatatataatttttagatgtcatggatcattttaggaaagttgtagtcagttaaaaagctgtcatatcattctacaaaggaggagtaaagtaggagcaattgtgtggcccaacatttgtttgttttttagccaagcttagatttataaagcaatgagggtgtggttttaaccacaaagtgaaagtgttagacagttgttggctctctcctaaaaagtgaatgagatttttcctatacattttccttcttgttgactaatatatgatgaatacttttttcagcttggatataccataaatataaaaataataaagccaaagaatttaagctaaaattcaacacttttcttaactaatttaactggtatggtctccatagtagtccactgttttgtttcctgtgttaacttcccttttgtttcaaaagctcttagaataaggagtcaactggatttttatgtccatggaccccttgtgattatatgcagtgtacgctgtgtgtgcgtgtgtgtgtgtgtgtgtgtgagagagatccttttacttagaaaaaggtctactatgctcattagaagatcaaaagcagattctccttacttgtaacataggagtttcaggattaatctgtattcaagctcattctatatccttcatcaaagaaaagacaatgttttgtgtctgttgtccctctcacacacagccctaatatataatgtgtaactgccttatctgcagccctaaactaatatagctagaggtcttctaatcattctcctacctctaggaaagaaatatagtcttgaaaactgccaatctggtgtgcatacaaaatatatacaaaataccaaggaacattatatgagccttttgctaggtatatctaagcaactgcttcagttaatggccactttacaaattgctgaaagaaggaaacgtctttcgattctttttttttttcttttttttttttttgagacagagtctctgtctgttactcaggctgtagtgcagtggcacaatgatagctccctccagcctcaaactcctgggctcaagcattccttctgcatcagcctcctgactagctggaactcaggctcatgccaccagacctggctaatttttctgttttcagtagagaaaatattttctttcactaatttaactggtatggtttccattgtctacccagttttccatatgcataagaaaatatattcacaggaaaatataaagttttcagatttcatgagtggttttaagaaagttttagtcagtgaaaaaactatcataccagtcttcaaaggaagggtgaaataagttcatctgctacgttgcccaggctggtcttgaagggaaacagacttttttgtagtcatacttatcctttggcttcttagtaagtattatatagtcattactttttgcagttttttagatcaaagtgttaatgtaggtaaagttaattttagaatatatgtaaaagtcaagtctgctttaaatttaatcatctctttggtgaaagggatgggatggagctttgctttttatcatatattcatctgtacctttcaagtattcaaatagaaaaatataaacaatgtaaataaaatagcaaaacaatgtaatatctcataaaactgcaatggtaaaagcatttatcctattgaaattccacaatttttatttgaaaatattatcgacatgtaattcaagtggcatttagaagaataatttaaaagcaacaactctatagaaagcttgtaaaatgattaagtagtttaaaccaaataaaacaatttctgagtcagtcatctccagtaggtctattttagtctcaagataaattcatttctggtgacaactgaagttcttagttatttgttagtatatattggagacatttacaataaagcttagagcacaatgggaaatgaaagtatcatgttttttttaagaccaaatgtattgcagaaatgtgagtaatttaatccgatgctacaatctgatcattctgatctaatctgatcatttaataacactaaataaaaccttcatctcacattctttggctgtttcttttaaaatatgggtttacggataaatcaaataaattcaaaacaaagtaataagcaaatgatttttttttctcagtaatctagtagagtattacatttagaagtaatctgtatctcagtgcagtaactatttaggactgtaagcgccgctgttcacctactggaagacaaatgcaaccgaaaacactcagatctcacacctcacgaagacccgcagatgccacaaactaactgctggactgcagcgaaacccgacccctgtttggaggcactccaggtttccggaggattgtcatctccatagctgcggcaagaaactaaataagacccatttatgcacagtgaagattctgagaggattctgcagcaaaacaacaatggccgctccacagagtcgccccagacgcggcgagctgatcctgctgtgcgcgctgctgggaacgctgtgggaaatcgggaggggacagattcgctactctgtgccagaagagacggacaaaggctccttcgtgggtaatatctccaaggacctggggctggacccccggaagctggcgaagcacggagtccgtatcgtctccagaggtaggacgcagctctttgctctgaacccgcgcagcggcagcttgatcaccgcgggcaggatagatcgggaggagctctgcgctcagagcccgcggtgtctgataaatattaacaccctggttgaggataaaggaaaactctttggggtagaaatagaaataattgatattaacgataataacccaaaattccaggtcgaagatctagaagtaaaaattaacgaaatcgcggttcctggagcacgttatccactcccagaagctgttgacccggatgtgggcgtgaactccctccagagctaccagctcagccccaatcaccacttctccctggacgtgcagactggagacaatggagccataaacccagagctggtgctggagcgcgccctggacagggaggaagaggctgctcaccacctggtcctcacggcctcggatggcggcaagccgcctcgctctagcacagtgcgcatccacgtgacagtgttggatacaaatgacaatgccccggtttttcctcacccgatttaccgagtgaaagtccttgagaacatgcccccaggcacgcggctgcttactgtaacagccagcgacccggatgagggaatcaacggaaaagtggcatacaaattccggaaaattaatgaaaaacaaactccgttattccagcttaatgaaaatactggggaaatatcaatagcaaaaagtctagattatgaagaatgttcattttatgaaatggaaatacaagccgaagatgtgggggcacttctggggaggaccaaattgctcatttcggtggaagatgtaaatgacaatagaccagaagtgatcattacgtctttgtttagcccagtgttagaaaattctcttcccgggacagtaattgccttcttgagtgtgcatgaccaagactctggaaagaatggtcaagttgtctgttacacacgtgataatttaccttttaaattagaaaagtcaataggtaattattatagattagtgacaaggaaatatttggaccgagaaaatgtctctatctacaatatcacagtgatggcctcagatctaggaacaccacctctgtccactgaaactcaaatcgctctgcacgtggcagacattaacgacaaccctcctactttccctcatgcctcctactcagcgtatatcctagagaacaacctgagaggagcctccatcttttccttgactgcacacgaccccgacagccaggagaatgcccaggtcacttactctgtgaccgaggacacgctgcagggggcgcccctgtcctcgtatatctccatcaactctgacaccggtgtcctgtatgcgctgcaatctttcgactatgagcagatccgagacctgcagctactggtaacagccagcgacagcggggacccgcccctcagcagcaacatgtcactgagcctgttcgtgctggaccagaatgacaacgcgcccgagatcctgtaccccgccctccccacagacggttccactggcgtggagctggcgccccgctccgcagagcgtggctacctggtgaccaaggtggtggcggtggacagagactcgggccagaacgcctggctgtcctaccgcctgctcaaggccagcgagccgggactcttctcggtgggtctgcacacgggcgaggtgcgcacggcgcgagccctgctggacagagacgcgctcaagcagagcctcgtggtggccgtccaggaccatggccagccccctctctccgccactgtcacgctcaccgtagccgtggctgacagcatccccgaagtcctgaccgagttgggcagtctgaagccttcggtcgacccgaacgattcgagccttacactctatctcgtggtggcagtggctgccatctcctgtgtcttcctcgcctttgtcgctgtgcttctggggctcaggctgaggcgctggcacaagtcacgcctgctccaggattccggtggcagattggtaggcgtgcctgcctcacattttgtgggtgttgaggaggtacaggctttcctgcagacctattcccaggaagtctccctcaccgccgactcgcggaagagtcacctgatctttccccagcccaactacgcagacatgctcatcagtcaggagggctgtgagaaaaatgattctttgttaacatccgtagattttcatgaatataagaatgaagctgatcatggtcaggtgagtttagttctttgcttgcttttaatttccagatgaattttatttggcataaattatgttttgaaaaacattgtgaagatagttgaaaataatttttaaggtgtatcacagagttttgggtttattttggtggtgttactataaaattgaactctaatagtcataggttattgtttcatttgcttttaaacgacttggaaaagattgttcaaccattttaagccttccagtattttattcctattatcactcattcacttaagaagtagctacccgtccatactggtaattttgctattgtttgtgtgtgtgtgtgtgtgtgtgtgtgtgtgtgtgtgtgtgtatcccaaactagaacttcagaaaattatcaagaagtctaaagccttgttattagcttagcaaaagtaaaatatatctcagaatttttagggttatgtttagcatttgaacctgtaactaggctcttgtagatttcttcactttaaacctcttttctgagccctgtttctgtaccagtgcccttcaaaactttaatacttcttaccatccttcaaaacatgaacaaactttaaagatggatcttggtgggagatgagactggttactaaatattaagtatgtgagtcagtggtcacctgggctccatgcccatggagacatgaaatctaaagcctagaatgtccattgctcccccaaacaaaaaacaaaagcaaaaacattagatctgaattaaaatgtaattttaaactgttgaaagtgacttttgtaaaatatgtaagaacatatttcaatacaattccaattagctgtttcggttgtgcattgatgtgaagtggtgagaatgttgatattaagaaccaatgtttcaggtacacaagttctaaataagctgatcaattcaattaaagttattcagtcttggctggacacagtgcctcatgtctgaaatcccagcactttgggaggctggggcaggaggaccgcttgagccccgggggtttgaaactgcagtgagctatgatcatgccactgcactccagcctaggtggcagaactagaccctgtctctaaaaaaactattattaggccgggtgcggtggctcacgcctgtaatcccagcactttgggagactgaggtgggtggatcacctgaggtcaggagttcaagatcagcctggcaaacatggtgaaaccccgtctctactaaaaactacaaaaattagccaggcatggtggcatgcgcctgtggtcccagctactcgggaggctgaggcagaagaatcacttgaacccgggaggtggaggttgcagtgagcctcgatcctgtcactgcactccagcctgggcaacagggtgagactccgtctcaaaaaaaaaaaactagttctagatcgcga

SEQ ID NO: 61090 - DNA, 568 bp, Homo Sapiens
atttttagtagagacggggtttcaccatgttggtcagggctggcctcgaacccctgacctcagatgatcagcccacctcggcctcccaaagtgctgggattacaggagtgagccaccacgcccggattttttttttttttttttaacagaccaaagcgttaagagtccccaaaggagggaagccaccctgcaatggaatggcagaaccaggatgggtgaacctgaagtctcaggtgtcaagacatcggcacacagacagcttggtctctcctaccgacaagcacatctgtggccctgctgcacatatgggcagagggtggctggcacgtcctgcctcggcatgttccagcatccccacaggaccctatacctggcagcccctacatcatttactgcttctgtgacagatggagacccaatagagtttcctaagagggagaaagagtccacagcaacccccaccctcaattccagggcctcttggtacgggtcctaacttgtgtcatgcccaggccaggtgctgtcaccctttcttccaccagagtccctgcacacaagccaaaacccg

SEQ ID NO: 61091 - DNA, 499 bp, Homo Sapiens
  misc_feature (339)..(339): n is a, c, g, or t
  misc_feature (456)..(456): n is a, c, g, or t
  misc_feature (469)..(469): n is a, c, g, or t
  misc_feature (481)..(481): n is a, c, g, or t
  misc_feature (486)..(488): n is a, c, g, or t
  misc_feature (497)..(497): n is a, c, g, or t
gtgggtggtattttgtttttaatctccatagtgtatttgttaagtttatttataagcagatcacttcactatttacagtacatgagcatagagattctacagtttctgtgatgtaaacaataaccccacagtgggagtttgagaaaagaagccagttctgaagtatttacagacattaaaatagaactttatactcacagaataataatacatagagcaatttggttaaattatctaggaaactatagaatctgacaatgtacaaatacaagaaaacattttctcatttagaaggtaagacagagaaatcacaccagaaataaaatagggacgatgacnaccacaataattaaaagcaaagaaggttcctccttgcctcttacggataaagtatttatataaataaggacacaacccaacaaaatggaaaaaatatataaaaatcctctaccaatnaaaaaaaatagcnaaactaaaactngatcnnnatcattacnat

SEQ ID NO: 61092 - DNA, 485 bp, Homo Sapiens
tcccagttaatttttgtattcttcctagagacggggtttcaccatgttactcaggatggtctcaaactcctgatctcagatgatccgcacgcctccacctcccaaagtgctgggattacaggcgtgagccaccatgctcggcctaggtgacttttcatggggagataacacacaggcatggtgagcagcgtggcagaggacctgtgtgcagggccctgtctcccgccggggaatccttcatctgggaaatctccgctgcgggacagggatgctgtgtcgtcaggacgcagcgtctctccagggcacccgggcctcctctgagcctctttgcgctctttggctgcgtgctttctttcctgtggcaaaaggtacatgacgttttattgaccatttcagccattggcaagtgtgcaaatcagtggctttagtccattcgcaatgcagctggaccccaccctttcctgattcccgcaggccagggctga

SEQ ID NO: 61093 - DNA, 1309 bp, Homo Sapiens
ggacgttcacgctctatgactttgacaactgcgggaaggtcaccagggaggacatgtccagcctcatgcacaccatctatgaggtcgtggatgcctcggtcaaccactcctcgggcagcagcaagaccctccgtgtgaagctaaccgtcagccctgagccctccagcaagaggaaggagggtcctcctgctggccaggaccgggagcccacccgttgcaggatggagggtgaactggcagaggagccaagggtggctgacaggaggttgtctgcacacgtcaggaggcccagtactgacccccagccctgctcggagcgggggccctactgcgtggacgagaacacggagcgcagaaaccactacctggacctcgccgggattgagaactacacgtccagattcggccctgggtcccctcctgtgcaagcaaagcaggagccccagggcagggcctcgcacctccaggcccggtcccgctcccaggagccagatacacatgccgtacaccaccgcaggtcacaggtgctggtggaacacgtcgtgccagcctcggagcctgctgcccgggccctggacacgcagccccggccgaaggggccggagaagcagttcctcaagtcccccaagggctccgggaagccgcctggggtgccagccagcagcaagtccgggaaagccttcagctactacctgccggccgtcctgccgccccaggcccctcaggacggccaccacctcccgcagcccccaccgccaccctacggccacaagcggtaccgccaaaagggcagggagggccactcgccactcaaggccccacacgctcagcctgccacagtggagcacgaggtggtgcgggacctgccgcccacgccagcaggagagggctacgcggtgccagtgatccagcggcacgagcaccaccaccaccacgagcaccaccaccaccaccaccaccaccacttccacccgtcctagcgccactgccaagcacacctcgctcccagcacaccacggcccgcgacctcagggcagggagcagagcagctgccggctgtgtgcccatggggagcccagcccccaccccccacctccgacagcaaacagcaactgactgcaggtgctggcatgatggaggtggtgcaccttggacacgtggacaaggcccaggcgccctctgctcttctgccctcgatgccacatggcggtgaacacatctgaagccactatgtttcctggctctaaggctcgtctgtgtaacccataaaacctgctttgattccaaaaaaaaaaaaaaaaaaaaaaaa

SEQ ID NO: 61094 - DNA, 363 bp, Homo Sapiens
ttcaatgagcaagtgagtggcgttttaatccccattttatagataggtgacagcttcagaggccacattacccagtcagtaaacacagtaagctgaggttccacccaggccctttggctgtgaaagccaagatgagtagcctgggggccacgcccctcccccaggtgcccagttcatacaggcaggcaattggcagacgtgggggcctgtggatttgtcagcaaggttgctggtggggtttttgtttgtttgttttgaataagggtctcaccccgtcacccaggctagagtacagtcgtgtgatttcagctcactgcactccagcctgggtgacagagcaagaccctgtctaaaaaacaaaac

SEQ ID NO: 61095 - DNA, 585 bp, Homo Sapiens
  misc_feature (503)..(503): n is a, c, g, or t
  misc_feature (526)..(526): n is a, c, g, or t
  misc_feature (578)..(578): n is a, c, g, or t
gttttcttttcctttctttctctctctctcgcttctctcctctccttttctctctctttcgcaataaagacaggaaaaaggcggggggaaacatggagaaagcttcccacggataatcccatggagtctaaaagggacatgccgagggctggcagggctgggaggcctttgggaagctcagaggagccgcggggagccgggcgtacgagagcaggccgggactccgctgggcgaggccgagcagggacaccagctcctcacccagttgaaacttgcggtcactggagaggagcaacgcaggagctgatctggtttgaaaaagaggtcaaagcactttacagctcccatttcccagcgccgaggagtggtgagttttccgtgttccaagccccactgttctgcctccgggagagtttgcagctgctttcggggaaggtggctggctctgctcacctgctctgccctccctgacaagagcacctgctgtgtgcccacactttggntcccgaggtctactttgctcctnctgcaccccaggagcttggcccttctggctctggaggagacttaggttcagnaaactgc

SEQ ID NO: 61096 - DNA, 562 bp, Homo Sapiens
gccaacattccatttttaatggagactcaaaacattaaaaaaaaaaaatcagaactgagcattgccaggagaggtcagacttgccataggatagactttctgggtctcatatgaagcctctacagacagaagcgtgtcctatgttcatggcctttctggatgtaaactggagtctctgacaaactacagtgcttttccaagctcacctctctagcctgtgatgaacactgtcaaatacattaagtgaaacaccaaagcttagagggcgctgagcaacagaaaatggtatcagttggtccagcattcggacctcgtattcgtattgatggttctccccctccttgcctcctccctactccacctctgctgcccttatgcttggtacctctcattttggctctgcccctctggaagatcttctctgtatcctcatcctgcgatgagtggtggcaacgtgtgccctgagccctatgctaacgtgagtggtttctttcagtgttctcagattttccccagctcagtcctccctccttttctgcagcttggtcctggtttcttcttg

SEQ ID NO: 61097 - DNA, 3699 bp, Homo Sapiens
gaaatcaaaactaaaaatccttgatgatgtgttatgggtgtggtttgtacaagagagctaatacagaattccattcagtgaatcctctgtttaaagagaaagccttggcctttgtcagaagatgggaaaacaaatgtacatttataaactttcagttaaaataaaatgtttaaattatatatctgtgtatcttttttttttaaacgattccttctaacctttttttttaaacgattccttctaacccatttttttttttgttaaacccaaccagccaactcttggtcctgattgtattggaaactagggcttctattaaagatagttaacatctatttagttcatatacaatatcagcattattcgaagagtttcacttgaattatctcagttaagcttcgtaacaaccctatgtcttctctttatagttaagaaaactgaaccttagagaggtgaagaattcgtccagggtcataaaactagcaagtggcaaaattgagatttaaacactgctaggtgttaccttaggatctaaacttttaaccattactccaaagtacaggctgggtgcggtggctcacgcctgtaatcgcagcactttgggaggccaagacgggtggatcacttgagcccaggagttcaagaccagactaggcaacatgacaaaaccccgtatatactaaaaacaaaaattagccgggcatggtagcacacacctgcaatcccagctccttgggaggctgaggcatgagaattgcttgaacctgggaggcagaggttgcagtcagccaagatcgcaccactccactacagcgtgggtgacagagtgagaattggtctcaaaaaataaataaataaactacataggaaataaaactacctggaatcttttcttttacaaaatcaatatgacacacatatcggtacttgacaaagacaacatgaaaaattttataagatattaggccgggaacggtggctcatgcctgtaatcccagcactttgggaggccgaggtgggagggtcacttgaggccaggagtctgaaaccatgcctggccaacatggtgaacgcccccatcccccatatctactaaaaatataaaaattaggctgggcatggtggctcatgcctgtaatcccagcactttgggaggctgaggcgggtggatcacttgaggtcaggagtttgagaccagcccggccagcatggcgaaaccctatctctactaaaaatacaaaaactaaccgggcgtggtggtaggcgcctgtagtcccagctcctcaggaggctgaaacacaataattgcttgaacccagaaggcggaggttgcagtgagccgagattgctctgccgcgctccagcctgggcgattgagactgtctcaaaaaaaaaaaaaaagaaaaattgtataagatattaatccaagaattctaagggaggtactagcaaatagtatccagctttttatcacaaagttaacctgcagaaaaatgatgggagctaagatgatacagagggtcaagaaaggtatctccctttaagtgacatttgagcagagatctgaatgaagaaatggcaaagtaataaagactctgaggcatatttggttttttttttttaggaatatgttctcagtgaaccatatggggggaaagcttggtttatccattttatagcatgctgtactgttactaagaaggaaatagttggtcaggcacaatggctcacgcctctagtcccaacactttgggaggccaaggcgggcggatcacttgaggtcgagttcaggaccagccttgccaacatggtgaatccctgtctctactaaaaatacaaaaattacctgggcgcagtggtgtgtgcctgtaatcccagctacttggaaggctgaggcaggaacatcctgcctcaggtagcttgaacctgggaggcagaggttgcagtgagtcgagattgtgccactgcactccagcctgggtgacagagtgagactatgtctcagaaaaaaaaaaaaaaaaaaggaaacagttgatttggagataaagaaatggaaaagcagcatgaatagttacagaaggctatattgagattgatctcatttaggtaaaacaaaagactcaaattgttaatctgaacatggactttcaagaagactagggaggagaaattttcattttctagtttatatatttcagcatgtttttattttgtcaagatacttataattttataaagagattgaccgggcacagtggctcacacctgtaatctcagcactttggaaggccaaggcaggtggatcactagagcccaggagtttgagaccagcctgggcaacgtggccaaaccccgtctctacaaaaaatacaaaaattaggtgggtgtggtagcacacacctatagcctgagctattgggaggctgcggtacaaggatcacccgaacccaagggaggtcgaggctacagtgaactgtgattgcaccactgccctttagtctgggcagcagagcgagaccttgtctcaaaaaaacagaaataaaacaacaaaacataaaaagatgcttcaattttgatttcatagcattaatttcttttcagacatgaagaaaatgaagtttctgataaacaaatctgactataatgaggcaacggagtataccgaaaagtgtgtggcctttagaatcttacagggttgggttctaatgccagctcagctacttcctgcgcttatggtttagggtcccatatgctcttaagtttttttcttcaaaagtaaaagaggactgataacatgcttagggttgtgagaattaaatgtaaataagttttcagtacatatttcttccctcaccttatttacagtaatgctaggttgtttataggctcaggaatgatgagacctagtgtcagtatagtacagatacatgtaaaactgatcaagagtgataacactaatttgctttaaatggctttacaccatagtgaatgagttattttatttataatttgctttgttccagaaagtattttaggcagattacaaatattttataatagaagtagcatagattaaaaagtgatggagggaggccgggcacggtggctcatacctataatcccagcacttcgggaggccgaggcaggtagatcatctgaggtcagcagtttgagaccagcctggccaacatagtgaaaccccgtctctgctaaaatacaatacaagccgggcacagtggctcatgcctgtaatcctagcactttgggaggccgaggcggacaggtcatgaggtcatgaggtcaggagatcaagaccatccgggctaacacggtgaaaccccgtctctaccaaaactacaaaaaaaaaaaaaaaaaaaataaaaaaagccgggcatggcggcgggcacctgtagtcccagctactcaggaggctgaggcaggagaatggcatgaacccaggaggcagagcttgcagtcagccgagatggcgccactgcactccagcctgggcaagagagcgacactccatctcaaaaataaataaaaaaacaattagctgagtgtggtggcacacacctgtaatcccaggtacttgggagtctgaggcaggagaactgcttgaacctgggaggtggaggttgcagtaagcggagattgtgccactgcactccagcctgggcaacagcaagactccatccc

SEQ ID NO: 61098 - DNA, 3367 bp, Homo Sapiens
actgggacaatacccggactgccctccctcacaacaactgttgttcaggctacaccaaagagtcctccgttaaaacccattcaaccaaagcccacaattatgggagagcccatcaccgtgaacccagctctggtgtcactcaaagacaaaaagaaaaaggagaagcgaaagctaaaggacaaagaagggaaagagacgggaagcccaaaaatggatgccaagctggggaaactagaggactccaagggggccagcaaagatttacctgggcattttttaaaggatcatctcaacaagaatgaagggctggcaaatggactgtcggagtctcaggagagccgcatggccagtatcaaagctgaggccgataaggtttacactttcacagacaacgctcccagcccttccatagggagcgcctcgaggctggaatgcagcactttggtgaacgggcaggcaccaatggcacctctgcatgtgttgacccagaatggggcagagagttcagctgcaaagacaagcagcccggcctattcagacatatctgatgctgctgacgatggtggttctgacagcaggtcggagggtatgagatcaaaggccagttccccatcagatattatttctagtaaggacagtgttgtaaaagggcattcttcaactacagcacaatcatctcaactgaaagagtcccattctccctattaccacagctatgatccttattattctccaagttacatgcaccctgggcaggtcggtgcccctgcagctggaaatagtgggagcacgcagggaatgaagatcaagaaggagtctgaggaagatgctgaaaagaaagacaaggcagagcagttagattctaagaaagtggaccacaattctgcatccttacagcctcagcaccagtcggtgatcacacaaagacatcctgccctggctcagtcactttattatggccagtatgcatatgggctctatatggaccagaagtctctgatggccaccagccctgcctatagacagcagtatgagaagtactatgaggaccagaggctggcagagcagaaaatggcccagactgggagaggagactgtgaaaggaaaagtgagttccccttgaaagagctgggcaaggaggaaactaaacagaaaaatatgccatcggccacaatctcaaaagctccctctactccggagcctaacaaaaaccattctaaactagggccatcagtgcctaataaaactgaggagacaggtaaatcgcagcttctctccaatcaccagcagcagcttcaggccgacagcttcaaagctaagcagatggaaaaccaccagcttattaaggaggctgtagaaatgaagtctgtcatggactctatgaagcagacaggtgtagacccaacctcgagatttaaacaagacccagattcaagaacatggcatcattatgtataccagcccaaatatctggatcagcaaaagtcagaagaacttgatagagagaagaaattaaaagaggatagtccgaggaaaactcctaataaagagagtggtgtgcccagccttcctgtatcgttaacaagcattaaagaggagcccaaagaggccaagcatcctgattctcaatcaatggaggagagcaagctgaaaaatgatgatcgaaagactcctgtgaactggaaggactctcggggaacaagagtggctgtctcctcacccatgagtcagcatcagtcatacatacagtacttgcatgcttatccttacccacagatgtacgaccccagccatcctgcataccgggctgtttctcccgtcctaatgcacagttatcctggtacgtgttgtcggttctgactatattggaggaaagaggcgatgttcaaatattagctgttaaaaactcaagataaattagaagcttcaagagtgacatttgttttccttgtttttatgctgtttaaagtcccaaagataaaactgatttaatataagtttttttaatgaaatgtcaagaatcctcagccatagtttccatagtctctgatggtctgctatagctgttaggctgacagatactttattgcctataaaaatattctaagcacttactgtcataatcattatagttactattcctttcacttaagcggacacgtaaatgtatgaaatggctataagctcaattctgtttataacctcccttcatcaggatgaattaactgggagaagaaaattggagaagctagacacagtttaatgatgatgtagcccattcttaatgtaaccccctattttaagatctctttgactcttatcccaaattcatgtaacccaaatgattttttttaaagatatagcctgtaacttgatgtggcatttgttgtttatctgcaggggcatatctctctccaggatttcattatcctgtttatgggaagatgtcagggagagaagagacagagaaagtcaataccagccctagcgtcaacacgaaaacaaccactgaatctaaagcactggatttgctccagcagcatgctaaccaataccgcagcaagtctcctgctgtaagcctccttttgttgttatttaaaagtactgtgatttggggagaaaggggaacaagctagagaacagtcttgaaatataaatggtttcggaacccagctgtgatttcaggatgctgttttatcctaatacgtaaagaatggagcgttcaaaagtaagacgctttcacacatgagagaaaattgttaaagcacgtatggcagtagcaagcttttctgttgcaaaatctagtataccttgcttacccaggaggatggttgttaggtggaaatttaaattcataggaaccaacttttggtgcaaaatatgtttgataagacattgaggaattaggtaacagaggagtatattttatataattttggtaagtaagtagttcagaggctacaaactgttgactttttgggcaaatcaagcttttcaaaaaatgttttcttgcaggataccttttaaaaatcagacattttacatgcaagttcagatcacctctttctcttaagacaatagaaaatctgggccgggagtgagccactgcctgtaatcccagcactttgggaggccgaggcgggcagatcacctgaggtcaggaattcgagaccagcctggccaatatggtgaaactccgtctctactaaaaatacaaaaagtagcctagtggtagtgggcacctgtaatccaagttactcagaaggctgaggcaggagatttgcttgagcccgagaggcagaggttgcagtgagcagagattgtgccactgcactctagcgtgggcgacagagcaaggctctgtctc

SEQ ID NO: 61099 - DNA, 558 bp, Homo Sapiens
  misc_feature (424)..(424): n is a, c, g, or t
  misc_feature (457)..(457): n is a, c, g, or t
  misc_feature (499)..(499): n is a, c, g, or t
  misc_feature (512)..(512): n is a, c, g, or t
  misc_feature (518)..(518): n is a, c, g, or t
  misc_feature (538)..(538): n is a, c, g, or t
  misc_feature (551)..(551): n is a, c, g, or t
ccattctccagggcagtgattctcaagctagatacacaacagaatcatctggaggacttgttaaaacagaatgctaagccccatccccagtctccaattctgtggatctggggcagagtccagtaatttgcatgtgtgatgccgctgctgctgctgttcttggaagcacaccttgagaaccactgcctggggaacagcttagctgctatgagaatctgattctgtgttcatattccgtatcacagatagctcttggcttttcaattgtggtttctttttttaatgtcttactaagggggaaaaaaaggaacgccactttatataaacctgaccttttggtaagcctgggtagtaacttcccatgtggagtaaattaatctctttcatgcatgcctcgtgctctggaaaaagtaaaacagattgngttagacatttaccaagtactttttctggtggnggtcactgccctaacctatcaaaactgggttctacccttaanaacttacatggantaaggnggcatccaacaaaccagacntggagtcatgggngaggggc

SEQ ID NO: 61100 - DNA, 1889 bp, Homo Sapiens
tcagttgtcaacaaaatcagtaagtgttattaaataccccatggtgtgtggttctggcactgaaatggggctgtttcctaaggctctgtccatggccacctctgtctatttctgcattctgtcttgcattgcttctgttgcctatatcctggtcagcacagtttatggtgaatcattgcttattgaaatagagacggcaataatgaagccagctattataaattagagcaaatatacacatccaatacgttttaaacgcatgtgatctctggagtagtatcactaggtagcttccatttcagttcgcctttggtatattactgtactccaaagaatatcatttttccctctgtaaaattttcctcatgaaaatggtcaccataggtctgatttactttttggatcagtaacaggtcacagcataaatcccattcctgcatcaaggcggaacaagaccctcacactttggagggagctgagttcctgtttagaagaacatgcacagttagataaatctgttcacacggcttagatgatcagagccaacatctgatgactatgagcaaggcacttttctaaacatttttagtattttctgaacagttttgttgaggtatactttacagataacattcacctcttgagctgcagttcaatgagttctcgtaaactgagttgtgcagccatcaccacgttccagttttagcacatttccatcaccccaaaagttcctttctgcctgtttgcagccaatccctgctccctggccagccacaggcaagcgctgtcaatgtttggacagtgttggattacctaatggactcttcaagacagtcctttggggtgttactgtcattctctgttttacacggtgaagaagtgaggcactgagggcactcagggtggtttcaaatgaccgaggccaggtgctcagggcccagaaccctcttaccccctccaacttcagtgagcttcaaaatcacctgctgagcttgtttgaccacagacttgtgggctccacccttgaattcctgacgccctaggtctgggatggggcttgacaatttgcatttgtaaaaagttcctgaatgctgctgctgctgctggtcagggaaccctgctttaagacctcctggtttatgcaatttcaaacattgtaagaaatagtcactcatgtgattggtttgtgtgcttggtgtagactgtacgaggatttttcaaaagtaagtattgttcattctaaaggaaggaaatgtatgttatgagatagaattatataataaacagaaccattaaatgccatctgaaaagtggtgttttcaatggcaggaagtagcattgctgcgtattttgtgtgtgtgcgcaactcagctttgtgtcattgtgtaactttaatttgaaagaacatcacgtgactgctgttttcatttctgccttttaaaaagcagacagctattcagaacagcaagaagcagacccaaactttgtttgtatgcccctagtcataggcaaaaatggaaagggtaatttaccaaaaaagaagaaaatagataaaaaggaaaagaatggaaagaaagtactgactcactgcaaacagctgcaaaatgttgcccttgggatagaggttaactcggttgtgaaataatggccaaagcggtgcactcttaataacttttttgtagccctggagaaagcttctggattgactgtgagaagcttggcagaaggtgctgcggcctggtggctggctcagcaggaggcctgggattgaaagctctcggtttgtacaagctcttttggatttgtaacacttttattttaaatctccaataaatgtaaatattttggtcaaaaaaaaaaaaaaaaaaaaaaaaaaaaaaaaaaaaaaa

SEQ ID NO: 61101 - DNA, 1947 bp, Homo Sapiens
agaaagaggcttctccaacccggcccggcccttccttcccctttcccgcagtcgttgcctcctcctcccctgcctcctcctccccttcctcctcctggccgcttagtctcacacccgccgggccgttgttcccgagacgttgttgagtcccctgtgtcctcttctgggtggaggaactgcaatgtctggtggagaacagaaaccagagaggtactatgtgggtgtggacgttggaacaggcagtgtccgtgcagctctggtggaccagagtggggtcctgttggcttttgcagaccagccaattaagaattgggagccccagttcaaccaccatgagcagtcctccgaggacatctgggctgcgtgctgtgttgtcacaaaggggattcccatcgaaacgtcatcatgtggctggaccatcgagcagtcagtcaagttaacaggatcaatgagaccaagcacagtgtcctccagtacgtcgggggggtgatgtctgtggaaatgcaggccccgaaacttctgtggctgaaagagaacttgagagagatttgctgggataaggcgggacatttctttgatctcccggacttcttatcgtggaaggcaacaggtgtcacagcacggtctctctgctccctggtgtgtaagtggacatattcagcagagaaaggctgggacgacagtttctggaaaatgattggtttggaagactttgttgcagataattacagcaaaataggaaaccaagtgctacctcctggagcttctcttggaaatgggctcacaccagaggcagcaagagaccttggccttctccctgggattgcggtcgcagcttcactcattgatgcccatgcaggaggactaggagtgattggggcagatgtgagagggcacggcctcatctgtgaggggcagccagtgacgtcacggctggctgtcatctgtggaacgtcttcttgtcacatggggatcagcaaagacccgatttttgtaccaggcgtctgggggccttatttctcagccatggtacctgggttctggctgaatgaaggtggtcagagcgttactggaaaattgatagaccacatggtacaaggccatgctgcttttccagaactacaagtaaaggccacagccaggtaactgctgtctctgttccctctaaaattttccttgtgtgactgtattgagagaattcacgttgggcagttgggtgattttcagatcctacagacaatgaaaatgcctgttagtgcttgaaagatagtcacctggatgatccagaagatagatgtattaattctttaaatgaggtaagagaacttagagaacctagagataccccaagaatatacccagggactatagataagaaactctgatgtagaagaaggaccatggattctggagtcaaaacttcttagtttcacatcccagccatactccttaatagatacaggaccttgagctagttacttaacctctttatgcctgtctcttcatctgtaaaactgaagataataactgatatggagtgatttctagaatattttgaagcaagctgagtgcaaaaaaaatttacgatatactccctttcatgtaaaaagaaagacataggaaaatacatgtgtatctgttcatttttgcaaaagaaatataggaagtggccaggtgcggtggctcactcctgtaaccccagcaccttgggaggccgaggcgggcagatcacgagttcagagatcgagaccagcctggccaacatggtgaaaccccatctctactaaaaatacaaaagttagccgggcatggtgatgtatgcctataatcccagttacttgggaggttgaggcaggagaattgctcaaacccgggaggtggaggttgcagtgagcagagatcgtgccactgcactccagcctgggcaataaagtgagactccgtctc

SEQ ID NO: 61102 - DNA, 1077 bp, Homo Sapiens
gggttaatagctcttacttaaaaaaacagatacgaagaatgtcttgatttggtgtgctcatttaccataatgtcatgaggggaattagatttcacaactttaaaaggaatatatttttattttattttgaaaaactgagtcatataggaattttcttatacttcaaggcatcatggaaacatttttttcctgtttgggtattgtggaatttaaacgttcaaataaataaatggcataactaagtgttccaaatttttttacaatgtctttgaccctattcaaacactttaggtatttactgaccgtctgatgtgtaagatgtggaataaaactggaatcaattaattatttcactgtgttatcagcgcaagatcaaccatctgggtttcttaaagacacccgaaggattgaattttgtttcagtattgataatggcatagtctctatgtgctacatggaattacatcatttatccctccagtgccctatatgttgataagtatgtcagtttgacttagtatacatatatacagagatttcattacatttacctaataaatacaaaatacatttcgagtgttactgatctcctatgttacatgagcctcctgtaatcattgtgcattgatgttccaatgttttattgtttgtatgaattttaatttgaaaacaaggaaacaatccaaaagcagaaaaaatagcttttcttaaaattttcagtgctacattttccctctgaggtccatagagatttgaatgtataggagattatccgaaaacagctattttgattaaaaaatatatctcccaggattcaaccaacttaatgatgaagtactattgtctactgctttatacataaaagggaactttttatctgcttgtaaagggatttttatgtgtatttctgcataatcagatgacttctattgtgttttctactgatgaaattctctgtaaaatgtctttttcttacattatccaacaggcataaagaataacagtaaagacttttgtgtttgtaatactacctcttttatccctgcactactgttttattgcaaaaattctatattg

SEQ ID NO: 61103 - DNA, 1970 bp, Homo Sapiens; identical to SEQ ID NO: 23091

SEQ ID NO: 61104 - DNA, 1784 bp, Homo Sapiens
gagggaacactgaggtgcctgcccaaccactctgtcccggtttccttcagcaggaccagccatgctggtcgttcagatgcctttctcctttcccatggcccacttcatcctctttgtctttacggtttccactatatttcacgttcagcagcggctagcgaagattcaagccatgtgggagttaccggtgcagataccagtgctagcctcaacatcaaaggcactgggacccagccagctcagggggatgtggacgatcaatgcgataggccgcctggggaaccagatgggcgagtacgccacactgtatgccctggccaagatgaacgggcggcccgccttcatcccggcccagatgcacagcaccctggcccccatcttcagaatcaccctgccggtgctgcacagcgccacggccagcaggatcccctggcagaactaccacctgaacgactggatggaggaggaataccgccacatcccgggggagtacgtccgcttcaccggctacccctgctcctagaccttctaccaccacctccgccaggagatcctccaggagttcaccctgcacgaccacgtgcgggaggaggcccagaagttcctgcggggcctgcaggtgaacgggagccggccgggcacctttgtaggggtccatgttcgccgaggggactatgtccatgtcatgccaaaagtgtggaagggggtggtggccgaccggcgatacctacagcaggccctggactggttccgagctcgctacagctccctcatcttcgtggtcaccagtaatggcatggcctggtgtcgggagaacattgacacctcccacagtgatgtggtgtttgctggcgatggcattgagggctcacctgccaaagattttgctctactcacacagtgtaaccacaccatcatgaccattgggacgttcgggatctgggccgcatacctcacgggcggagacaccatctacctggccaattacaccctccccgactcccctttcctcaaaatctttaagccagaggcagccttcctgccggagtggacggggattgccgcagacctgtcccccttactcaagcactaatgctggcccgtcctttgagaccttttctccttctctgcctccctcaagatgagtgcccgggcatgagaagcacatggttccatgagcaggacccatctctcttctgtgaagatgcgttgggctgcaagtaacagaaatctcagtgaacagtggcctggcgtggtggctcatgcctgtaatgctcccaaactgctgggattacaggtgttagccactgcgcccggccctagagctcactgttttctagttagtccatctggaagtggagcctttttccagtttgcacaaatgtgccatattggcttgtagctggcatgcatccaagtccataggtcctgcctcttcaatcctggctttctagggcctgggatgatcattgctagaactgagagaccagcctggctcagtgaacttcagggcgttccattcattctttcagtaaatgtttgcagcacatgtgttacatgtcaggcagtgaaaccccccacagcagccttccctctcagaggatacatttgtaaccattacacagtcatcagaggaataattttttttaatcaccgtgattggacttgcgaatagccactgcactgcggcctggacgacgtagtgataccctgactcttataaataaataaatgaataaccccaaaaaaaaaaaaaaaaaaaaaaaaaaaaaaaaaaaaaaaaa

SEQ ID NO: 61105 - DNA, 354 bp, Homo Sapiens
tttttttttttttttttttacttctaatggcattgtagtcatatccacttttcaaaagatgcacactgaagtacagagggatgaaagtgcatgacattatgagatttactttaaaatatttcagcaaagaaaaagaaggaaaaaagattaatatgttaaaattctgagaactgctgaatctagatactagaactttgtattattctatattcaaaaaagagaataaccaggtggctattctgataataacaaggtttcaatatacgtataaaaccaacaagcagaatttcaattccattatatgtcattaaacaactatttaaattaagtagaataatgttacccagttcaata

SEQ ID NO: 61106 - DNA, 572 bp, Homo Sapiens
  misc_feature (20)..(20): n is a, c, g, or t
  misc_feature (456)..(456): n is a, c, g, or t
  misc_feature (478)..(478): n is a, c, g, or t
  misc_feature (503)..(503): n is a, c, g, or t
  misc_feature (547)..(547): n is a, c, g, or t
  misc_feature (571)..(571): n is a, c, g, or t
aaggcagggtcttactctgnctcccagcccggagtgcagtagtgcaatcttagctcattgcagttttgacctcccaggctcaaataatcctcccgcctcagcctcctaagtagctgagactacagctgtgcgccacgacatctagctaattatttgttttttgtagagatgaggtctcactgtgttgctcaggctgggtaggtgtctaactcctaggctcaagtgatcctcccacctcagcctcccaaagtgctgggattacaggtgtgagtcaccgtgcctggctttgtttaaggcattctttttccgcagcatctgttaccagcagcctgaagccatttctataacaatatcaggaagacacatggacagagaccctaatgtatgaaaaatgcatcaattatttgagattaatgagtcctcataaacagagactgagaggctctaactttcctncgttatgtgaagagtaagaacnagacacttctcctgtcctttggaanggtgttatgcatctaagggattaaattgcaacaatggctttaanacggaggggggaaaacattgggcnt

SEQ ID NO: 61107 - DNA, 1974 bp, Homo Sapiens
ttaaaattcattagggttggaaggaatggagtaagagcacttttctgcagggatgaaccatgggggtgggcacctgcaccgagggtcccttgcctaccctaggccactgcacacctctatgccttgcagtggggaagcccatcgaggtacagaagacgctgcatccctcggaggaggaggtgaaccagctgcaccagcgttatatcagagagctgtgcaacctcttcgaggcccacaaacttaagttcaacatccctgctgaccagcacttggagttctgctgagcccaaagggcagggccaacattagggagcccagcaggaggtgctgtgctgagaagacttcctggaggtgtttgttgaacatatctgcagagccttcccagactcctgcaaatccaacccatatcaggctgtaagtcagagcaggcaatgcagaagaggagaccagaccaaggggtcagctggggctaggacagtgagggctgctagaggggctgggcctctctttgcacatggacactgggcccctctctatattgagtggtctgttaacattcattggtggctgattccaaaagatgagagccaaagctgcacggactcgagtcctaggctgcacacctcacaagcatctcttctactgcattctgttggtcgaagcaagtcacaacccagcagattcaaggagtaaggaataggatccccctctggatgggaggagcagcaatgtcatattacaaaagggtgtggacacatgcagggattcttactgccgtctttgcaaacaatccaccaaaacttaaaaactaaaagcctgaagcacaagcactctccaccccaggcacacacaccctggaattccctgtgtgaccatggtaccaccactgtgtgtcccgaggatcccagctcagctttgcatcgctgccctatctccctctcgctctcccctgttgatccctcatgcacagccacagcgagctgtctaaaacacaaagctgaccgcgccatttcctactcagcatccttccatgaccctccattgctcctaggatagggtttggaccagtctgaatccagaggatcaggatccagcaggaaccagaggataatttgaggagggtttaaaaaggaaccattttttgaggtgtgtgcactgtttccaccctgaggcctggaaggatgaatggaagcagcagttcctgaaccaggaagactcatgtgtgggggccattgctggtcaaggggcacgaacaggtctggtgaccctgcaagggaggagccaggagcaagcattcccacttcaccttcctccattcagtctgctgccaagttccccactgcctgagcccaactagaagctggagggaaggagggcctgtggctgcagtccaggcatgtaggcctcctgggaaagggagaatggcaaagacaggcagagtggatctggaggggtcaacggaagacggaacatgtccacttccaggcccgagcttctcagcctgccgtttgccactctccagcatctggcccagcctgtccatcctcatctctcttcctcccttactccgtgctcccatcactcggaaccatttgcatttctttgtctcagctatattgtctcacctctgagtttttgcccatgatgttggatgccatggaatgccatatcctccccattatctcccccttgtctggataattcctactcatcctacaatactgattttatctgtgcaaagaagtcttccccagtgcctctggttgacaggggtttcctctggcttctccagactttctgttcctccaccacagcccttagcaccctggggaggaggtgttgctgtccaggtaaatgctgcgccaatgcccctgcctctagtgcactccctccagcctacccacaaacaggacctgcatcctgtctcacaaataaaactgaactcttgaaatggtgaaaaaaaaaaaaaaaaaa

SEQ ID NO: 61108 - DNA, 544 bp, Homo Sapiens
  misc_feature (460)..(460): n is a, c, g, or t
  misc_feature (498)..(498): n is a, c, g, or t
  misc_feature (518)..(518): n is a, c, g, or t
  misc_feature (526)..(526): n is a, c, g, or t
aaagacagggcctcgctctgtcacccaggctggagtgcaatggctccatcccagctcactgcagcctggacctcctggactcaagcgatctattctcttgcctcagcctcacaagtagctggtactacaggcatgtgccatcatgtccggctaattttttttttttttttgtagggaaagggttttgccatgttgaccagactggtctcctgggctcaagcaatcccccctcctcagcttgccaaagtgctgggattacaggtgtgagtcactgcaactagttacttacaatgcttacctgacgaagtccctatccaatttaaacacttcaaaggctatggataattttttttaaaatccccactacaacctcaggaaaaaaactgacaaaagaaatactcaggagtttcacaattaaaggaagcctcaaaacatggggaaaagatatgcaacctcatanggggatcagaaaatgcaaactaaaactggaaccaaatnccatttataacttccaaaangccgaaantcaaaattcagatacctg

SEQ ID NO: 61109 - DNA, 1638 bp, Homo Sapiens
aagaattcggcacgagtgaaaatgtaagattatctgagtaatggacaatttctaatattcattttttaaagtagctaactctgccttattatccccttccacttttcccctggatgggtgatttatataatggaatgcagtgtcattgattgtgtttgaaggaggcacactaaatagcacactattgttatcttgaaaatttgttttattttgtttttgcccattttttaaatcatttcattctatttttgcccatgtctcttgtaatgagctacacatgtaattagtacacagagttctggtgatgtattcattcatgagtttaggaagtgagattttcagcttcatttccttctaagcatctcaactaggagcacaggggagacaaaaaagattgcaacctctttatacagttgtgtttgacccttggcactctattcttacttcaattatcgtccattgtaatgatcccttttcatgtctagcttaaccctaaactgtgagttccttgagaataagaactttgtcacagtgatgttttaatatattctcaccacacaataaaggatctaagtgtgtgctcaataaatgggtatttgttgggaaatttaaacaagaaatagtgaattattttctattcactatttggataccctttctccaaagatattttttatttgagagtatcttatttacagtaaaaatcacaaatattatatatacaatttagttttgacaaatgtctacatttctatcctttacccaggccttcaataagaaaataataataatttttttcccaaagacataatctggttatttggttatttggctgaaacaatgaatatctttgatacatggattctttaataatgaatctgttatttagtatttagtcattacttcataatgattccaaatttcctaataacttcttcccccactatccacccccatcccctgcccctgcaaaaaagacaaaacaaatctccctttccctcaggaagtagttgatttggtgcctgtgtaaggtagttcatgcatttccttcttctgttttgttaccataccgtatgcttggcactcagtacaccaagaaaacaaagaggcattgcctgtctcgaagttgcttagagtctagtgggggagataatgcacacctgcatccatagcacagcaatgtgtacataataacaaagatctgaaaaccccagtcagttttctatgttttgtcctctttcacacccttccgagagttctatctaatgtaactatgaatggtcactgtgtctttatttttggcccagactcttctcaatgcttcagcctcacgtatccaactacctactgattattctgcttggacatacatcagccattttaaatttggcctgagttgaactcattctctttctctcccacattcattgtgttttcatttgttttcttgaaatctcctggttaagtcagttcaggttgctatagaaaaaaattttgggtctggcgtggtgtcttgtgcctgtaatcccagaatgttgggaagcctaggtgggcagattgcttgagcctcaggagttcgagaccagccagggtgattatgaggaaactctgtctctgcaaaaaaaaaaaaaaaaaaaa

SEQ ID NO: 61110 - DNA, 544 bp, Homo Sapiens
  misc_feature (487)..(487): n is a, c, g, or t
  misc_feature (489)..(489): n is a, c, g, or t
  misc_feature (508)..(508): n is a, c, g, or t
  misc_feature (510)..(510): n is a, c, g, or t
  misc_feature (516)..(516): n is a, c, g, or t
  misc_feature (528)..(528): n is a, c, g, or t
  misc_feature (532)..(532): n is a, c, g, or t
gagtgtggaaacaatgggattgagcttttatcttagggaaaacttttacaagaaacagttcactgagagggttccagaaagttattgtagacctggaaactttacaactgttcctcatgtccagcaaaagcaataacatctttcatctttaaagctttaattctttaagcaatctactttaatcacttcaaggcggtgatatcattagatgttacaaaattaaagagctgggctacataatttttggaactctgcaccaaagaagccattcacaatggaaactgtggagtttcggtagatggcactcttttctctgagtgacaactcaaggtccagcatgtgaccgtagatgtagaacaggggctttcctgaggagctgtcctttagcctcaactataatcctggtaaactcacagccaatcattcttgatttttaaaaagaagcctgtagataagacatcaatccaggaatcttgaagtagttaanangcatttaatcacagccttncntctttnccaaaattggtncaanggatttgctttc

SEQ ID NO: 61111 - DNA, 1772 bp, Homo Sapiens
cagttgctaacatatctggttgtttccccattaataatgctaagattgacacctggatttagggggccatcatatttatttaaaattccttcaataattcaagcttattcaagctgcgagacttgcttaaagataagtgaaatatctaatcacaagggaagtctgttttcaaactatataaacaataacaggagtcataacagttgttttcttagaactgaatacctaacaattctgcagctctttcctcggtattttattataagcagattatatcttaattgttcccctttgttttcaaaggtttttctcttctttgcgtgaatcagtttatataaaaacatatatattcttattttcagaggtattctgctctgaagaacggttttactttataaggcatcagttccctctaatattagaaccttacaaagccacagcactttatatgttgcaaagcaccctctccatgaaaattggttctagttgatgcaacagacaaaacccgcaaatcacagtggcttaacactacagagagttatttcttgctcatgctagatttgatgtagctctcctgttggcatcactcttttctgagtagtgactcctggtcatgggctgtttctattatgtagctacactgattgctacacggggcttccatgccatgatgaagtgagaaaagagagcctcaggattcattagggtgttttcaggcttacatccctgacagccataccccaggcatgtgattctacggagaggctggaaaacgtagagtagctcatgatttcagtgagcactccagtctctgccacacctgcctttgtcatgttagcttatactttcctatcatcaaggatgatccatagaaggcaaagggttgaaaaggttgaacttcaccaatgcattatttcttccatttttgtgtttttatttttagaaaatcatgtgtgctctaacattgtagagcagcctttttcccttgacctcttcagcttgaccccttgctcctcctttttatatctgagatagtttatcttggtaattcatatcttgtctgttttcatagtgtattcctttctgcatatatagagaaatatgctgatgtacctatagcgggagttgtcttcataatggctgttcataaagataaagtcatgtttacatgtattcagctttgtctttctagttagtattaaattgtcctcaagctaaactttttgtcttgtttaaagttacatttggctgggcgtggtggctcatgccttggcctccctaaatgctgggattacaggcttgaggcaccatgcctggcctaaagtgtcagtaattctgatttcggttttctcttttagaagttttgatttccacagacttacaaagctaaggaagttttatgtccttgctctggctacactgcagtgttactgaatatcacctgcacaacctttactgcttgcagttttttttttcctgttgctttgtacatgatccgttattcaaatggccttataggcattcaataaaggtgaaatgttaaatacaaaatcacttgtctattaaattttattcaaggttctatataagatctgataaatggaactttgtgatggaaatgttttatatggtagccactagtcacatatagctattgaacctttgaatcatggctagttttagagttttatattttaatttaaattaaatagacgtgtctagtggcaccatattgtacaatgcagttctcattcaataaatcttaagtactt

SEQ ID NO: 61112 - DNA, 1509 bp, Homo Sapiens
tcatgtgctctgacgccctcccattaggtgcatccaagctgcaatgcccacttcctcctggcaggggggacccgcaggcaccttctgctcagaggtgcacttgtctggtggccctgctccttcctggtactgttgacctttctgtgtgtttgttttaaatctcttgcatggtaaatagctgcattttgttactgataagagtgagtttaaatccactgtcatatcttttgcgtctttgttacacattttgttttttaaaaatcttctttcttgtccttttttagattgacagtgtccctcttacctcactttctccactcagtttgtaatcctgcagtctgttgcttttcttttagcgtttgccctaaaggtggctgcatgtgtcctcactgaagtccagcatgggccccaaatgcaggctgaggtctgggtctggctgggctgctgggcgcccgagtcatcatgaccattgttcctgggcacagccggcgttgacttgtatttcctccgtgattaccgcctggctcatcaatcactgttttcgttttccgtggaggcgtggctcacacaaagggcaagcacggagtcactgggtcctgcaggactttccaggtcaaggcagaggaggtgtccggtccccagcaggctcctgtgtgcccctcagtcccctagagggtcacggccacctgaccgccaccactagaggttttggcgattgtgctgtgtggtgggtcttcccggcctctgcttagcacagcagtgctgctgcccatccttcctccttgccaggtagtgccgggtgctgctgcccatccttcctctgccgggcagtgccgggtgctgctgcccatcctttctccttgccgggtagtgccgggtgctgctgcccatcctttctccttgccggacagtgctgggtgccgtgtgggctgcactgtgtgtgtgtttctaggtgatggacattcagattgttttttggtttggggctgctggggatggcgatgctttgaatgttcctgggagtgtctgttggtgggtagagcatgcatttctctttcgtgtgtatataggagtggaatcaaggccgggcactgtggctcatacctgtaatcccagcagtgtgggaggctgaggcaggaggattacctgaggtcagaagtttgcgaccagcctggccaacatggcaaaaccccgtctctactgaaaatataaaaattggccaggcatggccaggcgcagtggctcacccctgtaatcccagcactttgggaggctgaggtgggtggatcacgaggtcaggagatcgagaccatcctggctaacatggtaaaaccccgtctctactaaaaatataaaaaattagccaggcgaggtggcaggcgcctgtagtcccagctactcgggaggttgaggcaggagaatggtgtgaacccaggaggcggagcttgcagtgagttgagattgcaccactgcactccagcctgggcgacagagcaagaactctgtctc

SEQ ID NO: 61113 - DNA, 2367 bp, Homo Sapiens
gaaggggcgggattctgccagccgcggctgccgctggagccggtgtccgggctggtgatggggttaattccctttcgtaagactcttacttgcacccacccagccccgccgtcgccccgccgcgccgcgctccaaccgcctcctcctcctcagtaacgcgggccacggaaaggtatgatatatttgatccaagacagtccattccagtccgggaatctacagtggtgacaaggacatgggactcctcctgccagattacagatggttcactacagttgacatcctggctgacaactgtgaaaaagaaccttggattattttattttatttttgtgggacaccacaatcccaaatccaaaggacgcatcaggcttcaagctccctgtagaattcgaaaataaccttttctaatgaggatgtctgatactgttactgtaaaagatgaaactgcaacaatgaaggatttggaggcagaagtgaaagatacaaccagagttgaaaatcttatcaaatcagaaaactatgggaagattttggtagagaagaatgaacattgtattgagaacaatatagatttgcaggtaaacaggaatttttctctggctacaaatactaaatattcagtatatatttatgtttattttcatacaaaactcacttctcaaaattctaaaagggtaagttgacccttcgtgacatgcttactagctggttttggagccagttggattagcttgctgtgagtcttaacttggcttgtatcatgtaatatacttctttttatttgtatgtggctagtgcatttttattggctttctactttctcattccacccttttcctaattaccagtgctgtgagagttttgaactctcacagttaaattttgagtttaacctaagagctcttaaaggaaagacaaatagaatacaataaaactgcagacgaactattggcaaaaacagccctcagggggttcctcagtcactcaacctgactgacaaaaaagatttgtgggcccgggggaagttaatgcttttaatgctgtgcatatataatgacttagagctagccactgagaaggcttctaattccaggcataaatggaaattgagttgattaacaaattgaagataggtaaaaatggtcccaagtaatagcatttctagtactattcatttctttggtaaggttttccagttatctattttctcagaatgaagggctaacacttttaaacaatttattttattttattttatttttttgagatggagtctctctctgtcgcccaggctggagagcagtggtgtgatctcggctcactgcagcctccctctcctgggttcgagcaattctcctgcctcagcctcccgagtagctgggactacaggcatgcacccccacacccggctaatttttctattttagtagagatggagtttcactgtgttgcctaggctgttctagaactcctgagctccggcgatccgcccacctcggcttcccataatgctgggattacaggcgcaagccatcgcacctggcccacaattttttttttaatatctcatcatttatcagtcaggaaacgaagcaaggcttgggctgagtgaattttctattctacagggtatccaaagaggtcctttgttggcatttaacaggccggtggacttggtctggagcatcccggattgcttctcgcacctgtctggcacctaggtaggcaaggctgcagtgctgggctcaggtagaactagaagcacctatttatggctcctccaacaaggtgggtccaaagtagtcagacttcttatgtggcagctcaggggtcccagagagaatgttccaagaaagccaagcaaagctgcaaggtttcttttgacataggcccagaagttccagaacgttacttcagctatcttcttttgatgacataagtcaataaagccaggccagaggatggggaattagaccctacctctcagtaggaaagaatttgtagccacctttaagctaccacaaaaagttattcaaaaaaaaattgtttaggccgggagcgatggctgtaatcccagcactttgggagaccgaggtgagtggatcacaaggtcaggagatcgagaccatcctgaccaacatggtgaaaccctgtctctagtaaaaatacaaaaaattggccgggcatggttgcgcgcacctatagtcccagctatcctgaggcaggggaatcactcgaacccgggaggcagaggttgcagtgagccaagatcgcaccactgcactccagcctggtgacagagcaagactccatctcaaaaaaaaaaaaaaaaaaaaaaaaaaaaaaaaaaaaaaaaaaaaaaaa

SEQ ID NO: 61114 - DNA, 1120 bp, Homo Sapiens
ggtctgtgcaagaattatcctgactgtaagtgtggattaaaatagctgttaaaaattgtcatcatggctgggcacagtggctcacctgaggtcaggagttcgagaccagcctggccaacatggcgaaaccccatctttactaaaagtacaaaaattagccaggcgtggtgggggctcctataatcccagctactcaggagcctgaggcaggagaatcgcttgaacccaggaggcagaggttgcagtgagacaacatcgtgccactgcactccagcttgggtaacaagagcgagactccgactcaaggaaaaaaaaaaactgtcatttggggtgtaatctaaatagtgaaaacccaattatggcaaataaacatacaatctataaaactgatatctctacatcatgatgaaaactgaagttgaatcttaaaatttaataaaggcatcgatctagtcggaacatgtgggcagaaaaaaataatacccaaatatataaggctgtgttttaacagttggctttaaacgtatacattaatttcaactttctattttatgagaaagaacaatagggaaataaagtacagccagccctctgtgtctatgagttccaccaattgtgggtcaaatacactggggaaaaaatgatgtctgtactgaacatgtgcagacttctttggtcattattccctaaacaccacagcataacaactatttacagagcacttacactgtattaggttttataagtaatctagagatgacttaaagtatacaggaagatgtgtacaggttatacgcaaatactatgccattttatatcagggacttgagcatctgtagattttggtatccatggaaggacctgggaccaacctttcatggatactgaggcaggaatgtatatataattatgtttagaaaaaagtgatggggtaaggaactttgacagttaaagtagaacattctcaatttataaaaagattattgaccgggtgcggtggctcacacctgtaatcccagcactttgggaggtcgaggtgggtggatcacctgaggtcagcagttcaagaccagcctggccaacatggtgaaacctggactgtactaaaaaaaaaaaaaaa

SEQ ID NO: 61115 - DNA, 1385 bp, Homo Sapiens
ggcacgagggcgtcgcgcagtcgggaggtccgggaaagtttctttggaggtccggcccggagcggccatgtcccacggccccaagcagcccggcgcggccgccgcgccggcgggcggcaaggctccgggccagcatgggggcttcgtggtgactgtcaagcaagagcgcggcgagggtccacgcgcgggcgagaaggggtcccacgaggaggagccggtgaagaaacgcggctggcccaagggcaagaagcggaagaagattctgccgaatgggcccaaggcaccggtcacgggctacgtgcgcttcctgaacgagcggcgcgagcagatccgcacgcgccacccggatctgccctttcccgagatcaccaagatgctgggcgccgagtggagcaagctgcagccaacggaaaagcagcggtacctggatgaggccgagagagagaagcagcagtacatgaaggagctgcgggcgtaccagcagtctgaagcctataagatgtgcacggagaagatccaggagaagaagatcaagaaagaagactcgagctctgggctcatgaacactctcctgaatggacacaagggtggggactgcgatggcttctccaccttcgatgttcccatcttcactgaagagttcttggaccaaaacaaagcgcgtgaggcggagcttcggcgcttgcggaagatgaatgtggccttcgaggagcagaacgcggtactgcagaggcacacgcagagcatgagcagcgcgcgcgagcgtctggagcaggagctggcgctggaggagcggaggacgctggcgctgcagcagcagctccaggccgtgcgccaggcgctcaccgccagcttcgcctcactgccggtgccgggcacgggcgaaacgcccacgctgggcactctggacttctacatggcccggcttcacggagccatcgagcgcgaccccgcccagcacgagaagctcatcgtccgcatcaaggaaatcctggcccaggtcgccagcgagcacctgtgaggagtgggcgggcccacgatgcagaggagaagctgtgggcgcggccctgccacaccccaccccgtggacgagaggctgggggtccaccctttggggcctggtcccatcctgcaccttgggggctccagcccccctaaaattaaatttctgcagcatccctttagctttcaatctccccagccccctgaacccggaaaaagcactcgctgcgcgatacacccagaagaacctcacagccgagggtgcccctcctcggaggacagccacgcgctacactggctccttctcactgctggatccggactttttaaataaaaacaagtaaaatttgtgttttaaaaaaaaaaaaaaaaaaaaaaaaaaa

SEQ ID NO: 61116 - DNA, 440 bp, Homo Sapiens
taagcatttccttcctttggcataaggaatcccatccttggaatcagccatttttccaaagagccagggttcctttcagtgcgaatgttgtaagaaaaaccaagatctgagtcctaggtgctactaagtcttagttacattttggtgcactgcgcttaacacaccattactttataaaatacaaacaagagagatagttcaaataaaatctaaactcataattacttgttggtaagacgactcatacgccttaaactctcctcaaatatattttactgccagttgatagaagagcttggattcccacaccaaattcttagttcttaaatgtgctctcttcccacttatcatgctatttgccatcggacaaagtgtacatttaactataggacaaagtgtacatttaactattgcaggatagtaaataacttttcctattg

SEQ ID NO: 61117 - DNA, 390 bp, Homo Sapiens
ttatattcgcggccgggcggcgtgtttttttttttttgctgcatatatagctgtggtacattttaatgtgaaatgatgactgcatcagcttatatccatggagcagattttagcattcagcttgggtctcccagtcaatatctacgagtctcttcttaaggagatcgatgacacagatacatacagactaacaaatgtgataccaataatcaagaattcactcagttaagattttgcccactgatttccacacaagaaacctagaatttactagattcttgtgcctgtgaggctccactcatttccctgaatcacaaaagctacagagtatttagatagaaatatacctactcttaacatgaaccattttaaatatatgtattactgtgt

SEQ ID NO: 61118 - DNA, 515 bp, Homo Sapiens
attttttttttttttttttcagaatgaaattaacaagggtagtaaatatctatgagtacagtaacaaaactatgtatttccatgggcacaatacattttgtaaattctaatttgtattctttgtcttggggttagggaggaatgattaagataaagaaatagatcagtaatctctctacttcactaagatgagggaagggaaaagtgtaatgtacaggtcaaaataatgctgaaatgcagaatgcttttcataaagattgccattagaccttcaaatgtgctgtaggtgctaatagtacttgtctaacaagaaaatattgagtcattgtcttttgaaggttttaaactgttttatgtcccaaacacatccctaccaggcgtagtaagagtagtccattaatgttttcattgattagaggttgaagtaatagaatattgtggaagtgttttattgcattaacttttattttaattcctcttctaaatttgggatcttttaaaggtaataggtaatt

SEQ ID NO: 61119 - DNA, 591 bp, Homo Sapiens
  misc_feature (503)..(503): n is a, c, g, or t
  misc_feature (544)..(544): n is a, c, g, or t
  misc_feature (590)..(591): n is a, c, g, or t
aagacagggtcttgctatgttgcccaggctggcctcagactccttccctcaggggatcctctcatctcagtcttacttgtagctaggattacaggcatgtgccaccaagcctggctaagagtttaaagttctgacaagccacttttgccatcaacatcactattattattgccattattcttaaattagaaatattttaatcctttttactgctattactctgatgatatgccaaaggtcatgctcctcaattctgccttattttcaccttttctctatttggtttttcataatcattattaaaccagcttaacaaagttgttctatttaatccaatatctactggctgaacaactcaaaatttcaggtggcaaagaaactggagattaaccaattgccattgccaaattattgtaacagcatggaaacctggtgtttccagacagtaagggctccagaggttatctgagaagcccggaaatttaaatatgcatttctttganacccttggtaccccaccctactttaatggtaaaagaagtcnttacaccatcttaggaccctgaggggctaaaccttggaaggctaann

SEQ ID NO: 61120 - DNA, 1697 bp, Homo Sapiens
attaatcccaatataaggttataatatttttctttacattctttttttagtaagaaaaatgtagttttgaaccatcatataatactagaactaattaggagaaatttaaatcctctttgctttatataagtatagtatatatttatttagcagaataaatgtttatggttgaaaatggctgggattatagttgtgagccattgtgcctggcctattttcagtatttttgtttaaattttgtaaaaaggtaaaataaatgatttttgaaaatagctggagttgttttcatagagtctgtggttataggactatttaactatatattgagtaaaatctatgctatgtcaagttttattcagttgtccctagtagaatatatttctcttttaattctgtatacagtatgagtaactccagtttaaaacactggtattttaatgagtttaaattgtactgttatatattatgatacatatttttcttctggctgtggtttagtttttaaaatttttgatgtccattttaatttttagaaataaaagcttaaaaatatgggtggaagtagatttcagtttgatgattatcttggcgaaagtatagtacctgtgaaatggtggtaataatttgattctttattctattttgattgtagctccttttgtaaggagcatttgtaaaatttagttgctttagagttatacaaatccttttattaccatttattaactgtttgttgttttaggacctgatcccaaccttgaagaaagtcctaaaagaaaaaatattacatatgaggaattaaggaataagaacagagagtcatatgaagtatctttaacacaaaagactgacccctcagtcaggcctatgcatgaaagagtgccaaaaaaagaaggtatgatagtttagtctgaatcactttactgttgaggattggaaactaaaacattactttaaaacaatactataaaaaattaattaatatgtgatttaactcttcaagcaattaaccaaagtaaaatatttttaaaatagtactttacagttatcagttctttttttttttttgagacggagtcttgctccgtcgccaggctggagtgcagtggcacgatcttggctcactgcagcctctgcctcctggattcaagcagtcctcctgcctcagcctcccgaatagctaggactacaggcccccacgcccagctgattttttgtatttttggtggagatggggtttcatcatgttggccaggatggtctcgatcttttgaccttgtgatccgcctgcctcggtctctgagagtgctgggattacaggcttgagccaccgtgtccggccagttttccatttttaaggtgttccaaaggccattttgtgttagaaaataatgaagtcaaggccgggtgtggtgtctcatgcctgaaatcccagcactttgggagaccgaggtgggtgtatcacttgaggccaggaattggagaccagcatggccaacatggcgataccttgtctctgctgaaaatacaaaaatcagctgggcatggtggtgcatgcctgtagtcctagctactcgggaggctgaggcaggagaactgcatgaacccaggaggcagaggttgcagtgagccgacatcacgccactgcactgcagcctggatgacggagcgaggctctgttcccccctccccccgcc

SEQ ID NO: 61121 - DNA, 540 bp, Homo Sapiens
  misc_feature (47)..(47): n is a, c, g, or t
  misc_feature (65)..(65): n is a, c, g, or t
  misc_feature (98)..(98): n is a, c, g, or t
  misc_feature (182)..(182): n is a, c, g, or t
  misc_feature (197)..(197): n is a, c, g, or t
  misc_feature (313)..(313): n is a, c, g, or t
  misc_feature (322)..(322): n is a, c, g, or t
  misc_feature (364)..(365): n is a, c, g, or t
  misc_feature (423)..(423): n is a, c, g, or t
  misc_feature (489)..(490): n is a, c, g, or t
  misc_feature (493)..(493): n is a, c, g, or t
  misc_feature (497)..(497): n is a, c, g, or t
  misc_feature (520)..(520): n is a, c, g, or t
  misc_feature (532)..(532): n is a, c, g, or t
  misc_feature (539)..(539): n is a, c, g, or t
ctatttatttatcttatttattatccgtctctcccagctaggatgtnagcctcgtgaaagtggangaagggggcttatttctgaatctccaaatctanaatggtacctgccacacaaatatgtgctccataaacaaatgcactttttcttttctgcactccctgggttgcaggctgcatgcnaagcacgtcctcaanggccagggatctgtctcaagcctttttgaaaaccacccctttcctacgtgccccacacccagctctagcagggtgccctcctgcccctgagcctgccctcatcatgcccattgccnaagcctcangactgaatcacatttttggaatcttcccaaggataaccaatnngcatcattattctacagcgatgctcatgtataattatgattattatcctatatgaacnatccattgctgctgtgtaattccaatgggtaattactggcctctgaagattgaactgggcttgganngtntttncccgttttctctgaaactgcccnctggaacacaancaggttng

SEQ ID NO: 61122 - DNA, 566 bp, Homo Sapiens
  misc_feature (75)..(75): n is a, c, g, or t
  misc_feature (82)..(82): n is a, c, g, or t
  misc_feature (101)..(101): n is a, c, g, or t
  misc_feature (168)..(168): n is a, c, g, or t
  misc_feature (208)..(208): n is a, c, g, or t
  misc_feature (225)..(225): n is a, c, g, or t
  misc_feature (253)..(253): n is a, c, g, or t
  misc_feature (323)..(323): n is a, c, g, or t
  misc_feature (327)..(327): n is a, c, g, or t
  misc_feature (404)..(404): n is a, c, g, or t
  misc_feature (472)..(472): n is a, c, g, or t
  misc_feature (474)..(474): n is a, c, g, or t
  misc_feature (502)..(502): n is a, c, g, or t
  misc_feature (507)..(507): n is a, c, g, or t
  misc_feature (511)..(511): n is a, c, g, or t
  misc_feature (521)..(521): n is a, c, g, or t
  misc_feature (530)..(530): n is a, c, g, or t
agagagacagggtctcactttgttgcccaggctattttctggatgtctattaaaaaaaaattagtcctgcacagngttctanaaagggtttttcttttcanaatatccatattctccaagtagcaagttagaatataaggaatatttgccattaaacctttctgttanaaatgtaaacatgaaattgcctaatatagacctatctcanatgctaaatagaattgnttataacacctttggaatataattatgngagctacacttaaccatctggcattttgcttcctgcggacaatttgcaatagcatagaaaaatattttgnttgngtatttcttatcaaacagatatgctaaagttctgtttagagagtaatagcattttattctaacttttaaaataaggnagccatttgcagcagcttgatatataagtaaacaaaaatttttaatattaataaaacactagcacatncnctgaagcatctaagaaattcaaaatttnaaacncttnccagtaatgncctttgagngggaccatttggaataaaggcccttgaaaaattgga

SEQ ID NO: 61123 - DNA, 2916 bp, Homo Sapiens
aaacctgaccccgcccatctctctggccccaccccctcgctcctctctgctcccgcctcctaactttctgtccccgccccctcgcttctccctgcgtccagctccctcgcttctctctggtcccgcctcctcacttctttcctagcctgggccctcacttcttcctggtcccgcctcctcacttctttcctagcatcggccctcacttcttcctggtcccgcccccttgcttctctcctttttttctcctccgccgtttttaccccctccctccttctcctcgcttcccatcctctccgcccacctgccccctcgcttttccctcctggccttgcctctgttcccctggtcccatccctcacttctcaccactttcccatcatctctcttgctttcctgttttccctcccacctgctccctcccctcatcctcctggtctttcccaccacttccaagctattttgctacctccccttccacttgcccccttgcttctcccctcctgcccccacccaccctcttctcactcccccatcctctttcgtttctccctcacccccccacaccgtcctcctcccttcttcccctagccccgcccctcactttcaagccccgccctcattcctgcctagccccgccccctcgctgctgtctggcggggcctccaccctttctttccttcagcctgaaattcctcaatcctatcttgtagctgctcccagtcctgctctcttcacttccccctggtccagccctcttcagtctcagtctgggccacttcctgtctcttaggccagaccgctagctacttttaactctgcttcttcaatttttaccttttctgcattttgtttcaccatcacccccacactcagcaacccagagcgccgtgaggctctgatccctactcccacactcactggaggctttggaagctgcccacacgcaggctccttgattcattttgtcttcaatgaaaagtccgtgtttcctgggtggctctgtagtgccaccttcaagggtgagcgcaacgctctgccgcgggcctgcgacttggtggcgcggatgtgatgccaacctgtttccccccgggctccagaggttctggaccaggctgcatcctcgtcttccctttctcactctcattggtactactctctttccagtttcaattcatccctaaagcaggatggccgtgttgcaaatgcggctctgctccgggactttccaaactcgaatatttccagctctggaaggaaactaaaaagttcattctaatccccgtcagggattttcccctggatttttctgttcagtggctcagtcgggtgagaactccaaagtcctggtttggtcaggtcctttcaaagagagaatgagcgttttgaacactttatggcagatgcgcagccataaagtcatcggtaaaatccatgcaaacaataggtaatttttttaaactaaaatttactttgagagcccatagttgttgcatggcccaacttttgtcttaagagaaggttttgtttttttgtataaagatatcaaataatgatttggacccaaacccagaccctggttttgtaacgtaggaggtagtttcctctgggatctttgcttctggggaaatacatttctttatgccagggctgataggaaacgcttctcactttgtagatacaatgtagatacatttttatttatgtggtaagataaaagtaacatttttgagattgtaatacttgtaaagcttttaacttggttctgatttacagctcagtctgtaattgacatcagattggtttcagttatcttgttaaaagcgaaagcaactgattttgtgttagaaatatgatgaatgttttagaaggaataggttttaattgaaatgtttatgtctggtgtatgtatattaatcaatcctatttgccaagcctgagccttgaaagggaggacttggtttctcctcctaccaaattatttttggatttaggaatttagattatcgaagcaagaatgctttgaggaatttttggatgacatttgatagggaaggatcaggtgatgagtgttgtttctgaaacaccttttccctttccctttccctttcagtagatgttatgaatggtttgagaggatttgtgagtgtgatcatccttacaataggattgcggtttagcggtaatggtacacatgcaatgccagtacgtggaaccttagtttacctcgaaaggtttgaactagaagtttgttgacggtggaataggttttagtctcatctttctggttaagggaagtttgaattctcacttctgggatgttgagaagcaatctttcaaaatttgaatacttttgttacaggtttcagagtttatttccatgtttgttatttggaaaaaaaaaaaaagactgttaaaaatgagggatatttcaaccagtcaatgaatagacacagagcgaaattcagtgcaaagatagtgaagatggcctggcgccgtggctcacgcctgaatcccagcactttgggaggctgaggcagatcacgaggtcaggaggttgagaccatcctggctaacacggtgaaaccccgtctctactagaaatacaaaaaattagctgggcgcggtggctcacacctgtaatctcagcactttgggaggctgaggtggggcggatcacgaggtcaggagattgagaccatcctgactaacacagtgaaacctcgtctctagtagaaatacaaaaaattagctgggtgtggtggcgggcgcctgtagtcccagctactgggtaggctgaggcaggagaatggcttgaacctgggaggtggagcttgcagtgaaccgagattgtgccactgcacttcagcctgggcaacagagtgagactctgtcttaaaaaaaaaaaaaaaaaaa

SEQ ID NO: 61124 - DNA, 1801 bp, Homo Sapiens
gtaaatatctaaaacttacatagctcttcacagaacatacatctgttcttgcttctgtgtttgattttattagctttcctctgtacacataagcttttagtgtatgtcctattattgaagtccagagttttattatttttcacttatttgggcatagatagttccagaatttacttgtcttcctcattctcattgttaatctcatttttcttccctggagaatatggactttcaaaactatttttcaatcaaggccaaaatatttcttaaaattcacttctatttaaaacacagataacatccaggagaaaatctgagaagaaaaaaaaaaacgattttgatggtacctgattataaaagactcacagtactaagttattctttggcacgtgtagcaaaatactatgtaggtgtcatttcgagttcatagtaaggggagaaatggtgtcatttttcctgcagagaaatttaatctttcactttaatctttcattggcctatagcagccagtggggtcttttaaaaaattcttttccttcatattccccgtttgagcttaaggtacaaaaaaagaaaatactcttgaaatgctgtgaccagatctagactgtaacatgccccttcgctcctctggtgaggaagtgcgggaaggtggaagacattgaggggttgattatttacttcgtttggaagtaagaagggaggtagctcttatttggaataagagctgtcttcagaacaggtgtgtgctctcctgaagcccagagctgtgactccctgggtgtgtctcttacctgtgcccttgggcaggtggcacgggagaagaatacgataagaggaggatggtacagacagaggagtcacaggctgaacaggctgtcaccggggcaagatgactgacaggtggatggaattcaccatcctttcctttcaatcaaaaaaaaggtagaaagttgctcataagtaagtttgagttatatcatcttcttcatagccgttgctcttcagacacaggtgctggtaatcaggaaaatgcaaggaaacagctctggggaaaaggaacaagcctcgttggccttgagagccccagtagaccatcaggccttgctttggatattgggaggtgacagtgccttctcacgtgcctgacagtttccctgcaccaccaagactctgtgtgactgaggccgtggcccgggtttcaggatgggcattcagaggaaggaagttccccctccttcacttacctcacgcttactagatgctgggttgcctatgcccatgttaaaggaagccagataactttctgtccccatgtgatccaggcccatcctgaagcctgggggttctgaacataagtatggcggttgcagccttccttctgtgacttctggaattcctgacagagagggtcatatctagccactgtcaaccggatgctagacttgttttgttaggcccttcctccttcccttcctctacttatcttccaataaccttaggatttggaggaaattaaaataaaccttcttctagaaaggtgtcagggacccatgcacaaatgtagcctttttgatgcttgagaaagaatgcctttttgacttccgtgaataaagaataagtcacggctaatgagtaagtaacagcatgtgcctgtggtcccagttattcaggaggctgaggcaggaggattgcttgatcccatgagttcaaggctgcagtgagccatgattgtgccactgcactccagcctgaacaacagagcaagaccccatctcttaaaaaaaaaaaaaaaaaaaaa

SEQ ID NO: 61125 - DNA, 899 bp, Homo Sapiens
gttcacgctgacgtcccaaatcttggaagttttgtccccatttgctttctgcttctggggacaaaacttccaagatttgggacgtcagcgtgaactccgtggtcagcacatttcccatgggctccacggttctggaccagcagctgggctgcttatggcagaaggaccacctgctcagtgtctccctgtccgggtacatcaactatctggacagaaacaaccccagcaagcccctgcacgtcatcaagggtcacagtaaatcgatccagtgtctgggaagctgaggatctgggataccacgcagaaggagcacctgttgaagtatgagtaccagcctttcgctgggaagatcaaagacattgcttggactgaagacagtaagaggatcgcccgtggtcggggaaggaagggagaagtttggagcagtcttcctctgggatagtggctcttctgtgggcgagattacaggacacaacaaagtcatcaacagcgtggcatcaagcagagccgccataccgctggcacgggaagcgatgataactgcgcgcattctttgagggacccccattcaagttcaagttcacagttggcgccacagccgtttgtcaactgtgtgcgattctctcaagagcaaaggttaatttaaggacaaagatgaagtcctgtaaactaatctgtcattgttttaccttcctttctttttcagtgcggaattaaaagtaagtttaaagcacctgattgggagtgttttgcgtgttcggaatcacttgtaatgttggctgagacaatccttccttgcactttgaaacactttgagcctttaagagatagcctgagaataataaattcttttcttttaaaaaaaaaaaaaatttaaaaaaaaaaaaaaaaaaaaaaaa

SEQ ID NO: 61126 - DNA, 1156 bp, Homo Sapiens
agacaaaaagtaaccttcctgaagaggacatgtgattggaagttgtcaattgttgaagcattggtaactccagtctctaacgttttagaaaatcataacaagcggttctgtaccctgtaaagaacagaaacctggaaatctaaggctcaaagacatccaagtaattggtatctgggagatttgggattcaaacccagctctgcttgacttggtgaactactgagttcttcattatgtctgatggagattatgattacctcatcaagtttttagctttgggagactctggtgtagggaagaccagtgtactttaccaatatacagatggtaaatttaactccaaatttatcacaacagtgggcattgatttcaggccaaaaagagtggtgtacagagccagtgggccggatggaccagtaggtagaggccagagaatccacctgcagttatgggacacagcagggcaggagaggtttcgtagcttaacgacagcgttcttcagagatgctatgggttttcttctactttttgatctgacaaatgagcaaagtttcctcaatgtcagaaactggataagccagctacagatgcatgcatattgtgaaaacccagatatagtgctgtgtggaaacaagagtgatctggaggaccagagagtagtgaaagagaaatatggaatcccctactttgaaactagtgctgccaatgggacaaacataagccaagcaattgagatgcttctggacctgataatgaagcgaatggaacggtgtgtggacaagtcctggattcctgaaggagtggtgcgatcaaatggtcatgcctctacggatcagttaagtgaagaaaaggagaaaggggcatgtggctgttgagaagtcaagtaagcgacatagtagttcaggtggcccatgcctgggatcttctctatgattgatacatggcacagtgagagattaatgggcattgtgtacaaattgcttctcaccatccccattagacctacgaataaagcatccggttctaaaattaatttgttgcagctttgtaaatatttctttaagattcagcctgagagttaggagaaatatttcagagccaaaagtgccttatacaaccttagcctattatagtaaatcattcaagggattcagaa

SEQ ID NO: 61127 - DNA, 1005 bp, Homo Sapiens
ggcacgagggtccagcccggctgccaggcagcattgcagttccccaagccacgcttctggcagagagccgggggccaagcccagcactgcagagcccagctcgagcccccaggaccctcccaagcctgttgctgcgcacagtgaaagcagcagccacaaagggcaaagagcctgccaccgacggaggcagacaagcccaatggcatgaaacggtccccctcagccactgggcagagttctttccgatccacggccctcccggaaaagtctctgagctgctcctccagcttccctgaaaccagggccggagttagagaggcctctgcagccagcagcgacacctcttctgccaaggccgccgggggcatgctggagcttccagcccccagcaacagggaccataggaaggctcagcctgccggggagggccgaacccacatgacaaagagtgactccctgccctccttccgggtctccaccctgcctctggagtcacaccaccccgacccaaacaccatgggcggggccagccaccgggacagggctctctcggtgactgccaccgtaggggaaaccaaagggaaggaccctgccccagcccagcctcccccagctaggaaacagaacgtgggcagagacgtgaccaagccatccccagccccaaacactgaccgccccatctctctttctaatgagaaggactttgtggtacggcggaggcgggggaaagagagtttgcgtagcagccctcacaaaaaggccttgtaacggggagggcccaggggcaggactgtggagacccgtcctgaacgggcgactgtgtcttgactacctttcaaaaccagcactgtgtgggaatgtccgccaggcagagctcggagcctcattgagacaggggagagagaaagacaaagaggggaccttcttccagatgccttcccagttgtaaccggtaaaactgttaccagatagtgtttgtacaaaaaaaaaaaaaaaaaaaaaaaa

SEQ ID NO: 61128 - DNA, 519 bp, Homo Sapiens
  misc_feature (508)..(508): n is a, c, g, or t
  misc_feature (517)..(517): n is a, c, g, or t
gagacagagtctcactctgtcacccaggctggagtgtagtggtgtgatctcagctcactgcaacctccgcctcccgggttcaagtgagtctcctgcctcagcctcctgagtagctggggttacaggtgcccaccaccatgcccggctaactttgatcagcctttgatgtgtcttgggactgaggaagacagaaggagtcaaagattagggtaatattttgagcccaaattactgaggaataatacttttcttcgtaacaacggggaaattaacaaaggaagctatgttttaggttacagtgggatatttaaatgtaaattatggagggagataactgaactaaatttaggaaagagaacacaactataaattcagacttgcaagtcagccttatggaagtgaagtagaacaactgagttatgaggagaatgtataaatgcaggaagggactctattgactaataaatggggttcataatctgcacataaatgatgagacttaaaaggnaatctgctntg

SEQ ID NO: 61129 - DNA, 431 bp, Homo Sapiens
tgcaaacctaagtttgggatgcagaactacagagacaagaactcagcaagcacccccacttcctccaaagagtagtcaagtcccacagcacagcccggagcagtagctgttaaaagacaagggctgggctggatccggccaacattacaaggacaaccaactggtctcattccttagtcttgtgcttttaaagggcagacgatgtgccaactattttaaagctccaacacactaattctgtaaacaataatagctacagcctgcacactgcgcactggaatggattcctcaacttggcctcatcacttatgcagctgatgaaacaaacactgacagcttttttgcatttgtaaaggccccacagcagctgtggtgatcccaccatagagcaatgaattaagcctgaaacccagctgggtctgaacagaagc

SEQ ID NO: 61130 - DNA, 181179 bp, Homo Sapiens
gaattctatgctgatcccttcattgtgacatggcctgtcatctactcttctgggaagaccatctgcacctcactgatacttgaagctcattgagtattgtcacatatcagcccagaaagtcacagggtacagcaactcatacttgctcccagcaccaggccagccccattctgcctccagggagtcacccaaaatagagagatgagggtaaaataagacctaggaatactatttatttgcctccatggcctttgaacttgcacatccaacgtaacggctcctgtgtgttcttgattgttccaattatcatttttcctctcgaatacctgagagcattcattattttgcaagagatttgagaatccctgtgccctaacttttctttccttgatgtgggatgttcttctgtgactaggtaagtttatctcaatgtgtccccaaataatttctcagaatgttaaattcataaaagctaccatgaaaggataaataaatgaaaggagttctgaggtcaaaacatttggggaaagaagagtctttctccttctgaggcattctcagtgcacagtaacctgtttatctcgctttgccttgctctttcccaagcacatttttgctcaacgccccctaccttccccatacacttgttaacactttgcagagcactagggctctgtgggacaggctgggaaatgcaggttgacatgccactgttaatacctagaaaattaaggcaaacttgtccctgagagatgtcaggatagcacagtatggaaaggccatgcttatcagggctcttatctgagagaatacagtggttatgagcatgactctggaactagacagtctgggttgaattccccgctctgccatttagttatatgatatggggtgtattacctaacatctctgtatctcatttgttcctcacttgtgacatggggatgatgacaatgataatagtaccaacctataggatagctatgagaattaaacaaattagtaaatatgaagtatttggaacattggcctgactcaggataagtcctgtttaaatgttagtatcattattattgtttcttcaagccaggaatatacttcatcaattatgtgtacactcattccttcattcaacaaacacttacttaatactcctgtgtcctaggcactgttctagtgctggagatacatcagtgaatcaaaaacatgagagaaaaatccctgtccttgtggaacttacactgtagtggaatctactactaataatgcaaatagaaagaaaaatatatgcaagttacccaggcactgggtagcctagtacctgtcctatagttgtcaaatggatggatatattattcttattgttgttgtcgtttacagtaattgagcttggaggtttgagctgccatcttagataagaacagaaagctaagccaatacgagtgccatgccagtaagaaaaggaaactattacataaagattaggaagaaaaaagagaagaatgacaagtaggccattatctatggccatgagttttatttaaaatgagctggaccttttttgccttctttatctgtgtatcagatagacaattacctctaggcagatttccacattccaagacatgaagactttctaagctgcagcagacacatctttacttgtagcaaaacagagagcgatgggggttattttcagatgactgtagctgaagaggaagaatcaagtaattcactccccccaataataattcacttctgagaggaaaaacttctttggaaaaagcaccccatgaatggaagtctcagcatttgctgaagaacttagttaaaataaactctagacctttttcattgattctttatctcttcttttccagaaaccttctctatgtctacccacagaggctgaactttgtaaacaaactagcatcagcccggaacattacaataaagatccagtttatgtgtggagaagatgctagcaatgcgatgccggtaaggagggaaacgaacatttgcctcaaatcagggtgggctgctcacccctgtcacttcacacaagtccgggactcatcagtgtacaaagtccgtctattccaggccaatactgctcagcatgtgcaagggcttctgtgcccaggatatcagtggggaaacagggtcagtcttacttgacgatctctttctcggcttattctgtagtgagcttggaacatacagatcattttagaggattaaaaaaagtcataaagtctttccatactgcccataggaccaccccactctaaaggcatacaaagtaaagagatggctcaacacgtgcgccatgtttgctgagtgtcttccatgcacaaactgtacacactgtgttatacacacacagtgttacacacttactcaagcctcggaccacagtgctgatgaatacaaagtaccgcctagtaattataaacacacaccacctccacaccttctaggagtggatctttgttctgaggcaaaatataaatcaaattattcatatatatatatatatataaaatgcagtgtgctccaaggaactcaaaatgccagaatttatactttttaaaccatctcctactaaatgagatggtggttagctattactatttcccataagtcatagaattcagttaatataactttctttctttttttcttttttttttttttttttgagacagagtttcactctttttgcccaggctggagtacaatggccgcaacctccacctcccaagttcaagtgattctcctgcctcagccttccaagtagctgggattacaggcgcgtgccaccacgcccagctaattttgtatttttagtagagatggggtttcaccatgttggccagggtggtctcaaactcctgacctcagctgatccacccgccttggcctcctaaagtgctgggactaaaggcgtgagccactgcacgcagttaatatacctttctaaaaagaaaaagaaaaaaatcctttctcttaatgtcccacccaaagaaaaaaagaaaaaaaaaaacctttctcctaacgtcccacctgtcttcccaatgcaaggtgtcttaagacagcggtggggtcctcttagtcctctctgctcaggcccctggcatgccactgccaggagtgccagatatgcttgtgcagatcctgtggcaaccaagatgcccagccaagagtgactgtgggctaaagtccagtctgttcttcattcactgagccatgggttctggtgttgggattactgcatctagaggaaagagctttttttctctgcacaaaggtgagtgcacttgttcataatgcatcctaaatgctgcttcaggcccaaggaggtatctttttctaaatggcacaaatgtggataaggcagtggagattcaaatcacctaagtgagtaggtctgtatgtttgagagagaagaacctggaactggggatttctcactcaagacaaaagtatgtaactttggcctgttggatagacctctaggcagtgaggcagagtggagagagtactggttttctaatctcacaaacatgtggcctttggtcactaatatagccccttggaacctcatttcacccttcatagccagttcctttgcactggtgtgcttgggccagttgtagtcccagcacttttttttttctttttgagacaggatctcactcttgcccaggctggggtgcaatggtgcaatctcgactcactgcaacctctgcttcctaggctcaagcgatcctcttgcctccgccccctgagtagcagggactatacgcatgtgccaccacgcctggctaatttttgtatttttttgtagagatgaggtttcgccatgttgcccaggctggtctccaactcctgggctcaagccattctcccacgccgacctcccagagtgctgagattacaggtgtgagccactgctcctggccaacccagcactcttaattgtacaaaatgcagctctatgagaccagaacatcctgttggcctgatgatagtcaatttgatgtacccaaatgttactgataatttgatcctttctctactggtgaacaggtcatctttggaaaatccagcgggcctgaatttctgcaggaagtgtacacagctgttacataccataataagtaagtctatttcagcattctaaatatatgccaagatggtttcatcatctcctggtttttccaagtcccgtgggtggttcctcctaactatttttataattcagggactgaggggcaaaggaaatccatgccagttccgtgactctgtgttgaagatgtataactttgccattaaccaagactgagagaagaacgtgtcttcaagaatccaatatagttttgacttttccagaagcttctattctagtatgatgcaaagaggttgtattacgttaattaaggaaacacatttcctaacttgctttgagaccctggaggggaccagaagcacagtccggctccccttgccctgtgtgtccctgtccgctccacttgacacctgccccactgtctgcctaggctgaccaaaggagaaatggaacactcattattccaccggcaaatggagtcatgggataatgcccaccctattattcatgttccacagggaagggagagacacctgcacagtgttggacggaattgggtttgatccgggcctgataacctgggcctaattaagtccttcatttaagcacattctgggattgggatgaggattaagtgaggtaatgtacattacatacctacattactttacaatgtacgtaatgtacttcgtaattaatgaagaacctagggcttcataatgcagttaaattggttcctttttcctcctgcctcattcatttgcttctactctttgatgagtgcagctaggtgctaggcttggttccttgggtagaaatggaaaaaggaggtcacagcaggagtccaaacctcatcctttcttcaaattaagttgttggagttttccattgtgtgggggagttgttttttgttttttgttttttgttttttgtttttcctgacaaagcctttagttcatgaacagttttatgtaagggaagtgcatctaataacataagcttggtctcagggacttccagcttcagagcagagtaatgtaaaatgaaaagcaaaacaccaggcaaattctgaggagcaaaggggctgtggcgttttacaatcagagaagtcatcattcttgctaaaagttatttgtgtataatgtgcttttgaaacaggtctcctgacttttatgaagaagtgaaaattaagctccccgctaagctcacagtaaatcaccacctcctgttcaccttctaccatatcagctgtcagcagaagcaaggagcctccgtggaaactctcctgggatattcagtgagttgtttccagcctgctgactcacactgcagttgttggtgcatctgaggtccctgcagagataaacaaccaaattctattcacttgattttttccagtcagaagtagcaaaacatgctaagccacattatagcaagaggcagaaatgatttgccttagcaaatgtcaaatttcaggaatggaaagctagcgggtgatagatgttggaagaatactcatctgttttttaaaaagcattgcagtgttcactatttccaaatttaatatccatgcttcacgtatagaactagctttgtcccccaagaagaaaccattttttctttaaaagatataaaaggtgaaataaacattgatgttgttcagacacacacaaacattggctacagagaaaaatgctactgctttagctccaaaagcaataaatcatcaatattaccatttcaggaggtctcggagatttaaaatgcaaagaactggacagaaattactgccaaaaagagtactggtcaatatctactcactgtttagttgcatttgattattgcgagctagataaattatcagaattatatgctgtaataaataccactttattatttacatcatctgtttcagtggctgccaattctcttaaatgaacgtcttcaaactggatcctactgtctcccagttgccttggaaaaattgccacccaactactccatgcattctgctgaggtaattggcaagctggccatcagctgtttcttgtccagctgtagtcttggaccaccttcccagactcactttccattcccatgtggccatggatgttcatcatgttctcagagagcacattgttctgataggatgggaggaataactgactgtgaaacctcattcttttaaatgccaccaaatcagaatgttcagtagacgcaacctacacccaaggcagcataaccttgcattatctaccacagagggattcccagaataatgtattatagaagaggaggcaaactaaggccattcatagtaaacaactgttcccatcaaggatccttataaaagattcccaggccagattcatccgtttctttcttgggtcagttgtcacagccctccggtagataccaaggtatttattctcctaccaatcccaatgccaatagcctttcccacttcctgtttctggcactttctcttgctcatccactctgctgcagtgcacccatttaaagagaagcccaggtggatcaactgaggtcaggatttcaagaccagcctggccaaggtggcaaaaccccatctctactaaaaatacaaaaattagctgggcctgctgttgggtgcctgtaatcccagcactttgggaggccgaggcaggcagatcacttgaggtgagaagttcaagaccagcctggccaacatggtgaaactccatctctactaaaaatacaaaaaaattagccgggcgtggtggcgggtgcctgtaatcccagctactcgggaggctgaggcaggagaatcgctttaacctgggaagtggaggttgcagtgagctgagatcacaccactgcactgcagcctgggtgacagagtgagactccatctcaaaataaataaataaaaaataaataaagggagcccaggggactgtccaccctgactgcaccagctgtcacactgctagcccacttctcagttccttgcataggtttacatcaataagtattattttgaagtaaatctcggacatcatatttcattttagtctgcatcttaaaagataagggatttgtttttaaccatcacaataccattgtcatactttaaaattttaactgtaatttcttagtatcatcaaatattcagtcactgatcaaatttttaattatcccactaatgctatatttttgacgcttgctttttaaaattggtattcagataaggtccacacactgatattgattgttacatctctggagacgcttttaatctacagatcctccatctcttttgctttccttgcaattttaagttgaagaatttctcagaaatttgaatttaatttcaaccgttccagtcaactttcttctctgttctttcgccatctaccgtctcacttccggctgttttcctcttattttcttttttccttaaagagagaaccaacttttgccctggaccacaggcatgtgtctggtaaaccaaaacttctctcatcaaagccatctaaggggcaatccgagtatgtccacagacatttccctgattggtctttatgatttggacatcaacacctttcagtatccctcaaaaccaccttcttatcatcaagttgcacactctaatttcttagaaccccctattatctttttaagctataggaaagacctgagtgttggagagagacaaatctgtgtccaaagtctagattctgccactccctagctgtgtgaatgttggtgagttgcttaccctctctgagtctcgaagatgaaactgagcccatatctgcatatctgcctataaggttgctgtaagcattaaatgagataatgcttgccaaacaacaaactcaattcctaagtaaacattaattcctttttcttacttgcgctatgctgtgtttatagatatacccttagcctctcttagtatcctttaaacctgcactgtctgataagatagccactagctgtatgtggctattgaggaaaatatggctagttcaaactgagatatgtgctataagtaaaatatgcaacagatttcaaaaacttcatggggaaaaatgtgaaatattgtattaataattttttacattgattacatattgaaacagtctttaggctgtattgagttaaatgaaatattactttcacatggtccttttgtgtttttttttttttttttttttttttagagacagggtcttgctctgtcactcaggctggagtgcagtggcgtgatcacagctcactgtaatcttgaactcataggctcaagcagtcgtctcacctcggcctccttagtagctgggactataggcatgcaccaccacgcccagctaattttttttttttttttcattagaaacagtgtcttgctatgctgctcaggctggtctcaaactcctggcctcatgtgatcctcccactttggactcccaaagtcctgggattataggtgtgagccaccatgcccggcccctttttacttttttaatgtggccactagatgattttaaattacatatatagctcacgttatatttccactggacagtgctattttagatcacagatggcaaactcaagtgcccacaggatccagatgagtaacataaatgaatgccttgttctggtggcatctgttcactctggagattgtctcttccccatctgaaggtcacagctgttctcttcactctgcagattggtgacatgctgggatataaggccaattttttcatttcttccagtactcaaatgaagttagaaaagcagtcttttataggaaattttcaggctttcaaatattggtaattaattttttaaagttcctaatacttcaaacagaacgtgtgtgtaggctagagcccactttgggccccagcttttgactgcttcagatagctttaaaggtctccatcccctgtacacatctacctttcattatgatgaaagacatacaaacctaggcgaggccctcactcaacactgcaggacatctctaaaggaatgcaatttcaatgggaatttaaggcaagaaactgtctgtaagacctacgaaggtaatgatatataaacgtataaaagagtcactttgagtaattaaagcaggagccgacctggcctagaaacatgtgggaaacacttggaaaaactgtggtgaaagggaaagtaatatcgggtactcaaaagtattaaaatttcatgtcttgtaaagatattctatactttgtcctgacaattctgattaatggggaaattgctgggatcttaatttattttaattcctagaatccagaatcatcaatgctggtttggaacttagagacagattacaccgttcagccctcttctcacagcatgagaacagaacactaaggcccagaaagtttagttgagtcgtctaagtaaaaataactagtttgaagcggggcacagtggctcacacctgtaatcccaacattttgggaggctgaagtgggcagatcacttgagcccagaagtttgagaccagcttgggcaacatggtgaaaccacatttctacaaaaaatagaaaaattagttgggtgtggtggtgtgtgcctgtagtccccgctactccagagactgagacgggaggatcatttgagcccaggaggtcgaggctgcagtgaaccgtgattgcaccactgcacttcagcctggcgacagagtgggaccctgtctcaaaaggaatgaataaatacataaatattaactagtttggtgtagaattgaagttgaatccagggctcctgactccaagaacagttagattagttttcaagagagttctgtatttgtataaccctgacatttccagtcaagttggtctgcattgcttgttagtaatcagaaaagggaattggattgctaatcttttttttttctctttaacacagaaagtcccattacagaatcctcccattaagtgggctgaaggacataagggagtatttaatattgaagtgcaagctgtttcttctgtacacacccaggtaaggaatgtcaaggttaatcatgaaggtaaaggtgcagcggaggagcctttgaaggacaggccaataaaagatcagtgaaaatccttgtctacagataaataaaaaataaccctttagttctttgtggggacatgcaaacctctttaggtttcatttgtcattggaatagaaagaccttacaaaaccgccgagcacctaaaggaaagaacctagtatctgcactgttggtggagaaactttgcagggggacttgatttgaaactctcatctgctgttacttcttttccctctgtaactctgccactttgccagcttttaaaaagaaattccgtactctctcctttacctgccactgtctgagttctgcatctgctgagacctctctcttggcagtatgcttacctggtacgctgacctctgcttacagaacatgtcagagccaaaattatttcttctttagctaataattattgaaacgttcaacttcatgcaccacattctacaaagaagttcatagcctcggtctgaaacatcatgtcttagaccttctggtctgaaacgctggataagaggttctacccataaagagctattcgattgtgtttgtgaatccactggtgaacattgatggtataaaaccccatgaggcctgccttctcccttcgcaggacaaccacctggagaagttcttcaccctctgccactccctggagagccaggtgaccttccccatccgcgtgctggatcagaaaatcagcgagatggcgctggagcatgagctgaagctcagcatcatctgcctgaactcctcccgcctggagccgctcgtgctcttcctgcacctggtgctggacaagctcttccagctgtccgtgcagcccatggtcatcgctggccagacaggtatgaacctgcagggctgggctgggaggaggcaggagcaagcaagcattgccttctttaatgaaaaatgactttccagaaatccagagacaatgtgatcttcctttccactgatgatgtgtgctcaagggaggccaagtcttatgctattttttttttgagactctctgcatgttggaaagaaaaagaaacattaaaatagggttcttaatattatagctttttgtaaactttattaaatgattataggcagtctttaaaattccatttctggtaattgatgaatttattttaccttgaagatatttttgttttcttgactaacaggaaatggaacattttaaggtaagacaacctgtgttaaatggagggaaggaactctctacattgaaatgcaatgcaatcaatttttaaagttaaaacataaactcactattttaaagtgtatagttcattggtttttagtatagtcacaaggttgtgcaatgatcgctacaatctagttttataacattttcatcacctccaaataaaaccccatcactccctattcatccctccccctagaactcatccgttctctcttacagtctattttaaatgcttacttttaacaagttaacactaaatacaatgtgtacattttcccttagaaataatctcaaaagcttatcctggaggcatgaccagagtccagtggttctcctaactcttccagggtagactggctggtatagggcatctttatttgccaccattttcagctgtgcctatatagctctttgctttccagtccagcagacgtcttttgggtaccatccatatgcccagtactgtactaaaagttgtaggctttgtgacaataaccaagagcatctcagacctcagaggacttataatatggcaaagagtcagcagcacaggacaagactcctcaaagggacacagctaaattttgcagtggttgtggggagggtggtatcaaaggagagagtgagaaaacatccatctgggaggatgcaggaggtccacataaagagatggccttgaagaagggatagagtgaaaaccgacagaataggggcaatgagatgagtgcagcactgcagagaaccagaaaagtgtgggagtgtcaggaagaaagtcagtagcacagttggtggtggaacagaagcacgtgtggaagtgggctgggacaatgaagtgagacggcttttagagccagggaggggcatgtccccttaatctctcactctgctttgcaccctgatatgcatcttctgtggttccacagatcaaacgtcctgtgttggaggctaacttttcatccatgtagcagttgcctctccagctagattcttgcagagctctgccctccttcgattactttctgtgcccccgcatatgtggcacactgctttgtatgttccagctagttaatacagacttgttcaccagacaaaaatatttatatgttttgagcagcttctccatagcaagttgccaccttgtggtgtgaggaccacagggtgttggcataggcagaataagtggaggtggctagtctacaagcatttattcagaacctattctgtgtctctgcaatggaaagcacagtgggggcacaaaagatgtgagaaatgcacttcgcatgggaaggattccagctttcacagacagacagtttaccaccagacatggctggagaatcatgtaactcagtttcacttgagccctgtactgtgtggagtcagacggcttcatggaggaggtgggacttgtgctgagattcacagggtcggtatgattttgtggatgggagtgaggagggcttcctaggcgaggacaacagcatgagcaaagtctcagaggtaagagagcaggcatgatgggacaatacaatgactgcctcattttaagggatgtcgaactgagccaaaaagggtacaaggttagataagtatattggagccaaactatagaggcttagggcaccagaacaagaggttctatgcagtaaatcaaatgtgtatgggcccactgtgggaatgacttgatatgcagacatttttaggttaatctgtacaagaatcagggttgtgcagcacatctcaaatcatagtgtccacaacagtcacgtgagcatcttgtaaagatgcagaacctgattaatacactctctggggtggggcctgagattctgcatttcttagtagcaagcaggtgatagtggtcgtgtgtgtccgcagcccccactgagtagcatcagtttacaacctggcttagagaaggaggacgtctggacagtcttatgtctttgtcattaaaaaccatcaatgctattcagtggcaggaggaggaagttcaaaagagggaatgtggaggcatctgtggtactcagagccagcatgccagagctcaccaaaaccatctacccttcccaggcctagttaaattggtcagcggtcaggactcattgtcactgtcctggagaaacttccacctcaggctccttaaggaccagctgtgggactacccatttttctcttggttcctcagccaacttctcccagtttgccttcgagtccgtggtggccatcgccaacagtctgcacaacagcaaggacctgagcaaggaccagcatgggaggaactgcctgctggcttcctacgtgcactacgtcttccgcctgccagaggtgcaaagggatgtgcccaagtcaggtagagttgccctgagtgtgggactctggtgggcggggcaacaccacctccaccccactgcagtgtaatccaaaataaaacatcctatgctgggtgcaggggctcacatctgcaaccccagcactctaggaggctgagatggcaggatcgcttggagcagtggctcacatctgcaaccccagcactctaggaggctgagatggcaggatcgcttggagcagtggctcacatctgcaaccccagcactctaggaggctgagatggcaggatcgcttggagcagtggctcacatctgcaaccccagcactctaggaggctgagatggcaggatcgcttggagcagtggctcacatctgcaaccccagcactctaggaggctgagatggcaggatcgcttggagcagtggctcacatctgcaaccccagcactctaggaggctgagatggcaggatcgcttggagcagtggctcacatctgcaaccccagcactctaggaggctgagatggcaggatcgcttggagcagtggctcacatctgcaaccccagcactctaggaggctgagatggcaggatcacttggagcagtggctcacatctgcaaccccagcactctaggaggctgagatggcaggatcgcttggagcagtggctcacatctgcaaccccagcactctaggaggctgagatggcaggatcgcttggagcagtggctcacatctgcaaccccagcactctaggaggctgagatggcaggatcgcttggagcagtggctcacatctgcaaccccagcactctaggaggctgagatggcaggatcgcttggagcagtggctcacatctgcaaccccagcactctaggaggctgagatggcaggatcgcttggagcagtggctcacatctgcaaccccagcactctaggaggctgagatggcaggatcgcttggagccagaagttggagaccagcccagggaacataatgagactctgtctctacaaaaaatataaaaattagcagagcatggtggcacatacctttagtcccagctactcaggaagaagctgaggcaggaggatcatttaagcccaggagttggaggctgcagtgagctatgattgcaccactgcactccagcctgggaaacagagcgagatcccatctcttaaaacaaacaaacaaacaaacaaacaccctaaaattccattttcgttttcaggacaatacaaaacttacatgaatgctgaaattatgtgtttctttatagatctttcttcctccctccttgcctctttttatgctctaaacacttattttgtctgcccatttgataatccctcactggtctttacccacttgctaatttatgattcagctgagaatctcttttttaagatggagaagtggtgactgatgcctacgattctagtataataaaggaaataatatatatccaatggcagtggttcttaaactttttgttattaaaaaaaatcccttttcacatttccctcaaactgaactattgaaataatagtaatgcatttccccaactcttcttaattatttacataagtaataatcaagtagaacttcttgtcagcatgatataaaaattagtgtcagtgagttcacaaaattgcaggcccaaataaacatgacacttttgttggtctgtgcagcctcatttctagtaaatctgaaaatttgattgagtttttaaaaatactagtgatgtggctgggtgcggtggttcatgcctgtaatcaatcctagcactttgggaggccaaggtgagcagatcacttgagctcaggagttcaagaccagcctaggcaacgtgacaaaagcccatttctataaaaattacaaaaattagccagtcgtggtggcgggtgcctgtagtcccagctactcgggaagctgaggcaagaggattgcttgaacctgggaggcggaggttgcagtgagctgagatcatgccactgcactccagcctggaggacaaagtgagaccctgtcttaaaaaaaaaaaaaattaaatagtaatatctcatagatttccataaccgcttgtgaaaacatgtcaacatttaaagatgaaaaacagtgctgtatacatcatataccgtaatcctcacaaggttcagatgactctatggatttttgaatctgagaaaacctcactgcatgaattgtaaagttgtcatttaaatattgacaaattaaaaatatccacatttttagcttctcatgagaaatcagaagctctagcaaccctggggtccatttcccgatggcagtaatagactggagccagtagtaccccctgcctttgtaagaggcatgtgttggctgtttaccatgatctccaccactccctggtgccttatgccccatctacttctctccaaaagattgcctcctaccccaaccaggatttgttaagaagtctctaattccaaggcctaatccggtggcttttcatccaccctatccctcttcaattccttcttaaactcagtaagtaactctgttcccctgtctgttgacatgtctctgcctggtggggtgcaggcgctcccactgccctcctagaccctcggagctaccacacgtatggccgcacatcagctgctgctgtgagttcaaagctgctgcaggcccgggtgatgagcagcagtaacccagacctcgcggggacacactccgcagcagacgaggaagtgaagaacatcatgtcttcaaaggtaggaaagatgtcaaaccgtggaaggggacacaggcttttttattttttaactaaaacttggagaagtaacacagaagcaaccactactgctgcccaccatgctggtcggatgctttaatgctcagctttggagtgattaacgttctttagaacagattaagaccattctgacagatgcagcagcaagaccagcatctgaggatttgctgagaactacttagcttgggtagcaaagttttaaagcatcaggggtttagccacatggagtcatgtggctaaaccatgcattttattttcaaggaaaaaaaatagctttaacttttgatacctggaaaggttgcctttaatttagttttgtttctttaatacctacctcttacgttcattaacatccacagattgattatctcacaaaaaagtccaaaggaacagccgggcatggtggctcatgcctgtaatcctagcactttgggaggccgaggcgggcggattacttgaggccaagagttcaagaccagcctggccaacatggtgaaaccctgtctctactaaaaataaaaacattggccaagcacggtggctcacacctgtaatctcagcactttgggaggccgaggtgggtggatcacaaggtcaggagttcgagaccagcctggctgacatggtgaaaccccgtctctactaaaaatacaaaattagccaggcgtggtggcacatgcctgtaatcccagctattcaggaagctgaggcaggagaatcgcttcaacccaggaggcagaggttgcagtgagccaagattgtgccatttcactctagcctgggcaacaagagcaaaactctgtctcaaaaaaagatacaaaacattagttgggcatggtggcgggtccctgtaattctagctactcaggaggctgaggcaggagaatcacgtgaacacgggaggtggaggttgcagtgagccgagattgcaccactgcactccagcttgagctacaagagtgagactccgtctcaaaaaaaaaaaaaaaaaaaaaaaaatcccaaggagcaatgccaaattttacaagcatataaaaactgacatcctgagagggttgatggcttgccctatgttgtttttccctctatgaattctttatttttttcatggtaaagctttactttcagaacagttttagagttacggaattatatactctatacccagtctctcctttattaacattttacattcaaatggtacttttggcacaattagtgaaccaatattcatggaatattattcattaagttcatctttattcacaccttctcagtttttctctaatgtcctttttctgtcccaggatcccattctgaatgccatattacattttgcagtcttgcctccataggctcctcttgctggaaacaatttcttagactttctttgttcttcatgaccttgacagttttgaggagtaatggtcaagtattttgtagattgtctctcattaggaattttttaaagattatgatattattcacataccataaaattcacccttttttaaaagatggagtatacgatccaacagtctttaatctactcacaaagctaccacgatgaattcttagcctgaattttttctccaatgatctgtggcctcagggtggccgagctattagagtaatatcatttcccctgataaagagaaatcaaaatctctaggtttagacacagacacagtttcacccttacaaattccagccacttgacactgtgtggtgtgaggaaggaaatctgcaggccagggtttggggctgggcgccaatactgccccgctgtgtggccatgggaaagtcatgtaactgtgctgggcctcatgtcctcatctctgcagaggtcctggtccctgaatgaacttaagaaccatctaccctgggtcttttaaaaacactggatttggccgggcaccgtggctcatgccagtaatcccagcactttcggaggctgaggcgggcagatcacgaggtcaggagatcgagaccatcctggctaacacggtgaaaccccgtctctactaaaaatacaaaaaattagccgggcgtggtggcgggcgcctgtaatcccagctactcaggaggctgaggcaggagaatggcgtgaacccgggaggcggagcttgcagtaagccaagatcgtgccaccgcactccagcctgggcagcagagcgagactacgtctaaaaaaataaaaataaataaaaaataaatgaaaaaaccactggattcaccccctgagatgctgatgatctgtagtttgagccatcaggaattattcgtattctatcctttttgacttacaaaaatcagttcagggatgtgctggagtgagctcatacctgttcccaaaagctgattgcttagttttccagaattttttgagccagttttgaaacagacattgttaaaattaaatcgtataaacttaaaattaaataagttatattaaaaacaaaggtaatctgaatgcaatgtggtatgctagattgtatcctggaacagaaataggacatgagtgcaaaaactggtgaaatccgagtcgttcgtgtttagttaatagtaacatatcaatgttagtttcttagttttgacaaatgtaccttactataaaagatattaagagaaatgcaatgaaagtcatataagaaatactacctttgtaacttctctgtaaatctaataataactatacaacttatacttcaaaattaaaagttcactttaaaaaggtaaacctagtcccttcctaataatttcactatatgctacaatatctaagttcttccttctttacgtttactgtgtctgtgtgatggaaatattatataatggtttgctaccacactgcatttctatgacatcgtgttggtagattgaaatcagttatgatgaaagtatttgtggcacaaaaattggcaaatgctacaaattacccctacccccctgacaactggttgttaaacatttgccagcacaacacaactcagcctcatattgaaagcccctttcagtaataccactttctgatcacccaggaaagaagtggtctgcagctattactgacagccttgatctttctatttttctttaataaaatgaaaatattaaatttttatgtggacagggttagcaattttcgaattattttgttgcatggggagaaaatgtctgatagagcatgagcactccacttcccttcagaggtagtttttgacaatgtattggtgtttaggagacagcgtggtgcagtaccgtactaaaccacagagagacactgttcccacacattttttcctggcgtcccctgaagtcacagactcctagaagggactactcagcagcccagattcttaaatagtttttaactgtaggttgctacacacaaactattaacgggtgttgtctcaagagcaagtaaaattaggtataacttcactgtctttgctttgttttatatttacttatggcaattgttttacctttgtaaccaggaaaaaaaatatgtataaaaaaatgaattctgaggttgtgatttccagatgtctggcttacctttccatggttggttgactgttaagccatggtttgtgtattttagatcgccgatcgcaactgcagccgaatgtcttactattgctctggcagtagtgatgctccaagttcacctgcagccccaaggccagccagcaaaaaggtactgaagagagcaatgtgaggttcatcccaggataagaacagaaggatttcctcatgccctcacactgtgcttgggaatagtcaaagtgctcccctgcctgtccctgatgtgctaacacacacacaccccacacacacttttgcagccctgtcctttacgccacatttgaccacctaattgcccattaactcagtgtttctcccactttctcatgcatcagaattacctggaagccttgttaaaactcatcgctggaccctacctcctgagtttctgattcaatagatctgagctggaggctcaagaatttgcatttctaacaagttcccagctgatgctggtccagggaccacattttgagaaccactgcattggcctccttttagtagagggaaagctgggcacaagtcatccttgacaaaagtgaatggcaataattaggtatcatttgtttcaataccatataaactaatatgaaatgcttcctcataattcttcacaatcagccttacctatgagttcagaaactttaaaagctgttaaactgcttaccaggatttttaaagcaacaaaattccccaatcatagtcccagcctatgtggtctgagggatggagggaaaaaaaactgtctgccctaatttcctctcttctaggcactcaagaatctcaccattatagtagctacttaagtttttaatgtctttgaagacctgtattaaaatgtaaatatggcagggcacagtggttcatacctgtattcccagcactttcggaggccgaggtgggtggatcacctgaggtcaggagttcaagataagcctggccaacatggtgaaaccccctcctactaaagatacaaaaactagccgggcatgatggcaggcacctgtaatctcagctactcaggaggctgaggcaggagaatcacttgaacacgggaggcagaggctgcagtgagctgagatcgtgccactgcactccagcctgggcgacagaatgagactccatttcaaaaaaaaaaaaaaagaaaaaaagggtaaatatgcttattgcaaaggataacacaggaagccatttgcaagagctgacatcacagggaaatgtttattaaacaggcaaggagggaatgagcctccccaagtctccctttggactggatgagggaaagaccaagtgtgggagggccggggcctggtgctgtgcactttgcagtattccaggcaccatatgtctagtgagaggtaccaggatttaactataaaaggaaaagtgaaaaaagatatggttaggctaaaaacaaattagtccacttgctctaaaatttaatattaggctatcacaggccctatgcagtgactggttataggtattataccattttcctttcttaaaaaccattatttgcctacagcctgacttctttaacccatgtcctgtttggtttcgcagttgccatgttttgacttgaaatgaccagaatagagacattttatttcaaagggaagtttggccaatatgtttccttaataccttagcagacagagttttgctgcttggctattttatataacctccagagcaaggtgttcttgtaataatgctgcccagaaagcagcatgaattactttaagaagcagcttatccttgtctaatctcttcttgccataagaccctggcagacaaactgacctattttctagaggcgacctttgaagctgggggagcatgtctttcctacaatgagaagatcaaggtgtagtccagttataatatgtgcacagttagaccacctgctagactaaaactcaaccccacgcctctctcaagtgagacagcttcacttcagactcacaacagcaaacaaatgtgttaacgcatattaaaattattaaggtttgactaacctcacaaaacgaagtgaaaccagtcgataagctgaaacacctaagcattctccattcctcaccactaacccgcctgggatctaattggttaaaatacccaagcatgtatacagagattttccttttgtcatcttttagtttagctaagtagctctcaaattttaatgtacgcaagaattagtacattgggttgcatgcgtactggactctgtgggtaatttttttttttttttgaaacagagtctcacttactctgtcacccaggctggagtgccgtggtgcaatcttggctcactgcaacctctgcctcccaggtttaagtgattctcctgcctcagcctccagagtagctgggattacaaccgtgaaccaccacatctggctaatttttgtatttttagtatagatggggtttcaccatgttgaccaggctcgtctcaaactcctgacctcaagtaatctgcctcctcggcctcccaaagtgctaggattacaggcatgagtcaacacacctagccctctgtggataatttaaacgactgtcaagagcaatgtttgctgtaatcagtttttgctttaggtgttgactttaaaacttaatttgcaaataaggatatgatattagggtgttcaaatagctttagctttcttacctactttcttaccagaaaaaaaaaatgagtttatctacgtttattccaggttttgtgggcataagatgaaagaaaaccacagaaaattcccagacatcatttttggcattaattagggtgaccaactgttctcatttgcccaggactgagggagtccccaagatgtaaggttttctattttaggaccaggacattatcaggcacactgtaatggattgattgccctacctttagtcttgaacttcttcctcatcaaaatgattgtcaggaatatgaacacatagccagatatgctgtagaatggaaaaggtataagtcaccctgtgcactatttgctactgagcagtaggtgacttgaagggaagtgaagacgcaaagtggagctgggggactttccaagcatctggccctgggacatagacatttagatgttgtaagttaaggctgatactactatgcctttcagagcccaagatcctctcataaaccccaccgatcctgcttcccacaatgccatatgggcattataaaaacaaaaattgtccagtctcctagagagtttagacaccatctagacagtggtccctaaagtgtaaccctggaccagcagcagcagcagcagcagcagcagcacccaggaacttgttagaaatgcaaattcccaggctattgaatcagaatatctgggggtggggccccccagtctgtgtttcatcaggccctgcaggagattctgatacacagaggccgggcgtagtggctcacacccgtaatcccagcactttgggaggccaaggcgggtggattgcttgagctcaggagtttgagactaagtgggcagcatggcgaaaccccatctctaccaaaaaaaaagaaaaaagaaaaaactagctgggcttggtggtgcacgcctttagtcccagctacttgggactaaagtaggtgggaggattgcttgagccagggaagttgcagtgagcgagattacgccaccgcattccagcctgggcgacagagtgcagccctatctcaaaaaaaaaaaaagtttgagaactgctgccaccaaccaactgattttatggatgagaaaactgagggtgaagagaggaatggcttgcacatggtcacacagagagttttcagcaggacccaagaggaaagtaagacagtaccagttttaatggctacccagaatgtttcccccgtagaatagagtttcactcccaggctgagtccactccctcagatgtgtctgtcctgtgcagcactgaccccagccttctatgcaccgaaatgtcctccagtctcaggtgatctcagcactgactttgccatccaccacttactgcctagaacatctaagacacatgcttcaggaacgaacaagctattaaattggggggaataaaagaaaagaaaaaaagtgttggtgaataataatagcctttgtttcacagcctaatttttgtggttcttatttagcatttccatgaggagcttgcccttcagatggtggtcagcaccggaatggtgagagaaacagtcttcaagtatgcctggttcttctttgagcttctggtgagattcttgcgcgtttgtatctgtgctcaataggccaagagaagcacacagcagaaaggaattgacattttgttcactgagttgcccctgctgaaaacctggggtggtttcttgaaatctaataatctctcacccctcccatccttcttccactaaattgtgttgcttctaccatgaaaatctatcgccgtcctgtgagttctcatcaccttcaccactctccacctggccacacaccatcatctctcatgtgcctctcgcagtgacatcctctttttcctgcctgtatccatttttgctcttggcccacccattctgcacatggcagccaatactaaacagagaatgtcacgctccttttaaaaaccgatcgatgattttcactgcactgagaagaaagcacaaatttttatcatgacctaaaaagcccttgtatgattctgttgttttcctccctctctaacctcatctcacgccacattcccccatcattcagccacatggtcctcttttggtgctttgaagatgccaaggccattttggcctcacagccttttccagattctcttcctgctccctaactttcacctccgcacccccaacacacacagtttctattcttctctgtagatttcagcttcagtggaaccatccccaagaggccttttctgaccacctaatactgtaatatatcttcctctattatcctccttctgagcaccctatttatttctttcctagtggttatcacaatttctaattgttttttctgtctcagcggttagattttcaggatttgggtctctcttgtgtattatcccatctctagcctcagcacactgcttggtaccatgcaaggcccaattaatatctgttggaaaacagaatgaaatttgtatatctgtttatcctaaaacttctaccattactcgagcagaaaagcaaaaggtatagccataataccttaattttaaaataaggggaataatagtgataactatttttttgtttaattattaatggaagcaaaaggattttcccatagaggcactaaaaataaacattttctcaatgttgataaacagagatgcataatgagatgatgttgaatgaaagaggtctaaagacatagacaccaactatataaaaatatatatgcaaacagttcagaggatttggagtaggttgagatttagtgataatgttagctttatattcattgggttctttcccctgtcccattaagtgaatctttttttttttttttttttttttaaagagagtctaggctgggtgtggtggctcacacttgtaatcctagcactttgggaggctgaggcaggcaggtcacttgaagtcaagagttcgagaccagcctggccaacgtgacaaaacccatccctactaaaaatacaaaaattagccgggtgtggtggcgggtgcctgtaatcccatctactcaggaggctgaggcaggagaattgcttgaacctgggaggcagaggcagcagtgagctgagattgcgccattgcactgcagcctgggcaaaaagagcaaaactccatctaaaaaaaaaaaaaaaagagagagggactaaagagatgggaggggttccacctaagctctagtttttgtatgtaagttgaagcccaagaaaaagggagaaatgctgaacaataggacacagagaacaaagggcaaaggaaacaaatgaaccatccactggggaggaaataggaagcaatgtggaatagagttcagaagaagtcaggttcatgccacagaaacacacccaggattcaaatcccatgaagttttgcaaagtcccaacctctgttttgagaagggtcccaaagcatggtcccaaatccttgccacagaaccacctggaggtgcttagtaaaaataaagcagagattctttctcaaagcactaaaattaggaggctggaggccagcattgtgcatttacctgtcttctcaggtgacttctaagcctgttaatgatccactggtctacaccacctctgttctgtgaatcctatacagagctacaggtcttttggaatttgtactcagacaacaccagaatttttttttcattccaaaagccgagctaattaaggtggtggctgcagctcacaagtcttggggcaagagcattaacaatgagacatgagctccatgctctggcaggaaagggactgggccataagacccattcccctcttgtttcttgaggcatgagaagtatcaaaaccgtcaccccatgccctttatatcctgcttctatttacacatcccacccaccatcatgtctctccataaagaagattcactcagcctagctctgcaaaaatgaaaaaattacctgggtgtggtaacatgtgcttgtagtctcagttactcagcaggctgaggcaggagcgtcactggagcctaggagttcaaggctgcagtgagccttgatcatgccattgcactccagcctgggcaacagattgagaccctgtctcaaaaaaaaaaaaaaaaaaaaaaaaaaaaagaagaagaagaagaagattcacttgagtcataatccagctatggataattcatacaaataattcattcccaatgcggaattcagcattgcttattctgagtggttccatgtggcatcttagagctctctttccaaaggaagtttgcattctctgcaggtgtaatgatgtctctgttcttcacagaatcccaataatagttggcataccaatagttggcataccaatgggagaaagaataatcacatcaaaactactgagcatcttactatatatgtgccaggcagtgttttaagcattttaaagcatcatctaatgtaatcattatgcaatcttgaggcaggaggaacttttattatcccaaatttacagatggggttggaggaagggtggtggccataaagagagtctccaagtcagccaaatgcttcagcagtaccacttcactgcccctaactgcttttggccttgcacatttatttactagggcttcgttggcccaggagagaaagcataagctaaagcacatggcccatcttacctctaggaagtcccttatggtaaacagatgaagttttttgggaagaaagcccctgctgatctaagcatattgcaggggtttgtcaacatgcagatcacccaagacaccagttctaccagcagcctaaaacctaagtctgtcaggttctggcaggacagagtttccgttgcccaaaagggttaactgaaaagcattgatcaaaaggactctgctcagcatgtatgggaggttcaggggccaatgaggattggtgagagcccccagggtacagcagctggcagaagcctttctctatgctagctctaaagaatcaagagtatagcagagtaactggggcctagaaaaatctggaggcagatgagacaatcttagaaaaggagcctggggccttagaaaaatgttgccactaccaggacctcactgcagcagggatgagggcagtggaagtgagtaactacctgggcctctctgttctcccacgtaatgatccccttgtttgtgctcctgttggccaactccaactggaagccaaaggttaagggggcctgagtgatgtggtccctcgagacccccttcccagcattcagagacagacagagaaggacaagaaatccatcagggagctggggtaggggcaaatggaaactatcatcccccagccagaactttgcaaggaaattgatctcagactcagacaaggtgcccaattcttcatacattgtttatgcatttgcctgaccaatgcccaggaagttatttgaaaaccaaaacagttttgttttgtttttttccaagaagcttgagaaagacaacagcttccttggccttagccaacaacctgggcaatttaacaccctctagttgtgtcagtgcccaagcgctaatgaacaaccactttggcattagagctgttaaacacaatgcttgggcgactttcacacttgctaatgaataaaatccctgtgcttctagaaactgctgagccagaccttggagaaatagagataaatgggtgacctagtttactcactcaggacatgaagttccacattaaggggttctttagaggtacccttactttaaatgggccacaaaggcccatatagggggaaagatttctgtgcctcgccccactcaacagggccaggcctccactagtgtttctactggatgttcttctctggagatctggaggacacagtagctggcaagctgctgacagtctggaaagaggccattggttggaagtatggtattgtgagaattatgtatttggttgtaggatggccaaactcagcagacaggagccaaatacagcagtgagttctgaaagccttagtgctgggatggttagcctgcccagaatcaggattggcattgcccaaaacaaagaggccttatcttcttaagtcctttgttaggagcatagtgagagagaggcttttttcggacaaaaatgggtccagttcccacccttcattcgggtcttctcaccaggtgcatgcggccttgtgggatatgaagccatctctgtgtcccaaaccaaagaggatgccgccatgaggagaaaccatggtttctctactgagctttagggtttgatgtccttaggtcttccctgagctggccatggcgttgtctgaaaacatgaaacacataaagcctgtgtctctggttttttcttattttgccttccctttgttttttctgtttgtttccatgctaacaaaaattgccagtgctgcatgcatccttagaaactgaattctgctgttagtgtattaacgttctctcatgtagctcctgggagtggaagtcccctcttcttccagtctcaacacagagggcaaatgtgggtggttcaacttccagtgccattagtagtagtagtagtagtagtagtagtagtagtattgcagtggctgtctgactaatctagacgcatacatgaaaacgttttcagagtgtagggacccaaccacaagaccttctagtcttccccatgttcctaatagtgtaagcaacttccaacaaggataagactcaccctcagatggtgacaagggggcccatattgacctgtgaatctcctggccccaagaagatgtccaaaaaataagcatgatcttgatttaaaattgtggtaggcattgagatagtattattctagtcataatgcagacagtcaccaattgacacaaggatatctatatatagatacgatatgtatatgtatgtatatccatatagatatatctgtatataaatatctttctgtcagttgacgaattgtttgcattatatatgtaaccacagtatacaccagtttgtgtcaattggtgacttgtattgacacaaagatatctatatagagatactagatatagatagataatctgtatatagatatttttgtgtcatttggtgactgtctgcattatgtaactaaaaattagacttatggaactcaaaatttcccctagaggtaatgttttccctggaggcaatgttctaaatagtggttctgtttccagctggccaacatttcctgctcaatatataatatagctaaaatttataggagcagaagataactgctggaaactatagaactgtttctggaaaaactgtgctccctcgagaaacactgaaactcaagataggaggaacatttctcccacgttctccttactgtagtttcaggaacagaaaagactttagttcgcatcaagaaccttgtgataaactgttcctttctgagtcatgtgttctgtcctatgatagaggacacctagctggttacaggagcccagctcaggtctgccttccaggatgtaggcagttgagaacactgtagctaaagaattaagctcctggctttgtcagcagcaagaagggagcctctgacttggggtcaaaaagaggacacccttcccacctcccgccaccatggtaaccattggtgtgtctgcagcattttagtccagagcttgctcgggcaccaccagcacagataaagtgtcagaaaatccattgttagagagcatttctgtgagtctttcccccttttctgcattgtacaagcaggtcaccaatctccatgttgacatttcctccatccccctccgcaggtgaaaagcatggcccagcacgtacataacatggacaaacgggacagttttcggaggactcgtttttctgaccgtttcatggatgacataactactattgttaatgtggtcacctcggaaattgcagcccttttagtaaaaccacagaaggtaactgtattttactctttattttctaaattgtttacctggaacatatattactttcataatcagagaaaaataagcatcattttaaaacaataattaaaatataactgtaatgacagttaaacgcagtatgttatactggactggaccctgatgtggggctggaaaattgttataaacaaattacacacatgaggccaggggttcgagacctgcctggccaacatggtgacatggtgagaccctgtctctactaaaaatataaaaattagctgagcatggttgtgcatatctgtaatcccagcaactgggaggcagaagcaagagaactgcttgaacctgggagacagaggttgcagtgagccgagatggtgccacagcactccagcctgggtgacagagtgagactctgtctcaaaaaaaaaaaaaaaaagaaattgcaatatggactgtggtttaaatgatcatatcaggctgggtgcagtggctcacacctgtaatcccagcactttgggaggcaagggtggtcagatcacttgaggtcaggcattcgagaccagcctggccaacatgttgaaaccccgtctctactaaaaatatggaaaattagccgggtgtagtggcacgtacctgtaatcccagcttctcgggaggctgaggtggaagaatcgcttgagcccaggaggcggaggttgcagtgagccgagatggtaccacagcactccagcctgggtgacagagtgagactccatctaaaagaaaaatgtagatatgaaagataatatttttgctcttaggaaatacaccttgaagtgttatggggtaaatgggcatgatatttgcaacccattctcaaatggttcagaaaaaaatgtttttatgttcatagaatgataaaacaaatgtagcaaaatgtcaagtattgataagcttcgttaaagggtatacagtagttctttgtactattcttgcaccttttctgtaagtttaaaattgtttcagaataaaagctaaaacatatataaaatggaataaatcaaatgtttaaaaggcagctacaaaaatcttaggaagcaatgtttattattaatcgctttgtcgttattgagaatgtgcatagtaccaagtgctcaggagattttcattcggttattcctcatggcaaactttgttggaacagcatggtatctccacattggcaggtgtgagaataaggcacagtgaggttgataaattttccaaaagtcacacacagccagcagtaaagccaagactggagattttagacccagatactgagtcacgtaaggcacccaggaggagtggccatgtggagaatgcggagagagttcgaggacctctcagcggcacggtagcaacctctttatcaggtccccatccatcccagtgacttgactggtcagcatggcctgaatttgcaaattgcatgttaacaaaagcaaaatagtttcaaaccatatttttaatagtgtcaaaggaaattgatttgtcattctgagaataaaggacataaacatgaaaaactgaatcccagattgctctgaagcactgtaaaatccctcataaacaggagcactgagaaataatacaaattaaaaattttaaaaataggcgtagcttattaattgggattcatggaggaatttaccctacggagtgaatacaccctgcggagtatgactctgacctctcttaggctggaaatgctgcctaattgaggaataaatttcttaggtaaaaactaattcttttatcctgattggattttctgtaataatccttaaaaattaagaaactgtctcattgaaaacagtaagtatttttcaagtcagtttgccaaaaaaaaagaaaatagttacaaaaaaaaaagttaccaggatataaaaaaaagtaggatccaacatagtatatagagaatgaggttaattatacacatataaatatgcatgtagaaaaaaaagtgactggaaggaaatgcacctaaatattaacagtgcacgaataattacttgattcaacctcacagtcatggctttagttaaaggagactcaactacttcgcccagtgccacccagaaggacagtggctgaaataataggacctgtctctcccaatgttcccaccagtgacctggaagttcaaatccagagtgtcccacaaaatgatttgggtgtttgtttgtttttaaggaaaatgaacaggcggaaaagatgaacatcagcctggctttcttcttgtatgaccttctctccctcatggatcggggctttgtgtttaacctcatcagacattattgcagccaggtgagtgtcccccccacccccacccccgagcgagccacttggttccttctcatataatgtgatgttcgttgccatggcacgctgtcttcttcattactgagttggcatgaatcctacacatcctgtgttttgcagcacgtccctcatgtctgtgccatggacattcctcagacatgctggtttaccttgattcctggagcatttaccgacagtgtagaagggtcaacagattcatctgtgggaattaaaatttgtgatatgatctgaatcttcaatttgacattcaacagaaaattaacatggctatacagtgctttcagtctttgacaagtccttgcgctcccagtctgaggtctcttttcacatattagggtaattaattaaattgctgttgtgatgctccgacttgaaagaacctttttaaagtgttcttaaataaaatcattcaaagagatttaatttcactgagcacatagcaaatatttcataaaccaagtgcatctatcagtgccatccccccagatttttaaatggaattattcatgtgctgtctccctcaaactaccttaacaatagtaatataaatagcagttattgttgctgctcctctccttccatatccctaatctagccactagtaccatcattactgctactactaccaccagccaccaccattctcattagtcccatgcccactatcaccaccttctccaccatcaccacctcccaccacctccaccacctccaccatcaccaccacctccaccatcaccaccaccacctccaccatcaccacctccttcaccatcaccatcaccaccacctccaccatcaccaccaccacctccaccaccaccagcatcttcaccatcaccaccacctccaccatcaccaccaccaccacctccaccatcaccacctccttcaccatcaccatcaccaccacctccactatcaccaccacctccaccatcaccaccacctccaccatcaccaccacctccaccatcaccaccacttccttcaccaccaccaccatcttcaccgtcaccaccacctccaccaccaccacctcctccaccaccaccacctcctccaccatcaccacctccttcaccatcaccatcaccaccacctccaccatcaccaccaccacctccaccatcaccaccacctccaccaccaccagcatcttcaccatcaccaccacccacctccttcaccatcaccaccacctccaccatcaccaccaccacctccaccatcaccaccacctccaccaccaccagcatcttcaccatcaccaccaccacctccaccatcaccaccacctccaccatcaccaccaccacctccaccaccatcaccaccacctccaccatcaccaccacctccaccaccaccagcatcttcaccatcaccaccacctccaccaccaccaccacctccaccatcaccaccaccacctccaccaccaccagcatcttcaccatcaccaccacctccaccaccaccaccacctccaccatcaccaccacctccaccatcaccaccacctccaccatcaccatcaccaccacctccaccatcaccacctcctccaccatcaccaccacctccaccaccaccacctcccccactaccaacagctccttcaccatcaccacaacatccaccaccaccatcaccaccaccaccaccacctcctccaccatcaccacctcctccaccaccaccaccattagctccaccatgaccacctccttcacctccaccatcacttcttccaccatcatcattgtcaccatcatcaccaccaccacctccaccaccatcaccacctctcccatcaccaccacgttctctgtggttagtcacttagtgactttagataagtttttccaattttatgggtcttaatttcctcagttttaaaataagaagggggggttgagagatttgagggctgatcaacgaaaaggataggaccataaaaagcagtgacatacaagcttcattgagcagcacttggacagggttacataagagcggaagcccctcccagcatgagaacagccataggcctgcagtgaggaggggaccatccagaggagcaggggaactcccaggggagaggaggattagggcagaagcttatagatctgggtgaggctgctccacagcacagtagggagtctctgggtcagagagctccaagggctgtagcagcttagggccctgtatctgcaaggctctatcttatcattaggaaacagctgtccatcgagattttatggggtctgcaaaggaggcaggcactaaatggatgaaaatctgcttatatgagctatttttgttaatgactgggcatggtaaaatttgagttaggtatgagccaagggatcagcaccagtcgacagtgaagaaataaacaaccgaggggccaatacacagaaacaatctttgacttgtttacataacacctctcctccaaaaaaagaaaaagacatgacttttctaaaggaagtcctgtctacagccataccaccctgaacgcacgcagtctcatctaagggaagtcctgataaggaagcagaataataaaaaagaatcctaaggaaacatcagaagtccccaagcatccccatcccatgcaccctgacccctgccctgcagcggatcttctgtcccaggacccaccagaatagaatggcagagggacacttcactcctccttgccctccctcttcagtatttaggattccaggttagtctgttttcaaaactttaagttgagtgtatgaaagataccctagatcaccactgcagacccaggcttagctactcacatgcaggctatcttcattcccgacagggaaataaggcaacccaaggtagatatctgccttccctgcaaaactcatgtttttattttctctttctctttcctttcttttctcttgctcactatctttctccttaaattcttcccttttcttttagttaccatttctttttttgtttctctccttgactcaaatgccaaagatccctagaccaggagtcaagaagcctgcatgctgattcctgggacaccattaattacttctgtgattgggagcatcagcctttgaggcattcatttcctcatctgcaaaaaaactaggctggattagatttatccactgattctgtggtctgtgtctgccagtgacatccacggatgttacttagcaccattagtggcactcaggcctcagaaggtcactgacccccattcgtggtgatttaattcattgatcccagctctctagatacaggatgaacttcataccttaagcaagttgtattcttacaaagtcgtctgactttatcattttgcataacctattatgttttctgccatctaaagattttgtggcaatggatataaccttagtcttttttaatagtcactaaaaatagacaaatccatttcctcaattactgtctgtcacttacaatgtgccactaagcaaacacccatcccttgggtaggggcattgtgggtcttgacctttgggaaggaagtttttggaatgcaccttactcctcttttcaaaacatcactcaaattgtttttgaaatgtctattttttttcttttgagatggagtcttactctgttgcccaggccagagtgcagtggcacaattttggctcactgcaaactccgcctcacaggttcaagcgattctccttcctcaccctcccgagtagctgggattacaggtgtgtggcaccactccccgctaatttttgcatttttagtagagacagggtttcaccatgttggccagactggtcttgaactctggcctcaagtgatctgcctgcctctgcctcccgaagtgctgggattacaggtgtgagccaccacacccagcctgaaatgtctgtcttgaatgatgtctcaagggacctatgaaagatacccatagtggggccttcttttaagtgccaatgtgttgtgggttcaagttccgatagccggcttgacccgacacctgttaatgagtaacctaagtgacaggcacatgaccaagttctaatcccttcaatgtgctggtggctccactggtccaaagtcagccaggagtgcacatcgaaaggttatgggatctggtaactgtgcttacatagaagtcatatgttttggttttaaaataatatataatggcatttacttattttaagtggatgtctaactatgaattaattctgtaggcaatatgtcccacaacacattggcttcttgtaaaatggctgaaaatatgtgttcatttaaattatattgtttagtctgtaatcccagcactttgggaggccaaggcgggaggatcacctgaggccaggagttcgagaccagcttggccaatatggttaaaccccatctctactaaaaatacaaaaaattagctgggcatgttgatgtgcacctgtaatcccagctactcgggaggctgaggcaagagaatcgcttgaacctgggagatgaaggttgcagtgagccgagatcatgccactgcactccagttcaacagagcaagactctgtatctctctctctctctctctctctctctctctctctatatatatatatatatatatatacatatatatatatgtgtatatatatatgtgtatatatatatatgtatatatatatatatgtgtatatatatatatgtgtatatatatatatatatagtttaaaaaacaaactactcttgaagtgagtgaagaggaggcatgtctatcacaaggatgatgcttcatatttctgtgctggggtggggggtgataatgatgaaatattgaggagctcaaggtgcatcagcgccccttccttcccctattttgcctttagaggagctgcctctgagtctgggtctttcagttgttcagcttgcctgggggaagcaaggggtctcttccagacagtcacctttttctgcttttcattgcttgcttcatggtttattttttaaaggaagatttttcctaaaaactcttctagctttctttctctttcttctccatttcctcctctctcagtctgggacaagctccttgagttttttgcaggtactatgtactttgctaaacagtttgatgcctttctctagggaactggttctacaactttccaatggggcctttaattagaaactacgagagaacacttgtagtataaaagtcatctagtcatattctattagtttcatacaggctcatatgaggtcaactcctttcatttagtttctcgaacatagtagagtttttgtaaaattaattatgttacggtgaagatgtacctcaagattttcagcacaggcttcccatggtattaaagatttgataaagtggaaatcgggataagaatcctcattctggacagctactaggctagaatcactaaggggaacagtaatgaatgaaaatttattagacctctctgtaatgcagaatttaccatctgttgcactatcccattagtttttattaaattgattgccttaacctggagagaaaggatatttttgtgtctgccaacctcaactccacttaccttgtaataaatgtttcattcctcttttcatttttcttcccagctgtcagccaagctcagtaaccttccaacgctcatttccatgaggctagagttcctgagaatcctctgtagccatgagcattacctcaatctgaaccttttttttatgaatgctgatactgctccaacatctccttgtccttccatatcttcccaggtaataaaagaattatttaactaaaagaattattcaagctatttcatttaactagctcagtttaatcatgtatttcctataaaggttagtcttattaatttgacaaaaaatcaaacaattcaaaccagatcaagtatgctaccctgaagttacaccactagctaagaattaacaatctaagtaattggtttctccccaggctcaaggctccctgatcaggttaagtaaagccaagaatccaataagccctatgaaatttagaaactcatagaaaagtctcaaatcttcctttgtctgacattagccaattgttatattatgcaaatagaggattccaaagtaaataagttttggaaaccatgtattcaccaggtttctttgcagcaggccctctaagaggttttaacttgttcatgtcaattgcaaatgcacgagaagcagaagaggaaatgggaggaggtgtgcatgataagcagtgattccccaaatgatttaacatggaaaccccaccccacctcatacattttttgaaatgttactctggaataactttaagaacatgctgtttgatagtcacattccatttatagggaacacatcagtagctcagagcatcaggcaaaatttctcattattaggttatatttctgttgcatattccttgatactagtacaaaagtgaaggcttgtcttactaattgaaaaaaaaatcttagccatatatgccatatggcatgatccagatattagctacatgaccatcttactgtgaacagggaaagatctgactcacaagcagcaattcaaaatgtataaactttttgctccatcctgcccagcagcttaagtcctaaaacttccctggactaagcttaccctaggttctttcccaccttccccttctgactgccccagggagtggccaaacccaggggccaggctcacaaaaccatgaaggatttctaaagacactttagatgctcttaatgaaatataaagtgtgctcccaggatacaaatacaggacaggaattactgaggaccggtaaatctaatacttccctccctgacatcacttgtagttccaggccagcaaaagtctgacaatgtgcttaagccaaattcagaagtgtagctgaggccgggcacggtggctcacatttgtaatcccagcatcttcggaggccaaagggagtggaatacttgaggcaggagttaccagcctgaccaacatgatgaaaactcatatctactaaaaatacaaaaatgcatcaggtgtggtagtgtgactgtaatcccagctacttgggacgctgaggcatgagaattgcttgaacccgggagagggaggttgcagtgagctgagaccatgccactgcaatccagcctgggtaacagagtgacactctgtctttcaaaaaaaaaaaaaaaaaaaaaagaaggtacctgagtaagcagggccttaaacaaagggggcatttggttacagaggaattgcctgttcccagccccaggactgggtgaggttcttatttctctgtccaacttttatgctaggatttttatcttcagcttttgatttcaggtgggaaagggagcgtcattcatttttcaacagacccggggtgctttattttcatctttcccgctgggcagtcttctctctgtgggtatgggaaagtgcagtaaccactctgtgcctcagtttccttgtccgccttatctggcaccagagtacctacctcactggggagggctcacgaagcctggctggggcgaggactcagtaaacactggccatcgctattttcattccagttcttgtggctcataaaatggctccttacgtttctgtagaactcaagctcctgctccagcttccaggaccagaagatcgccagcatgttcgatctgacttccgagtaccgccagcagcacttcctcaccgggctcctcttcacagaactggctgctgccctggatgccgaaggggaagggtatgtttctggcatttaaaatggaagatgaagccaaaaaaacagatgttctttaataaaatttgcagtctagcttctcacacttggtaaaaaactctactgtagttgaccagttctgaggagtagaaacatctgtcttgagaatatggtacccataagcacaaggcacaagaaaggcctttcttgtgtagaaaggcaccagggatgggtaagaactacaaaatgacttttcttggtcaactatttcagtggaatttaccagttctgctatagcaggtttcccaaggatgctttgattagtgaactccctaggagcaaagccatttttaacaaaggggatagcatgcagaggcaaccacaagatgtcacttggttcaaagctgatgaaggaaataatggctgctgagaaggcagctgtcccatgcccagattaggtttcttgcagacagtgcttctcaggccaagagacaccacacatccagggcttctgaatccttttacctcttatctatctgattactcagggacatgtggcagtatctagcctagaagtcaacagacagagaggtagaccacccccttctttccttctctccctatgctccgtgagctcatggagtcagaaacccacagcctatctgattggactgaaaaagataatgccttctaaaatattattcattccgttcaacaattattgaatgccttccatgggacagacacagttaggtgttagagtacatcagagatatatcagtgcacaaaacagacaaaattcgctgcccctcaagagctcaccatccagggactcagattcaaagatgattaggattgcaaagtagttgagattcaacacttctggtgtttagattaggcatacagaattgcaggaacttgcccactattccataacagagaacgaaatctaaagccatggtcttcccagtcccttcccaggacccactctcctataccaaaccatctccctgcacagggaacctgttcccatgactcctatgctaaagaggtttccagaataatgtttgctaattaatggtagcattgctgtatgttatggatggatttttatctaaatggaatttctcaagttctctcaaagtgcttacaatttagtgaaggaaacaggaggttcctgcatgaaacaaatacaggagcacatcgagttcgtgcaactgcaacagtcacatgtgtcccaagctatgtacccaggctgacaccgctgaagtgactctatgtctgcgtctcctggcaggatagtgtggggaatctcatgcttttagctctcaattctgcctccttccagataaactggcctgagtatatcctttgagaacttcactttccatggcttcaattctatcttctcttctcaactctaactaaatttctcccaattatctcagtagaatgttctaccctacaactaacataaatttccacagcaacaaaaagtgcaccgaacacttatgctaataagtaagatactgagaagaaagtttgaacacaaagaaaattgccttcatgcacaaacatgtacatacattttcttagttgtcctttaatagcagtactttaagtgatttctagaaacatctttagtatttacaatagcgtagtttctattttctattttcattctagctggaaacagccatgacattctgttctggattccttgtaaaattgttgctgttatattactagcaacaaggtagagtatattcagagataatcatgtaattatgtttaatcaggtagatacattcttcaaacacacacacacacacacacacacacgcacacacgcgcgtgcacatgcacacacacagtaccctttctcccccaaaagagtaattaacagtgtaactcctttggcaacacagtaatccctgattgctgggttgtcagttactctcctggaaagtcattagatacactgtcacaacttcatcatgtaagctaaaacctcagaaaaatgtcatgcttcaacaatacttcctattgatcagcacttcctttttttttttcttttgcttccaagacagttggtagacttgccaacacctgtacatccatggggcaagggccagaaggacgcatctcagtacctgaacccctagggagctacagctccagtttccactgggtttcccttggatctctgacacctgggtatatccacaagtgtctatgcatcgttaaatccacagtgtttttcaagcatttagaaattgtctatcatctttgtgttaagccagcaaattgcaatgcctaattcaaaacacaacccattgccgggaccacagactaagaacaagaaaaacttttgaaatgcaatttacaattatcttactttagccacagtgcaagagtctgagtcatttaaaattttggttaatattttctatataacgttgaattctgatgtagccttattttgtttgaaagaaaaaaatgtatatatatgtatatattttttaaatctggattctttttttattattatcatactttaagttctagggtacatgtatacaacatgcaggtttgttacatatgtatatatgcgccatgttggtgtgctgcacccattaactcgtcatttacattaggtatatctcctaatgctgtccctccccactccccccaccccatgacagtccccggtgtgtgatgttcccacctatgagtgagaacatgcggtgtttggttttctgtccttgcgatagtttgctgagaatgacggttttcagcttcatccatgtccctacaaaggacatgaactcatccttttttatggctgcatagtattccatggtgtatatgtgccacattttcttaatccagtctaccattgatggacatttgggttggttccaagtctttgctattgtgaatagtgccgcaataaaaggattataaatcatgctgctataaagacatatgcacacatatgtttattgcggcaagatgtatatttttaaaattgaacatctatgactaggttccagatactccactatatattttatttactttttattatagtataatttatataaagaacctgaatcctaagtgtaaagtgcgattaatatttcctgtgaatatatttgagtaaccaccagtcagataaaaaatataatattccattatcctctctcagttacaggcccccctcaagtaaccactattctgactcttattattagaaattaatactgcctgttgttgaatttcatagtcttttgctgaatgttgtgactgtgacatcctttagtgtggtcgcatgtgtcagtattcattttttttcaactgtatgtcatattcctttgtctactataatttctcttctgtaaattgacatttgggctgctttctatttgtgggtattgggtattatgaaaacagctgccgtgaacatgcctgtgcatggttttgggtggacgttagaactcatttctttggggctataaatacagcctattttttattttaatatactgctcttgaatagtttaataaatatgtgtacatggtcttaacaaaatgtcaaaagaatatactctgagctaggaaaagaagagcaaacaagtcaaagcaggaagatggcagggaataacaaaggtgatagccaaaataaatgaaataaagaatagaaaaacaatcacggaaatccgcaagatgaaaagcttgttatttgaaaagagcaacaaaattcaccaatctttagctgagctgaccaagaaaaaaggaagaagactcaattactaaaatcataattgaaagattcaacacaatcatatcacaagagaccttacagaaataaaaaggattataaaagaatacgatgaacaattgaaagccatcaaattgataacctagattaaatggataaattccttaaaaggtacaaagtactaaaattgactccaagaagatatagaaaatccaaatagacctacagaagtaaaaagattgagttagtaatcaaacttcccacatacacctactatgtacccacacaaattaaaaatttaggctgggcgcagtggctcatacctgtaatcccagcactttgggtggccaaggcgagtggatcacctgaggtcaagagttcaagaccagcctggccaaggtgatgaaaccccgtctctactaaaaatacaaaaattagctgggtgtggtggcgggaacctgtaatcccatctactcgggaggctgaggcagaagaatcatttgagactggaaggcagaggttgcagtgagccaagatcatgccaatgcactccagcctgggcaacaagagcaaaactccatcacaaataataataataataataatatattttaaaatttaaaacttcctacaataaaagctcaaacctggggggctttactgatgaattctaccaaatatttttaaaagaattaattctaattttttaccaacttccagtcttctcttccaacgaatggaagaggtggaatacttccccacttgttctatgaagctagcattaccctatactaaaccagacaaagacatcatgagaaaactacaggccagtatctgatgaatatagatgtaagaccctcaacaaacactagcaaactgaatccaacagcatataaaaaggattatacaccatggctaagtaggatttatctcaggaatgcaagataggctgcatacctgaaaatcaattgttgtaccatattaataaaataaaggacaaaacccatacaatcatcttagtagatgcaaagaaaagcatttaataaaatctaataacgcttcctgataaaaacactcaacaaaccttttaggaaataagagaacttcctcaacttgacttaagggcctctatgaaaaatccacagctaatgtgacacttattagtgaaaaacagtgctttatccctaagattaggaacaagacaaaaatgtctacccttgccacttctattcaacatattaggagttctatctagggcaattaggcaaaaaaataaaacaaaagacatctaggccaggcgtggtggctcacgcctgtaatcccagcactttgggaggccaaagtggacagatcgctttgagcccaggagactgagaacaccctgagcaacatggcaaaacgccatctctacaagaaatacaaaaattagctgggcattggtggcttgtgtttgtagtcccagctacttgggaggttgaggctggagaattgcttgatcccagaaagcggaggttgtagtgagctgagatcacgctactgcactccagcctgggccacagagtaagaccctgtctcaaaaaaaaaaaaaaaaagaaaaagaagaaaagaaaagaaagcatttaaattggaaaagaagtaaaactatctctattcataggtggcataatcttgtttatagaaaaccataaggaatccacaaaaaactccattacaactaataaatgaattcagcagtgttgcatggtataagatcaacatacaagaatcaattgtgtttctatacacttacgatgagcaatctgaaaatgaaattaagaaaacaatttcatataaaatagcatcacaaagaaaaaatatttaggaataaatgtaacaaaagaaacacaagagttatacactaaaaatgacaaaacactgttgaaagaaagatataaataaatggaggatatcatatgttcatgaatcagaagacttattattaaaatagcaatactccccaaattgatccatagattaaatgcagttcttctcagaattctagcttgcttttttttttttttggcagaaattagcaaactgatcctaaaattcgtgtggaaattcaagggacccagtatagccaaaacaaccttgaaaaacaagaacaaaattggaggactcacacttcccaatttcaaaacttactacaaagcaaaagtagtcaagactatggggttctgacatatgatagacatatagatcaatgaaattgggttaagagtccaaaaataaatcttcatatttatagtcaattgatttttgacaagagtgccaaaacaattcaatgggggaaaatagaattttcaataaatggtgttgggacaactgggtatccacactcaaaagaatgaagttggaccctatattacactgtatacaaaaactaactcaaatagatcaaagacctaaatgtaagagctaaaactataaaattgttacataaaattatagaggtaatcatcatagacttagaaaaggcagtggtttcttagatatgacacactcgaaagtatgagtaacaagaaaaaaatagataactggacttcagtaaaattaaaacttttgtgatttataggacaccatcaaaaaaatgaaaaggcaacacacaaaatgggagaaaatatttgcaaatcaaaaacctaataggggacttgtatctggaatatatattttaaaatcttacaactcagtaataaaaagacaaataactcagttttttaaaaggcaaaagatcagaatagacatttctccaaagaagatacagccataagaccatgaagatgttcagcatcattagccgtcagggagatgcatattaaaatcacaattaaataccacttgatacccacgaagatggatataataaaaaagacaggtaataaagtgttggcaagaataaaatggagtcttcagacactgctggtgggaatgtaaaattgtgcagccaccgttgaaaacaacttgctgattcctctaaaagttaaacagaggctgggcgctcggcggctcacgcctataatctcagcactttgggaggctgaggtgggcagatcatttgaggccaggagttcgagaccagcctggccaagatggtgaaaccctgtctctactaaaaatacaaaaattagccaggtgtggtggcaggtgcctgtagtccccgctacttgggaggctgagtcagaagaattgcttgaacccaggaggtggaggttgcagtgagccgagatcgtgtcattgcactccagcctgaacaactccatgtcaaaaaaaaaaaaaagttaaacagacagttaccatacaagccagcaaatgtactctgaggtatgtacccaagaaaagtaaaacttaaaacttgtatacacatactcatagcagcgttggtaagtcacaatagctcaaaagcagaaacaatccaaatgtttatcagttgatgaatggataaaattcaccaatggaatattatttagcaataaaaaggaatgaagtactgatgctacaatatgataaacttaaaaacatcatgctaaacagcagacccagggttagaacacaggcagtctgtttctggattctatgtagttctatcctatattgcttggttttccagggttagaacacaggcagtctgtttctggattctatatagttctatcctgtattgcttggttttccagggttagaacacaggcagtctgtttctggattctatgtagttctatcctgtattgcttggttttccagggttagaacacaggcagtctgtttctggattctatgtagttctatcctatattgcttggttttcacagtcacctcattgcttaggagcgttttcatcactcttgactgtttaagagctctttagtcaatttcctttcaccataacctcttgattcctgtgttgtgccaacagaatcagcaaagtacaaaggaaagctgtcagtgcaattcacagcctgctaagttctcacgacctggacccacgctgtgtcaaaccagaggtgaaggtcaaaatcgccgccctttacctacctttagttggcatcattttggatgctttgccacagctctgtgactttacaggtaatggcccttctgttttctttcttggattgttgggggcccctgccaaatgccccatccgaatgagatctctgtcattcgttccagtgctgatatgttcatatgagcaattcttcacaaaaatggtctccaaacctctttaacactggccccaatcagttaaaaaaacaaaaaaagtcacatagccccatatgtgttttttgtttagaaattatttacttgtttcttcattcattcatttattcattcattgatctgctagtatggaatgaactttataaaccatacaccacaaaggatgaaataataacaagattactgcctttggagatcgtgctctaacaccttgaaataaaggtgttccttcccttttcttttatgaatatgtaagcaaaaaagcggtctcaaatgaacccaactaattgctccatgcaaaaaaaaaatcatggcatatgtcaatattagaaaattctatcatagcagagaaatattgcccttggcactaagtgactaattttgaggttaatatgtctagattagcaacaagatgaaaggataagttgtcttaaaggggttttgtgaaaccccagaatctatttacaaattacattgtggattaaggaatgtagagggaaaaaaatcctcccaaatagaagaacttcttatgttgacctgagaaaggcagtccattggcctaccctctccacagcgtacgtgtgtgtgcacgtgtgtgcgcgcgtgcacacacacacacacacaattcctatcccatcagagtagttcttgcttttcctccagctcaagggaagttttggaaatgtccatgctgctctcttggcagctgaagggtgctgggatctgggcaatgcttccctgagccagcctctttatagtcagtcatccttgaaatcttggaaccatccaggttttcccacctcctccaaatggaaagtgtcatgtgtgactaaattgtttataatactattacggtgacaagtatttagttcatgaaaatgggaccaaacgcctatagtctttaattcatacaaatcataaaatgaaaagcaagtattcctgtggaagtaattctctcctttcttgaaaaaaatcctctagcaaactgctaatggagtaactcagaagagaaaggttgagacaggggttagggtttgtagagttctgttggggccagagtgcaaggaaatgatagaaacaagctcagcacacagggctgagcaagctgcaccatgaggtcagcagcttcctctagcagcgcctgattgcgcggaattgaaaatggagttgtttttaacatttacagacataatgcagagcatggcatgtgacttgtagcccattttgagaatccttgatggcaagtttctaaaaagttccatttcaagagcttgcttgttcccaaagccaggaaccactttagcacacattatccgaagttttcttgtcaattagaatattccgtatcagtgactcggaatcagaacttttcaacatttggtctccaagccttttaaacctcaaagacttctttgtatatgcgttgaactttatgatcatgatgtagctgatgagagaaaaaaacagtgaaaagtattttattgttataggttacacagtacatctattaaatatggaatctttaggttgataaactcataagaatacagtctttcaaaaagatgcatctgaattcagattccagccccatttattaatataagtgacctttgaaaggctcaacctttccgtgccttcctttcctctgtaaactataaaaatgtgataacgatgtctaccttttaggtttacgataaaggtgaaactagagaacttctataaaagcattttgcacagcacatgtttgtatctttcccgatttttcttgtaactataaccctatggcaattaaggggaaataagaatgtgtctctatgttagttgtgataatgttatcaggtcttgcataatttccatgtgctgtttatttaaccatttgtttaaaatcccaatggccttaataagtatttctaaaaattgggttttggctcggtgtggtggctcacccctgtaatcccagcactttgggaggccaaggtggacagatcacttgaggccaggggttcaagaccagcctggccaacatggcgaaaccctgtctccactaaaaatacaaaagttagccaggcgtggtggcgcacctgtaatcccagctactcgggaggctgaggtaggaggatggaggggcagagattgcagtgagcggagatggcgccactgcactccagcctggatgatagtgtgagactttgtctaaaaataaataaataaataaataataagaactgggttttgttttcacaactttagtagaagaaatgttatttacactcaaatttttctaaataattgaaggcccagatggctgtaatgtcaacaggtctagaaaaacatgaatttttaggaaaacatgagtgaatcaatcagttgtgaatgttttaccacacttttcccagaactgcttgaaatattaatagtttttgattgtatactggtagcattcttaaaaaccagacttttaaacggtttatcgtttttttgcttgcatacatctagacctatctataaatatgggtatgtctatattacatagatacaataaattgacattcattttaaacatttgaaatatgacaaattattgctgaacttgtgataatagcttattattctatataaggtagttgcttaattctgtaattgtaggtgtcttctatttggtcattatttaaaataatgccaattattagaatagagaatgaagtttaaaaaattatgttacaggaaacaattatggaaggtttgaaaactttttgttcacacaatttgaaaaattaatttctagcctaatcttgtgctagacattgtctcttagcctgctgtgttttcctataggtgatagcagatacataatgctaaacatcaggtttgaaattactgtgctgactttagtgactgagaagtatcagtctcttattgggtaggggacatggggaaatgtcatgtttgacttgacatcacaaacgatgttttcattgcagttgcagatactcgcagataccgcaccagtggctcggatgaagaacaagaaggagccggtgccattaaccagaatgtggctctggccatagcagggaataatttcaatttgaaaacaagtggaatagtgctgtcttccttggtatgttggtgcacatgtgtctggttgatttttcatttcatgtcttctgtcttctgttttgttttgtttgtttgtttgttttgagacagagtctcactctgttgcacaggctggagtgcagtggcgcaatctcagttcactgcaacctccgcctcccgggttcttcatgcctcagcctcctgattagctgggattacaggcgtgcaccaccacacctggctaattttttttgtatcttttagtagagacggggtttcgccatgttggccaggctggtctcaaactcccaacctcagatggtacacccacctcagcctcccaaagtgctgggattacaggcgtgagccactgtgcccagcctcttctgtcatcttctgatgggagaactcagcttagagcaggcattgattatttccgcctcattttgctggaaagaatcattgtgaggctggcagctgaggtgcacacaagtcagaaagggttctggcaacagcaagagatgtgcagatcaaattcaggcagtcccagtggtgctgagttcaagttcaagaaaccggaaaagaggaaaacttgggaaatctgaaatccttgcaaaggagatcaaaccaaggctctctgagggtggaggcttaggctgtgttcagtctatgtgtgtgtaattcatacagtgtaatgcctccaaaaaaaaagactgaaggaggctggtagcttagcgtaagggcttcttaaacaagactgcagcttttctaggaccccagggagcctaaggagggttgtttggctctgtccttttgcatggactctgtgggctcaaagaggggctcctctgggaatgtatcctctgattcagttgaggtgggattcatctctgttcattgatgagctctgactatcccttgtgaagacagcactgcatcctccaatgtcatttactttcacatttcaatgtagggtatagatgtgcagagaatttaactttcttctcccgtgagaaagcagcatcctgacctaactcttcttgctggatgactttcttgtcttccttcctgcacttagcaagctccatcaccatgaggattggggggacagtgaggcaggaagatgagacagagaaaagacatttgagatttgacatcaccgatcttactgttggagaaatattgtgtgacctcctccacctttctaatatccgtcttaccaaagttagctgcttgaggtggtatatgccttttacattatttgcctctaagggaaaaactcaaaagcccaaagttcacctgttagaacatagtccttgtgaggttgtatctcaagatttcctttattcttgtcaacaaactcagaataactaaagttaaagttgctttataacctctattatttccatccaaaactaacatttccctcccatacccacaaattcctcattgcaatttcaccagtacattccactggatattagctacgctgcatgaaccaagggtgcagcctcattgttgttgtttgtgttgatgagatgagtaacagagagtgcgctcagcactttaaaatgaatacttgtggccaaaatattaaagcaaatagcctgaacccccacaccccagccccaggcaaacataaattatggttaaacttccattacagagaactccacaaacatggatttgattaatttgctgagcagttcatgacccttatgttatactttgcactatgtaacaaagaagctaaatcttgaacagcaagcttattcatggcacccagccagtttccttctcccctgtaagtctaaccctctgctgcccagcacgaaggagaaatacttggagatcttagcagcatgaaagcctctttgtatcactgggattgcagcacgcatgatcaaggcccaggggtgatcaccaggccacactgctcctaagacagaggtactcagatacgtggctgaaagcctagctcaaatactgccccaggtgagcctctttgctgagtagcgctactcaaagaacacagcttcccctgcctagggaaggcagggctactggcaatagatctccagcctagcagtgatgtacagtcatggtattttaagagaacactttgaatttttctgttgcttgactgttaagcctcaaatttttctgttgcttgacttcttccctggcctccatcccccaatctgcctcccttcagccctataagcagtacaacatgctgaacgcggacactactcgcaacctcatgatctgcttcctctggatcatgaaaaatgctgatcagagcctcattaggaagtggattgctgacctgccatcaacgcagctcaacaggattttagatctacttttcatctgtgtgttatgttttgagtataaggtaagtctggagtggcacaactttataccagctcttatctctcaattgcaattctgtcttcttactcatcccctttgtttgggccatggaggcatcattaatttttctcatttctgtattcaaatccataacccatttgtaggtatagatatgatcatttcacagggaaaggatctctgccttctgcagagagaaccccatttctgttgacagagttttggcccataggatgctccagagcagcatctcagtgaagcacatgtcaaacttagctggcatcactgtggagtgtactgttttggtaactctccccatcaacggagatctcaccaaaggacatgtcctcctacctctgtcttgtccagggaaaacagagttctgacaaagtcagtacccaagtcctgcagaagtcaagggatgtcaaggcccggctggaagaggctttgctccgtggggaaggggccagaggggagatgatgcgccgccgggctccaggtgtgttggactggcccttccctgctctctgtcaagcagtttttcactgtttgtggggaggaatgtcctcccaacatgattagacaccattactttcttgagatatttacggtagtgtcagagacagcggattctgggagtctgtgtgtgacatttgtgttagccctgtgcctgtgagggaaagcgctgttctacaattgtaggaaccctgaaaacagcaccaaatgacatcttttaattaaaactcgttgatggtaaaaggtcacctctaagaatgtcagtcatggatgaggtggaaggtgtttccctcaaggctgaggcctttctatgtgacctttggctagtctatccggagcatggtcaagaaactgaacagttctggccccaagatcatcttctcgatcattcagggcactattagaatggaaccagttccctgaaatggcttcagagtgtcccagtcattcaaggattccaccacaggaggaatgatctcaaaaaggctgagcttgaatagaatgaaatccccaggtaccctcagtcttattcaccatgctcaaagtaaaacagagtgacagcttattgtattcgaagggacacagtggcagggaacttggagggagctcatagttttcagtggtggtcaggcaccctcatttgacacccatactttcatacccaataattcagtaagcccccagagtttcacaggaatcctctgctcatgagaaatgtctctctgacactcagaaaggcagaggttcttcttatattctagtctatcaatcaaagagcgggccaacttggacataggtgtggcgactttgtctcctaccagcaacctgcatggactctaattagcccgagaaatggtgctgaggcttctcagttgagcttgttatgaacttctggttatcttggagggtttcatgctaatcaaattcctatcatgcatttcttaactcctagggaacgaccgatttccaggcctaaatgaaaatttgagatggaagaaagagcagacacattggcggcaagctaatgagaagctagataagtgagtcactcggcaactttctgctacttttacctaaagtccaaaactatttttcccaggctgcttgtattactgaaacaactgcatccttccaagggttagaaaatgaaacatcattatctgtgtaaatacaattcatccagggacccaggataatcaaaggtatagggagttgtggtttccagctcttaaaaatttgtcacattgataagcatgtaaagaaaactaatatttctttagcaacctcagatggcttaataaaagcagctgattttgcagggagggtagcagggaaatagagaaagcaggacacggtgcctaggaccgtatactttcaaatcgatatttcctttctggaaatatgtacaagatatacattcagatatatttatgtcagtgctacttaaagttgttttttaaaattgaaaacattctaaatgctccagaatagaaaaatatatttaaaagttggattgccatcaaaatgttttaaaatcatcttaatgacatggggaaatgcttatgacataatgttaaatgaacaaaggcagggtagacacttggttttctagtagtgtgtggctcacgcctgtaatcccagcactttgggaggctgaggccggtggaacacctgaggtcagtagttcgagactagcctggccaacatggtgaaaccccgtctctacaaaaaatagaaaaattagctgggcatgatggcagatgcctgtaatcccagctactcaggaggctgaggaggaagagtcgcttgaacccgggaggcagaggttgcagtgagccaagatcgtgccattgcactccagcctgggtgacagagcaagactccatctcaaaaaaaaaaaaaaaaaaagaacctcaaatctctgatgacatatagtcaatgtattttttaaaggctagaaggaaatttaccaaaatattaattgcggttttctttgggtgctgggaatatcggtaattgatgttttctcttttatactttgctatgtttcctacagtagatgtgtattataatatatattgttaccagaaaaaaaattataaagaaatgaaagaataaaaaaacctgtttggatcaaaatctatgctatagatgaatagatatattgacgtgtattgctatatatgcaacaatttagacatatgaaagctaaaagtatatatgtttgactagatagcacatgtttccgataccgtttagccacaggtagcctaatgagtcccagggtttgctgagcaaaatgtcgtagagctaaaatcacccctcacacacagttgacaaggtaggataccccatgggtgatgaagcacccatcaaagggggtatggggcagacttgattagcagtgctgttttgtaaataaatgtgagttaatatctttattgttaccacaagaatgaatcattctggttaacttatgggactttggggagtcacatttattttaaaacattaaagaaataagtatatttttattatagatgtgacttggaaacccagttgttggtatcatgcctatttgctttgggtatgttattcttgcactaaattccctggactgatttataaaatacttggatcggagagtccatacattctacttcgggcaatgaacaacaactacaaaatatgcatgccgtgggtgctacagaattgcttaggtggtttagctcatctactctactagattaaaagaagacccctaagtaggcctgttttgcctgggctgtgtaaactggtgttttggaaaacctttcccttttgcttgcaggagcaacacaatattggtccttaccacgcatggcctaccggtttgctctaggttagttctcagccctgcgctacctggtgggctgctggttgtcagagctaatgattcacatctacaaattctcaggggctttgtgctttttttttttttttaaaagggaaaccatagtaaaattataactgttcaacctacctacctggaaaatttataattataataatggtgtctttcaccctctttctgatcatttttcgattattttggctctgtttcttttagagcaatgatcttcaacttaggctgcacattagaatcacctggggagctttaaaacctgtcagtgcccagctgcaccctagactacttcaattggaaactccagcaggacccagaaatcagtatttggtaaaacttcccaggtgattctattgccaccaaatccattgttttaaaggaatagatggtaagcttttcttttcttttttttttcttttctttttttgagacaaggtctcactctgtcacccaggctggaatacagtggcacaatcacagctcactgcagccttaccctcctggcctcaaacaatcctcccacctcagcctcccaagtagatgggactacaggtgtgtaccaccacaactgcttactttttgtattttttgtagagacagggtttcaccatgttgcccaggctggtctaaaactcctgggctcaagtgatccacctgttttaacctcccaaagtggtgggattacaggcatgagccactgcgcctggtcagatggtaaagcttttaaaaaaccagattagtgttagtgatggttgcacaatatgaatgtacttaacactactgaactgtatacttacaaatggttaagatggtaaatttttatgttaggtgtactttatcacaatacaaaaatttgggaaaaaacagattaggacactctagatttgtgctgtccaatacagtagccattagccacatgtgactatcaaatgcttgaaatatggctagttcaaattgagataataaatcaagataagtgaaaaatacgcaccagattttgaaggcttattgtgaataaaagaataaaatatttcactagtaatttttatattgcttacatggagacagtattttttatcttttaggataaacaaaatatattaaaaataatttcactttttctttacttttttaatgtggttaccacaatatataaaatgacatatgtggcccccattgtttctactagacagcattgctctaaatttaaaactaaactagcagtcaattaattaaaaaggatgataaggggccgggcacagtggctcacacctgtaatcccagcactttgggaggccgaggtaagtggatcacgaggtcaggagatcgagaccatcctggctaacgcggcgaaaccccgtctctactaaaaatacaaaaaagtagccgggcgcggtggcgggcgcctgtagtcccagctactcgggaggctgaagcaggagaatggcgtgaacccgggaagtggagcttgcggtgagccaagattgcgccactgcactctgcactccagcctgggcgacagagggagactccgtctcaaaaaaaaaaaaaaaaaaaaggatgatgaggttaaaatggtaaatttgatgttatgtgtactttatcacgatataaaaatttgatggctcatgcctgtggtcccagatactcaggaggctaaggcagagcatcacttgagcccaggagttcgaggcttcagtgagctatgatagtgccactgcactctagcctgggtgatagagcaagaccctgtctctaaggaaaaaaaaaaaaaaaaacttttagatttcatttattttacacatatattatcacttggaaaatgagaaaaagtgtcaagtggcttgggaccagagagcctatcctaaacatgaaaacaagtaaaacacacagaagtacttattttttgagtcctcagtggtatgtaagcagctgcagtgcccccattattaggttaatgggacgcaagaacaggtaagtggtaaccctggcccaggacatatgagctgatataatgataccccaaccccatggtaacatcttggctactgaggcatcttggtaaagtcaattcttcatacctccctttccttgcaactagatttggatgatgatacaaaatatccctttacagcttcacttagatttcataagaatggatgggctagcaaaaaaaaccattctgattccttaaagtgaaacctaatagaggagcgagcaccaggcaatttcccattccctagtgggcaatgaccagtaatgtccggcaggatattagatcacctgccctacaggaatacagtcttgtttcccaatggaaaaggacgaaagaccccacgcacttggctgagcaacctcaaggtgatctttgggaagttaagaggctgactctcccctgacttggctctgaagctccaccctttcctaacccagccgcatcactgccaagttcacatcacatccagtctcactctctctcgcatgttgcaggggcttccccttactcagatctagcaatggttttcatgcgtgaaatacagccatggccctgaggctttaggcaacaatctgagaggggagcttaattgctagtagcaactaataactgcttctctacccatagtgttatttttataattgtcctcatcattattaataatagtggggatgaggatgaccaggaaaccttacctagacagttgtttcgacaagacatgaatcacagaaggcacctgcactgtagttactcagggccagttgctctgttttcatttcaaggttgactattttggagatttctttacaccttggtgtatagattgccatcatgggaacctggccaggtttgacatgcgctttaatttgacctcttgttgtttcctagaacaaaggccgagttagatcaagaagccttgatcagtggcaatctggctacagaagcacatttaatcatcctggatatgcaggaaaacattatccaggtgaggaaaacaaacacccaatctgatttgttggccatgaatatgtttactagaataaggacttctttatgcaaaattgtgaaagacataaatgtgatcccatagtaccttttttaaaaaaatgaagttgagaagtttactatttacaacagtgtctaccttataaattccagagataccaaacattcttctggcttctttgacttagggcttacttggagagggttaggtgtttggccagctgaccctcttggttaaatctgtgtgagtatgtaccaagtttataatatggatgttgggtttatcgtttagtatctagaacagtagtggtaagtagaattttttctgatgggtcaactccagttgaatgatggtcactgtctgatatgggagctatgattatgactaggctaggtaaaaagagtgctaaatttgacaaatgatgtcttctttggacttaaatttgttaaggaaagtcatttgtaccatgaatttgccatccctgctgtagaaaaatatagctttgtgaactttgtaccatactaattttatcttctatgtgattatttccacaaattcccaagctgtctaggtaataatgagtttttaattaccctgaaaaatgagttcttacatgtttccattgagaagtcattcattagagtaggtccaggattgcttttagggctagaagaaatatcgttgaaacacagtgaaatcttaattctctaacttttgaattgtctaaaatcaaagtaatcatcatacaaaaataaacacaaaaagtatgtgatatttttgttgactttaatatctttgataacttaaatgcttggtatcacatttaccttatctttatatagcacaatattaggtgccaaatatctatactagcccccaaatatatttgcagttttcaaagaaagctgaaaccttttgttattatccttggtgttgttagtccttctgtaggtgataaacaagcttctatttagaaacattgctgccaccaagcagcccctgttgtactgggaagcccacaattgtgttttgcatcccataaggaaagctatgtcttgtatacaaagaaagaactttccaaaagatgtgacccaggatgagggagatgggccttataccttcatttaggaacccagaattaggtataaatcccaaactcattggaagcattgaaataaagccatttggaaataggtcttcagttcccatggttaatggatgatacccatggtggctcaccaaactcttaagactcaccactggacatggaacatcagcattactgagctaattgtcaggaacatccagttcattggcacagtgcagggattcaatgatgctgttcttccattcccccaggcgagctcggctctggactgtaaagacagcctgctgggaggtgttctgagggtgctggtgaattctctgaactgtgatcagagtaccacctacctgactcactgctttgcaacactccgtgctctcatcgccaaggtaaacttgggatgcttgttttcttcctcttaattaagagtaagattctcatctagcttcatacttctctcttcaggtggaccaaaagtcacagagcatattaagtggcatcacagtaaaggtcttaagtcttcctaggaagaaagcagatgccctgattctgtgggaagccaccatggagaggaaaagcagtggctcccatatttgaagtgtggacctaactctagaagtttaaaatggccattcgctgaaggtctatgacatgagaacagagatcaactgagtgacttagcaatttcactctttctctgtaatacctctgctgagtgagattaaatcctctatgtgacgcccattagtcttacaaaatgtcatgccataaaatgccaggaaggtcagaaatgaatttctcacggcctgaggaatgaggattatcctggggtaacatgcagattatttttccctttatttatttatttatttatttttgagactgagtctcgctctatcgcccaggctggagtgcagtggtaccatctcagctcactgcagcctctgcgccctgggctcaagcgattctcatgcctcagcctcctgagtattgggattataggcgtgtgccaccgcacccagctaatttttgtattattagtagagacagggtttcaccatgttggccaggctggtcttgaactcctgacctcaagtgatccacctgcctcagcctcccaaagcactgggattacaggcgtgagcccccgttcctggcctatttttccctttattgaagatctcaattggtgccttctacatggggtcttttaaatttaaaaagtaaaattcttctgctcatccttctcaggaccattttctctttcttcatcaccagtaatttcccaggaacccaagaaactcaggtttccttccatcatagttgtgatttcaccagtgaatgcgacctggctcacagtgcagttgataacacagctctgacccttttagctggacagttcattattaaatctcaagtctactccattgcttaaatccatcttctgattcacatagctcattatctttatggaataatgcattaactcttctaggctttttgcttgtccaaatggacatttgcatatttcaacggtccagaaagtgtatcaaactgccaagtgatgcctaatggccctttatgtctctcctagtttggagacttactctttgaagaggaggtggaacagtgtttcgacctatgtcaccaagtcctgcaccactgcagcagcagcatggatgtcacccggagccaagcctgtgccaccctttacctcctcatgaggttcagttttggagccaccagtgtaagagttcaaaccagctgagtgacctggaatcagtagagaaaaattgatgtaaagcatcagctgcgaaaaaaaataaggaaattttgcagtattgcagtttacttctgtcctgtgagaaagaaacaattgagtatgtagatagatagcagcttccattttaatttgcatctaaaagtgaattcatcagataaatgcagtggtctctatcagtgtgtttctaaaatagacagccaggggccaggaacgatggctttcacctataatcccagcactttgggaggccgaggtgagtggatcatttgaagtcaggagttcaagactagcctggccagcatggtgaaatcctgtctctactataaatacaaaaatagccagatgtgttggcgcatgcctgtaatccaagctacttgggaggctgaggcaggagaattgcttgaacctgggaggcagatattgcagtgagccgagattgccccatttcactccagcctggacaacagagtgagacttcatttcaaaaaataataataataaaataaaataaccaggtgcagtggctcatgtctgtaatcctagcacttcgggaggccaaggcaggcagatcagatgaggccaggagtccaagactagcctggccaacatggtgaaacccccgtctctacaatacaaaaaattagccgggtgtggtggcacacacgcccgtaatcttagctactggggaggctgaggcacgagaatcgcttgaacccaggaggcagaggttgtagtgagccaagattgtgccactgtattccagcctgagaccctgtctcaaaaaaaaaaaaagaaagaaagaaatggaagagtattttagattaaaagttatcatctgtgggggaaaaaatacaatagacaggttagaattcagaagagtgtttcctgtttctaaattctgactagctagtgccagaatgacctgtggaagaggattttaaatgatcggtgtcatctaacctgagttttattttaatattttatttatttatttattgagacagtgtcttgctctgtcacccaggctggagtgtagtggcactatcagagctcactgcagccttcaactcctgggctcaaatgatcctcctacttcagcctcccatgtagtaactgggattacaggcacgagccaccttacccagctaattttttttgcatttttgttgagacagggtcttgctgcatgcccaggctggtctagaacacctgagctcaagtgatcttccctcctcagccccccaaagtactgagattataggcatgagccatcctgcctagccaagacttgagttttattcaaagctacgaagactttggagttcagctttattatagaacagtcaagtttgctttagtttgtctagattttgataccttctttggaatttccatttgtggccatgttaataagtatgctcaagtgatatataaagataaattggcccatggaaaaaagtcagcctcctccaaatgtattagggatgattatttaaaagacattcctcaggggaccttgaggtagccatgtttttccatgggcctgtaaagaaagaagaaacaaaaccttgttgcttacccggagttcaaaatctcagaaatgctggccacagaagtcccctgatttatttatttagagacagggtctcgctctgtcaccgtggctggagtgcagtggcgagatcttggcccactgcaacctctgcctaccaggtttaagcaattctcctgcctcagcctctcgagtagctggaattacaggtgtccaccaccatgcccagctaatttttgtatttttagtagaggcggggttttgctgtgttgcccaggctgatcttgaactcctgagctcaagtgatccaccctccttggcctcccaaagtgctgggaggctgagccagaagtccctttcttttaataaagtttaaataaagtcccaagaagaaactcttggcacaaaaggatatactgtattcttggacccaactttataagaatcttccagcttgcagcacaaaggcagcccagtcctcaatgaaaatttaaagggagcctgacagatttatgtgagagcaatgtccatttaaaccatttaaacaacaatatgaatgttgtgcaaagtgtagctcccatttcattgagagaagaggaaataattaagacggggcaaaggaaacactgaggagttgtttgtgtctggccatgctgctttcagttatctactgctaagtgtgtcttatttacttcatcttttttttttttttcactgatgcagaattttgcaagagtaaagatgcaagtaaccatgtccctggcatctttggtgggaagagcaccagactttaatgaagagcacctgagaagatccttgaggacaattttggcctattcagaagaggacacagccatgcagatgactccttttcccacccaggtacaccgaagcacataccttgtctcatgcatgagtttgggatctgccaactattgtgtatgtatgtatgtacatatatacacaatttatatataaatatataacatttgcaagtatttattgtccaatatgcatgtgctctcagcactctgagaggttttaaaaagaaatacatccatcactgtccccagtctcaatatgctaacagtctatttggagtgctcagtctcaaaacaattaggaggcagtacaagacaagtgatacataagtgcaaactgtgtggtaaggagctaaatgctatggaaggttagaggaagagaggtcgtgatcaataaacaatctggtggccaggaaagcctgcagggagggatgacactaaaggctggggtaggattccgctaggcaggggaaaagtgagggggaaattgtgagtagttgaaacaatgaattgtttgtatctgtagggatggtaaagggaccagcttgtctggtgaggggtaaggaagggccgagtttgagagagcttgtaaacaaggttgtcctaaggaaatgtgtaaggacagtcatctcttccatgtccattacgatgaccgtggaactctagcctgtcccatttgtcttttaactccagctcctagcctgctctatggtagggtcttaattaagtgagaatgaatgaatgaatgttttcttttattcccttagtctgagaaccctatttccggagtctgttttgccctctcgggcaatgttgcatcctcattctcagaatctttttcctctcctctacatcaaatcgttcctctctcatttcatcttgaccatactcctttagttccatcatttatatagaggtattcaccaacaagaccaatcaaactatgggcagtttaataaaggtcttcagtgccttcacccaatgaaatgactctagtggtagaaattttaggagccctggcaagctggcagaggggaacggggataagacaacattctgtggctgagttacctgccagggtctctagatcaagccatagtctctccctgtttttgtactgcaggctcccctggacctccactgttggttttataattaagaataaatgattacaagaggttctaaaatctctgaagccctgggaagatccaggaggcttctgagacatggaactcaagctgaggtcctaagctgcttcctacttggtataaaaatccctgatattccagagtagagtttagaacttttcaggttacaaataactgaaactggttcaaactaatttaaacaaaaatgttggagatagagatagtatgaggattcaggcagatttctggatctcaagggccaacacacatccaggtctcataaactcctgggctggcgaagatgaaaactacagagtcaggtctagatgactccgccatccctagtctctgctgccctctgatccaacccttcccatggcttccccttgcatttcaatgtaatcctaactcttcacctgggactacaaagctaagattattttgaggcttacactttttgcaggtggaggaacttctctgtaatctgaatagcatcttatatgacacagtgaaaatgagggaatttcaggaagatcctgagatgcttatggatctcatgtacaggtaagctttcctgacacactcaagggacaccatttgggggtcgaggatttgtcactgtggagttcttactaatgtaatgatcacagctaacatggatatagtgatttggatgatagccaaataatatatagaaattaaacattcagagtaggttaattcatatgtaagttttcagaaggatctccctaatttaaagtgaggcataataatgttattaaatataataacattattaaatataataacactatcttctacttaccacagaatcagagaaagaataattaactgttataggaattattttccatatgcttttgttccaattatattcagacatacatatatagttttactttagaaatcattttttacgcgtagtttaaaagttggtcttccagtccttgttcaggagaaattacttacagaggcaaaattgttctgatgcaacatcatacaaagggcagtacttttgtcttctgttttattttgagagaaaggaaagaaaaggcagaaatttgcctgagagccattaaaatagacatcatgttatcaggtattttttccccataaggcttttactaagtactatttcttggaggtcagcacagcttaaacatggaataaaaatagttggactaataaatgttttcttctgtctcgttttctggaaatatagggcaaaatctcaggtggaggggtacagggaactcttggggagaaaaaaagaaaaggtcacacaaagtagaagaacagtgtcattaacccactgtcctcaaaactacttctcactcaatctgtcttcagaattgccaagagttaccaggcatctcctgatctgcggctgacctggctccagaacatggcagagaaacacaccaagaagaagtgctacacggaggctgccatgtgcctggtgcacgccgctgcgttagtggctgagtatctgagcatgctggaggaccacagctacctgcccgtgggcagtgtcagcttccaggtagggtgtgtgcagcttttcccttagagcagtggttctcaactggggcgattttgtcccccagccccagggacatttggcaatgtctagatacatttttggttatcacaactgggatgggtgagtaggtgctactggcatctgactggtagaagccaggatgctgtgaaacattctgcaataggagagctcccctgacaaagaattgtctggccccaaatgtctgtagtgctaaggttgaaaaattccaagttcatacattacatttgcttcttctaattgctttcccatcgtcgttgggttttttttaaattactgtttacaataatggcacctagccattattaatagcactttaggagacatttgcaaacactttcacatgcatggcttcatttgaacctccccgtaaagctgtgaggcaggtaggtagggaaggcggttattattcccacttcgcggatgagagaactgagagagcaagttttctaaggtcacttaaactctttttcaaagacttgtagttgacacagtatactgacattgtgaaagtttggaaaacattggataaatgattttcctcctggcccattcatttgattccactcttcaactttataggggcccactctccaatccaaaaatcaagaaagaatcaaattgacctgagaagggagacaaaaggctgaatcagtaccttcttaggataagctgaaaattacccacatttggcaaagggaaattgtctgccagacctaaaagctggctcggatggggatgctcagtggccacttaaagtgttcttactgaatagtttaatagtctttagagagagagaaaataaaaaagcacaatgttgggtactttttttgtaagagacatagtttgtagagatgaccatccctgaaaccatgaacaatatagctacagtaatagagtgtttttcaagccagactcacgaagtcatttacaagggtttgtattattcttgtttgaatttacatggctgattttatgaaaagctttgttcttgttattgttcttcaacacaattttgtgatgttgtatgaaccagaaagaaagaacaattcaaagtagcttccccaggcttagagaataagtcactgaaactatgctggtgcagccaagagcttctggttttccagaacacagcaaagctgggtattgcctcctatgaataactcctcctttcttatggtcctcaagaacaaaaatagtcattctgtgatttcatgcttggcaaatgaattttcttcttaattcagaaatgtttgttataaaagctgataattaaatctcatccaaaagcataaaaataacacctgatttcaaatcacatagaagtgtacaagaaagttataaaagttattttagatgtatttgcttcttttctcaaatttattttgaccatgtgatactatcaaaaataaatattatagtactactctttcaattcccaggaaattgtaaggtttagcacttcatattgtttcatttactaaattattttatacttcttttattccttttcccatgactatattttattttatatttatcacttaaatatcaattgcatttcattattgacttttatatttagtaagccttactgttctaattttacctagaattcagttgatttgctaataatgacatgccaaagtgaatcattattacacaatcaacagaaatattccacattattccgacatgggggcatacagctctatctgttcacatatatttatccattgattccttcttttagagaatatttattgaatacttattctgtcctcatgaacgttacattctaaccagagagacgtaatataactaattattccaatctttgttcagttataattatgagaaatactgttataaagaggcacaagatattgtgagcatttatggtccaggccctgtgggtcagggaagggtgaagaaggtgaaaaggaaggcagaagaaactgaagtgtgagggcttcttgatgtagaggaggcaatgagttaggtgttgtcagctacagaagagaagccaaattatattaatgtgtatgagtgaattcttacttctctcaaatgggacataccaaatcaatttggaaatgtagctggcaagtgaaaggacacccaacccagactgacagaaggtaaaaatggaatttatcagcccgtctgaggaatgtgagcctggagtagcacctgccatactggacctaggggcccaaacaatgtcagcagagctcactgtcatcaccacttcccatctctgccatctgttgtgtcagcttcattcttcacaggcttcccacaccacagtttaggtttacatctctaggttcaagtctaggagagaagagagatgcctcctttctagcagttgcagagaaagcctcagtgcatcttactgatcctgtctgaacatctgatcctgtgctcatccctgaaccagccatactggccagagaaatggagtgctctgatttactgaccccgggtcatgggtccacacctggaattatgggtgatttcttcccctaaatcaggatgccttactttatagaaggaggaaagaattctagacagcattaacaacagatgtccagtgttgattttgcaaatgctctgtgctttaattttcaaccttgttctgctccaatgaaatagagcttttggaaaagatttataaactagagataaataaatatgtgcaaggaaaataactttgaggtcactgaattccaggaaactgagatcactgaaattctgtgtcccagagtgcaatatttatttcacaactgtagatacggacacattcttagatactgctgttacttgtacctccctgatcctgaagccaagaaagtctgcagaatccttttcctctgactacagctaatgaggctacatagcttcaaatctgttcctctaatgtggaaaattgcatacattctaatagtattagtatcttgggttattaaatgctttcaactgaatttcttggatcttctgttgtcacagaaacatcataatacatagggcaggtttggaagaaagactggccacaaaggctttgagagcctcctcctatattcctaaaactacgttacagtattgcatgtgaagagatagggctatctatgacaactatgtcctgactgattgctaaggttgattcacatgatcttgctaaccaggccagaaggcagacagcttttagttcacaagccaactctgatcagttagtagtggctgactggagaactatgcttaagaatttcgagactatgtccaagctctggggaaaaagtgctacagttgattagttatgcctgccatgattacagcaataggaaggagtggcatgtgtgccacctgtttgtaatccctaaactgggaaggtttcccatttcttctgtttttcatatgcatttcttccatagctgtgagctaggaagaaaatgattcttgacctgtcacatattcactgccagggccagtgctagggtgaagaggcactcaccctcagggtcgagcgggtacaagatcagtacttccatggccctaaaagcgagtacctctctaaattttgtcttgggtttctcatttggttcaccccaaccatggtctctgcatgctctgctagaggctctaaacgcaatagtttatgtaaaggaaacaaatgcatggaaacaaaatgttcaggaagaacaaaaacacacacacagtaactgctgcaatgccatgaaaacttccttaatgaagacagcctcgcttgctgttgtcgtatgtcatggctgtttatctgagtcaactccagagtagcaacatacttcagaaaaacaccactgtaagtcagaggtccactcggtgaaacagggagcctagttaatgttaattgggtctttgccttttgaaaaccaggacaccagccctatgtcccttagggttgtttcactaaagtaactcagctgttgtgacattgaggtaagtgtcctttatacaaaatctcctaatggttaaaaagaaaaacgtgaggtttgaagaccagttgctcagtgcgcctcttctaaatgaatggcagacagatactctcggggtagaattacagacctagtttagtcacggtcttggtaaggatctgcacaccagcttcctcgtttccccattcggggttcctgtggtctcttactagtctggtcgccctgttctccaggcttatactgtggtctctttcagaatatttcttccaatgtgctggaggagtctgtggtctctgaggacaccctgtcacctgacgaggatggggtgtgcgcaggccagtacttcaccgagagtggcctggtaggcctcctggagcaggccgcggagctcttcagcacggtcagtgcccagagggcatcccggggcctggcctcccatactccagctggacttggggtgctgggaacacctggtcttaatggcccagtcagccccacttcccgaggacacgtgccagggtgtgcggggcaggggatgggcccggggaggactttgatgtatgcaaattgcatgagcttcccaagggagctgagataacctttcatcacagtgccgatctgagcttcactgtatgctcattggttgggcagcagtttcacagtattatttctatttaataggggtggaactaagccacagagaggtgaaatggcctgcccagggttacacaataaatgatgaggcatgttttcactccctcgtttttcctctcagagagaaaaaaattagggaggaaccactgggaggagagaggaggaatacacagacagtgtcttccctcctagccactgtgcagtctgaaggaccatcacagaccaggaccagcttacagaaatgtgggcacagaaaccactgagactcctctggttaacgtaatctggatctaaacactcctagtatatatactagaaaaatatatagagagatgaagtcattgagattcagggcaaagaggaaacactcttgtctattttcttttctttttttgagacagagtctagctctgtcgcccaggctggaatgcagtggtgcaatcatggctcactgcagcctctacctccagggttcaagcaactctcctgcctcagcctcatgagtagctgggattacaggtgtgcaccaccacactcggccaattttttgtatttttagaggagacaggatttcaccctgttggccaggctggtctcaaactcctggcctcaagtgatctgcccatcttggcctcccaaagtgctggaactacaggtgtgagccaccacgcccaacttgttttcattttaataatctccctcctcctttacattttaagccaagaaagtattcagtactttactatatttagctgacccaattttgttttcatctatactatactcatccttattttccagtttttatttccaagtttcctctctacaattttatttattttaattattgttttaactgtcttctctctattcttgctttccttttcaagattcagaaaatgtctaatatactctcatttttcctcaaactcaacaaaatgaattagaatcctactaactctttggaggcatacatttagcatctggctagaggaggacctctgatgaaatttaaatatactaaaactgcctttctgaattgctgttagtccctgctaccaaacttctctcctgttttttcttttcgttttgttttgtttttgtttttgtttttgaggcagcgtcttgccttgtcacccaggctggagtgcagtgatgcagccttggctcactacagccttgacctcctgggctcagcctcccacctcaaccgcccaagtagctgaggctacaggagcatgctaccacacctggctgattttttaatttttttgcagagatggggtctccctatggtgtctaggatgatctgaacttctgggttcaagtgatcctcctgcctcagcctcccaaagtgctgggattacaggcatgagccactgcactcagccagtatttttttttcccccgaaagctcttctccttacttatcgccatacaggactacttagcgaggtgtctagttcagtttgaaggctaccactgtcccaaaagtgctcagataccccttcttgccctgtgaaatactgtgatacaacaataaattcactctccagcacattgtttggacaatgacctctggttgctcttcttaagtttccagtggattaaattctctctgatgctcttctcctctttccaagggaggcttatatgagacagttaatgaggtctacaagctggtcatccccatcctagaagcgcatcgagaattccggaagctgacactcactcacagcaagctgcagagagccttcgacagcatcgttaacaaggtagccggggagcctggctggcaggtcttgttacctggtggcaggcgaccctgtcctacagatgcttagccatccttcctctccagggagtgatttatctttagcacattgcttttgctctcacctgtcaaacagaaaagggctgaaattcttctaacagaggaccaaaattccatatgtgaaaacatacagcttaaattactttataaccaggaaatgtgagaaatttttaagtgtaattaaaagaagtcccagaaatctttcatgggattccttttgttgttatttctgaagtttattccataagcattaaatttttttaaggagtaatttctgtttacatcagccataggagtaaaatgctttgttaacacaatgagagacccctgccctttgcaactcagtggctcctcaggatgacataactaaggagagctttttatattttgttcctcaggatcataagagaatgtttggaacctacttccgagttggtttctttggatccaaatttggggatttggatgaacaggagtttgtctacaaagagcctgcaattaccaagcttcctgagatctcacatagactagaggtaagaaaagtgattctgtgcgcctgacctggtacactttacaaaaacaagttagagtgggtcatcaccaaaaataaacaaataaagagttatggattcatcattgatctctacataaagttttcccctttgcatttataaaaggcaaagtagaaaggtattaggtgagatcatgaggtgatgtaatattttgatagtttttccctaatactctgtgtatgcttttcacagtttggaattttatatggtgaatatttattttgaagtctgtgcaaaattcaatcaaggtcatgtgctttcttatcaccctttccaaatattagtagtttatactagtagatagagagtagtagagtttttcaacatgaagtttagcatcttgactttgaagtaatctagccaaatgactgaatcacccctagataatggtgaggccatcctttaggtatcactggatggcacctggggtccttctgatgtggagctactcagctgtggccagcccggctccaacctgccagtgagtgacatttggtccataatacaacagaaaagtgtagcatgttgttagaagcaaagctgaaagcatggagaaaaagagaaacagcctagagaaaggtcaggacaaaagaaacacaggttataagggccaaacactaagaactcagtcaaaggtgcctccccgatgggatttggatgaacaggaatttgtttacaaagagcctgcaattaccaagcaggactggggtcctttgaactgctcacaattaaccaaagattcactccttaggctttcattgctttgaatttgtgccctcctatgagtgtaaaacttaaaacatttgtgttgcctaatggcttcgtacactctccatccatgccaaaaaagacaagagggtttatccttacttgactcaaagaagccattgcccagggtggctgggtgagttgccccaaaattgtttagcacatgagaaaaagagctagcaattgaccccagtccacttggttccctatattgtttcccctacttagaattagaggtatatattttatcttcttgtgcactgtgatttgccacaatatgggaaggctggtgacttccaagttcccagggtacagaaggcgagaagtaaagagtgtgataccccaggagatacctcagcaaatataatgatgttagctgaattagaggccaagcatacatcttatagggaagcatataccagttgacagtgctatttttatttttgtcttaggaaatgctgaactttgctcattagctcagaggaactctcaataatcagtgaacatcattctaccttgcacttgctccaaacttatttcacttccaagaagacaaagagttgcattatgttaaaataacctttataaactgttggttcttcttacctaggcattttatggtcaatgttttggtgcagaatttgtggaagtgattaaagactccactcctgtggacaaaaccaagttggatcctaacaaggtatacaaaaatttacaaaaactaaccatcaagctctaaatcccttcgttctctacccaagaatacctaatgatctcatctatctggactctccaagtcacttaaatgcagtcaaaccttttcgtctagagttcaactactaattggtcagatcttaaagaaaatatagtcaaaggcaggaatcataataggagctaccacttattaagcaccaactgtgtacctggaactgcattaggccctctacatacatcattttatttcatcctgcaacgacccctggaagtagattttgtcattcctattttagagatgagaaaactgagacatggaagagtcaagcaagtttcaaggtcatgcaagcagcagagccagtactcagacttgaggtctgttgcttctgaacccctactcttcagcactgctctttactgcctttttataaaacctttaaactctccatttcaaactcgacaacacttagtggcttccttctttaggctgcaagtattccttccatccaagtccgggatcactgtgctgttgggggaatggtaaaaacggcttgggtttgggtttcctcactttcacaagagggtatgttccatttcaccccaaaatgggtgtacagttctgatgctaacacgtggaggtggtatcagctcccacagggtaaaggctcagtcctcctcaagactgccctgacttcagatgccagcttcaagagggacccccaggccagccacgcttctgatcagccagctacaaatttgggagtttctataacctgttagcttgaaaataggagaaaacaaagcaaataataataataataataataataataatttgggagtttctatgatacctgttagattaaataattcactacaatgactcacagaattccaaaaagtactctggttactatcagagtattatgataaagggtgaacatctttttgtgcctttatttatggcttcctggctcatcagtgtgttctccaaccaggaagctccgccaagtctcagtgtccagagattttgttggggtttcattatgtaggcaaattgaatacagtctccagcccctctcctgtctccagaggtcatccagttcctaccctgtaatcacagaattggtctttttggtggccacttggcatcctgaagctatccaggggcccagcatgagtcacctcattagcatcacaaagacacccatcactgaggaaattctaagtgtttctaaagctctgtgctaggaaatggagacaaagaccagacatattctttattataccacaagctgatgctgcccactcagcccaactcacatgtccatgaatgagctttctaagttactggaaatagtgcaagtgcaaggtatcattaagggccctgggacagaggaccattcaccatctagcaaacctataaaatgaaaggtccaaactcccagttccatcttccaggatatgaagaagataatggaagaggggaagaattggccaaattgaagagtttgtttttctacatttttcagaatgctttctcacttaagacacattccctagcctcggcttgaaagcagtggctgtggtaagagtttaactaatcttcagacacacatgtctgggagatggagttggccgtgtgcccacagtgatctgtacatagcacaagctgtgtaaaatgtgacctccctcagccaaggtgcccttttcccctcttttaaaattcccagggtaggttgtgagagtttggaatgagagtctgaacccagagttacaaccagatttcattatactaagtcgtgatttacagtctgaggtcagtgaccccactcatccctttcagtgggtgagtgtcccagcatctgaactcatggtcactttttttcctaagagattgtcgtctttaatgagtacttattcgctctgtgtttgagggtggaggtgatgtgagtgtgtgtttaaatgaggcctaggcagtaaaattcagttttggtgtttagttctatgagttttgacaaacacatgtgactaccttcataaccaagatatagaacagatccaccactccaaaatacttcccgtgcccattggtagtccatgttgcaatagttccttcctttccgttgctgagtagtattctgttgtgtgactacctcaccatttgcttgttaattccccactggagtgacatttgggttgtttctagtctttgttatgaataaagttgctggagacatttgtgtacaggtttttgtatggacataagctttcatttctctcctgtacacacataggagtggggttgctgggtccaatggtagtgcagtttaactgcataagagaccgccagcttcttctgcaaagtagctgtgcattttgcattcccaccctctgtgtatgacagctctagctgatctccatccttgccagcacttgatattgttagttttctttagttcggccattcatgcttcctcataactgtgaggtagtcattgtcattctgtaaaggaaagtttgtctctttggaatagcagtttgcaaactctcataccaaggcttccactgtggatcagtttgctctgctaggaaggtgcggccggtggccctcactctccccacaggcacattcccctctccctccttgcagccccttctgtccttgggggtggagaggaggaacttctgctggccacattctcccctgcatctgtagcttttctgcactgggcagggcggtgccggcacgccgtgttcctgcatgcccctccattgcgtcagggatggccgtttgcagaatagctcatcttctccctccgtgccttttcccccttaggcctacatacagatcacttttgtggagccctactttgatgagtatgagatgaaagacagggtcacatactttgagaagaatttcaacctccggaggttcatgtacaccaccccgttcaccctggaggggcggcctcggggagagctgcatgagcagtacagaaggaacacagtcctgaccactatgcacgccttcccctacatcaagaccaggatcagcgtcatccagaaggaggaggtaatgcacccaagggattggccaccactggatgagtgggctgggtggcctcccaggaggacccacaaacctctttcacagtggattggactgaaaacaaggagggatgcacttgaaatatgattatatggttgtcctttcactctcatagtgccagaaaatcccatttaggcagctacatattttatagcactattgtatattaaatatttaatattttaaagttatatctttagtataagtgtgtttatgtatttaattataatatttaatatatatttcaattataaacttgtacaacagatatatttaccttttaaatattttatataaaatttttctatatttcaaagcttagaggtgattcaagcatagtcgtgctgttaattattggagacgggacctgcacgtgggcagccccagtgaggcggtggtgtgctgtgggaaagggccgtgtaaggtagacaagttcactgactagcttctagtcctagcttcctcctgtgattttaaacaagctacgtaccttcagtttcttcatctatgcattagcaggaaagacctctaagtacagtacaagattatactcattttattaataaaaggactggtcaagaaggtctctcaaaccacagaattgttcaaaattctacacaccataaacaacttattattctttaaaacacatatatatacacttatttgtcgtcctttttatgcagggccacagacttctctgtgactgtgggtttgctgatcacaattcagcattttcttttataaaccacacccgtagtgctttgtccatgattttcagttttgctttgtgtaagcagagtgagagcttaaagatccttgttaaacaatttgagagcagaagccttctggatgtttatgatgtttttctccccgagactttgacagcagtcttgtgcacacctaatatgacaggaatttttatagcaactcactttcataatatcttgtccaaccatttggcttggttttcatagaaagaaatctttttctttccacacccatggttcatcagtttctccattatctaattagattgggtcattaaaataacaagtataacaggcataatcaagttggtgaacaaacacagatgaattgtggtgaatatatacctcatcaggcagaagcagaaatagctgagctaactggagagtcatccagcaggtagtgttcagctgggtaaccacatcagggtgtggctttcacagaagctgaagaaagcctgaagcagtgactcagtcgggaggaggtgggtttagaagccatctgctgtacttcctatacttcttggtttggacttttgaacactgagacattctaggcataacacagatataaactcatggtgcccaaaagcatttcaaaaccttttcttttcttcattcctgccttcctttcctttccttcctttcctttcgttcttcctttttttctgtgtctctgtctctctttctctctttttcatttttgagacaggatcttcctctgttgccctagagtgcagtggcatgaacatggctcactgcagcctcgacctcctgggctcgagcaattttcctacctcagcctcctgtgtagctgggactacaggcttgtgccaccatgcccagctaattaaaaatacagagagatatatattttgtaagagacaggggtcttactttgttgcccagtctggtctcaaactgttggcctcaaacgatcctcctacctcagcctcccaaggtgctgggattacaagtgtgagccactgcaccagcctgaagttttcttggccttccttcgttccccaacaacctcaacaacagttctcagctgtttgctagggctgtagaacaaagttccatagactgggtggcttaaacaactgaaatttactgtctgcacaattctagaggctagaagtttgaaatcaaggtgccagcactgttggtgccttctgagggctgtgaggaaagggtctgttccaggcctctctccctgacctgtggacagccctcttctccctgtgtctcttcacatcatcttccctctgtgttcgtgtccagatttcctcttctcgtaaggacaccagtcatattggactagggcttaccctgctggcctcattttaacttgattgcctctgtaaagaccctatctccaaagaaggtcacattctgaggtactgaaggttaggacttcgacatatacattttgggggaacacaattcaacctataaaattcagaaaagactctaccccaaaccagcagaacttagcaaatagattgattgacccttaaaagaattccatttactggaaattcaccctcagttggagaaggcacaggtgatatcaaaagcctgtgttatgatgggggagaaaatcttgagtgctgtgcttctactacagctttctgcattgtaagttgagtaacatgaggctgtgtgcggtggctcttgcctgtaatcccagcactttgggaggccgaggcagggggattgcctaaggttgggagtttgagaccagcctggccaacatagagaaaccgcatctctactaaaaatacaaaattatctgggtgtggtggtgcatgcctgtaatcccagctacttgggaggctgaggcaggagaattgcttgaacccgggaggcggagattgcagtgagccaagatcatgccattgcactccagcctagacaacaagagcaaaactccatctcaaataaataaataaataaataagtaagttgagtaacttgctcagtaataggaaaaggcacctgacagggtagaaaaaacatggactttgaagatagacatacttgtgatcgaattatgacctcctcccttactacctgtggcattctgtggaacttaaccttacaaatccccctttgactgtaaaatggagagtataaagaggttgttgagaggaataaatgctaaatgtatgtaaagttcctggaacataaggaatcaagaaatgttaggcccatctttctttttaacctgttaagagtattttaaattactctgaaagtctttccctagctgcctcttcaaattcaggtggcctctctgtcatagctccaggcttgtccatagcttatgagaccagacagtgacttccctatgtttacgtctcatgttcagtttgttttgacaccgattgaagttgccattgaagacatgaagaagaagaccctgcagttagcagttgccattaaccaggagccgcctgatgcaaagatgcttcagatggtgctgcaaggctctgtgggagctactgtaaatcaggtaagcaaaaccagaggtggcagctcctctggttcttattatttaggttgtcattatacgtctgcacccttcttccttggggttgatgaggactttgatccatagacaaacacagaaatgttcctacacttaacctgaacacctgtaaggtttagaagacttttaggaaacctcttccctttcatgtaacaaccccaggtaaaaaagaaatcctagagatgagtggaccaggctttaaggagtaccactttctcagaggagtctccacttcggggccagacctgacaatatgatgcaaatctggagtcatgttgaagaatgcttagtcatgaccaattcacgcagagtaattgcagggcttgagactcacctacaaatgcctataggagagaaggaaaaggatctagaacatccaactcttggctcagtcagcagatgaacccagcatgccaaggaccttgacaaccaggaatgacctgggacctgacttcttaggctacttcagacaagactagatcttcctatcagacttcttagaacgctgactcccaagttcagcatggtgctcaagcagtctcagatgaagggaggtaccagcctaatacctctgtccagtgggcctccttaattcaaatctagatctgttcttgtccacacttccacggcagttattcagtgagcatcatgagtcttttctcattcagcgtaattggatttccccacaaaagttctgagtgtacttgacatcaagggagcagaaacagagaagagaaatgcctattacattcccaagatcaggaaaaaaaaatgaggaaacgtttgcctttgtaagtgccaatcctttgataaaatggaagactttccaagcccacaaccatggtctatctgtacacgatggatatctctgactcaatccagcagttatgcaaaatgatgtttgccatgaaggcaactagataagtgaacaaaaatgaatagatcaaggcaatcctgatttttagaaaagcaactcaaagcacataccatttgatgtagttgtattacacttatatatgaatgaaaatctattattagtagtatttgattgataaaataatattcggcgccaggctcagtggctcatgcctataatcccagcactgtgggaggccgaggtgggtgaatcacttgaggtcaggagtttcagaccagcctggccaacatggtgaaaccccatctctgctaaaaatacaaaaattagccagtgtggtggcaggcgcttgtagtcccagtacttgggaggctgaggcaggagaatcccttgaacccgggaggtggaggttgtagtgagctgagattatgccactgcgctccagcctgagtgacagagtaagactctgtctcaaaaacaacaataaaaaagaaaataaatttgggctgtgtatggtgcgcacgcctgtaatcccagcaatttgggaggctgaggtgggtggatcccttgaggccaggagttcaagaccagcctgggcaatgtggcaaaatcccatcactacaaaaaaatacaaaaatagccaggtatagtggcacacacctgtagtctcagctacttgggaggctgacatgggaggatcacttgagcctgggaagtggaggctgcagtgagcagagatcatgccactgctctctagcctgggtgatagagcgagaccctgtctaaaaaacaaaaacaaaacacacacacacagggaaaatacatttatacttctgagtgttcctctaaaacttcagattcctcctaagaaatcaaaatttcctgagatgtccaagaccttccttatttttttttgtttatttcaaaccaactacaaaattaaatgttcaaactaagaagtcactccaatattttctcccaagcaatttaatttccttcatatatgtatgaatatattcatatatatgtgtgtgtatatatatatacatatatatgcatatacatatacatatgcatatacatatatatgtatgtgtatatatatatgtgtgtgtgtgtatatatatatatatatatatatttttttttttttttttttttttttcccaccagggaccactggaagtagcccaagtgtttttggctgaaattcctgctgatccaaaactctatcgacatcacaacaagttgaggttatgctttaaggaattcatcatgaggtaagaaggaaaatggctgggaatttcagtagagcagtggttctcaaagtgcaatcttagaccagcagcttcagcatcacctgagaacttgctagaaagacaaagtctcaggcaccctccagacctgctgaattggaatctctggaggtgtggctcagcaatgtgcagtttaacccgccctccaggtgatcctgatgcacactgaagtttgaggaccactgcagcagagcaacactacttgaactactaatgagtaactaacacgtcaactatgaaacgcttttgtggctagcatcccgtgtgcctcacaatcacttgttgtaaaacaagtatcatcatcttcctcattttacaaaagaggaatcagaggttcagagagaggagataattttacttaaggtcacacagacagttggcagcagagatgagctcaaaccaggtcttctgaatccaaatagtccacatgtccatcaatgtgctgatattccactgatgcactagagtcccagaggttctttgcattggcagtcattgtaatgttacaaatcttataatatcttatttttagaaacttaaaaacatacactgcctcaaattgagagaggcaagttctaaaaccaggcttttcaaaggtattatcctgtgacagttccccatgtcagacaagtctcatctctgttccttaattctgcagtggagctggcttcaagagcagtcagttaggaactgggtctttggtcaaagccttgtaatttattgcaatacagacagatatattgggtctcctatggtcctaaaaatatgagtatgaaggatgtgatggcatttcacctataagagaaaaggacttcagaaaaatgtgtagcaatatttctttctattcaaaaccttagagaagaatattaagtataagaatatcttcacttggcagatggggataaaggagactaaaagtttgctaaattcagtgaaaactcatcaaaatgctagcatttgtgaggttagagatatctcctccttcacaggcttttgcgagaggtccgcaattttgctgcatatacaggagacacactgtgccctgcagtgaatcacagccgcttggtaataggatgtttgtgtggctttgcgtgtttgtatttgtgcatgtgtgtgaacatactcacagattatcttgattaatgttttgatatttgaattgtttcctgtatttgacaacaattctgacagaaaaactagttgttgttgttgttttttcagtacataatacgtatcttttaaaaggctagaaaaatatttggggaattattttattattttattttattttgagacaaggtctcactctgttgcccaggctggagtacagtggcataatctcagctcactgcaacctccacttcccaggctcaagagattctcctccctgagcctcccaagtagctgggactacagacgtgtgccaccacatctggctaatttttgtatttttggtagaaatggggtttcaccatgttggccaggctgatcttgaactcctgacctcaaatgatccacctgccttggtctcccaaagtgctgggattacaggcatataccaccgtgcccggccctattttttattttttgtggagacagggtctcactatgccgtctaggctggtcttgaattcctgggctcagagattgggggcttaaaaaaattttttttcatatatttttatttaaaattcattatggttgaatgcttccaaagttgactatgccccaggacctctaaaaggacctatgaaatgtttgaagagcactcactatattccaggcatgatattagttatgggactacagagatctggcttgttcctctgttcttaatgacaggacatagccctgcatggctgaataatagaatgcagcatatgcacagaactttaagaatgactaactacaggactataaagatcagaaaagagaaatcagtttcaggctggagcatttgtgggaggcgttatggaaaaacaccacttaaatcttgtcttgactatatacgtggaagaaaggcgctagtggggaagagggagccaggacagtggccctgcctgatccaaggtatcactttcagctgctttagttacccatggtttgaaagtattacttacaatatgatattcagagagagagagagagaccacattcacataacttttatttcagtatattgctgtaattgttgttaatctcttactctatctaatttgtaaattaagctttatcataggtatgtatgtataggaaaaaaacataatatatgtagggttcggtaccatccgcagtttcaggcatcccctgggggtcttggaacctatccccgagaatgaggaggactgagtaccactgagtggaccagcaggaccacgagactctgtcaggaatgcctgtgatgcaccgggttcctctaagtccagctggagcagcgtgttctcatgagcatgctaggacaaggaggaaagattggaaatatgataatatcagtaaatgaggctctgaatacaatttaaatgtttaagaaaacttgtcaggagagtgattttcatttacttcagtttgcctcaattttttctactagttataaatcttgcaatccagtatctcacgggtatgatcctttccatgacaccacctaggtaaaatgtacttacaaaatccctactaaacatgcgtttctcattagctcccagccccaggaaaagttactccaaaaagaaccagtgcccagtaaaactagtcccaggcaagagatacaagaggaaatggactttcctaggggtcgctcctttaacaaagtcattagagtttcaataatgaggctatcattctccccagatggcctacagaaatgttggattttcaaaatcaaattcaccattttaaagttgttctcctacccttttaatggtgattccacatgggaaccagtcccacctttctccccactggctgggctgctgcattgttctaggaggccaggagactgtccatgcttcccagacttcactgttcttacacgtcacctgaggatttgtcaaaatgcagattttggcctgatgcagtggctccgcctctaatcccagcactttgggaggctgaggtggaaggactgcttgagcccaggagttcaggaccagcctgggcaacatggcgaaactctgtctctttaaaaaaatacaaaaaaatacaaaaatttagccaagcgtggtagtggtgtgtgcctgtagtcccagctactcgagaggctgaggtgcgaggatagcttgagcccgaggaggtcaaggctgcaatgagccatgatcgtgccactgcactccagcctgggtgacagagaaagaccctgtctcaaaaaaagaaaaagaaaaatgcagattctgattcagtaggtctggggttggtcctgaagcactgcatttctaacaggcccccaggtgatgctgctgctgctacactggaccaaactttgagtggagagcctgcaaagattgcttaatttcctccctttcacatttctccctattacctctccctccttccctgagggcttaatctcttaggccatccttatcatcatttaccacttttgccgtctgcttcctcccaaaaaataaataaataaataaataataaaataaaattttaatggcaaaaaaagaagttgtaaatctcaataaaattatgtgagaacaaaaaaaaaagcaaacatgctcaaactgctgcaccttgaaccaactatagacgtcagttcatccattcattcagcagttattgagctcctactttgtgccaggcactgtgctacatatgtggaaggatgaagtcccaatatcagtaggacaaggctacagacaaaacagtactgctgctcattattcatctctatgtgcaaacacaacagatggcctgccctccacttcattctacagagatcagaagtcgtgggtgagagtgtgctgatggtgcacaactgtgtaaattactaaaactcatcaaactctaaacataaaatgggtgaatgttacggtatgtaaatcataccctgaatacagatagtagatgaggttcctctgttgcttaattgcttctcaagtccaatctggaagttacagcttttaatgaatagagtaactattttttcacgttgtttgtgctgtgtattttctcctccactctgctaacagacagcagaggtgacgcagaagtggaaaatatttggggcttgaacagctctcaggtttcccctttagtaagctccagcttctcagcagacttgggctgtagatcgataagcccagatttccaaggtgaccataaatgagtctctgttgctgagagctaatagcggaaacatttgcttgccaggtccactgcgtctagtgccaccacggggcagcgacctttctgactcagctgtagtggaagcagaaacagccataaagaatcctggcagcctgatttgctgcagccagtactcatccagccagtcctgcaactcttcaaactgttaccaagctgggacctcaatcagcttctgtcttttcctgcaataataaaaaacatctcgggttcagaagccaagacaagaagatagagagatacaatcttctatcttcctcttctgctcccccaaacaccccgaccatttagatttttaaattttcttctttatacttatctggactttctcattcttataaagactaagtgatgttaaatttgtttttaatttaaataaaagatagtagtactcactggcaccagttacagcttgcctttaagagaagtagtttcagatacaccctgaaagggttctgcagcatatatgtggtcataggctcagaaaacaggctgttgagtggtggcgtttttaaactggagttggggtctatgaagaggaaggagaaggaatttgtccgagtagccaaaggacaaccaaatgtgtagagtgtaggtggaaaaagaagcagtagttttaacttgagaccaaggccatatgcctggcttatagctggaaatggggaaatggctttcctaggcagtatatgtggcgttggggttgggaatatgggcactcaagccagattgcctgagttcagatcccattctgcctcaactagatgtgtgaccctgagaagttacctaccctcggtttccccagatgtaaaatcggaataataattgtacctctcccttgcagttagtgacagaataaaatgagttaatacatggaacttagaataagacttcatacatactaagggatcagtaagtgtaacattgttcagtggggcaaataggggactgatggatttgagtgggaaatagagaattaatctgacttaaatacggagattgtctatccatgatttgtctgtctctataaagtttgaatcataagacacagtgatgctgatgagacattggcctgggagcagcaggattctgggtttatatccagctgtgctgtcccacaggtatgtgactggacagggcacttcacctctttgcatgttagtttcatcaactatgaaataaagagactagaatacagcatctctaatagtttatcattctcatattgtacaaatagttcatttacttagcctgggtctgtcaggcataataacgctaccatgtgctctggcttcagctgtgtgcagggactcttctgaacatttgatatgtttcaactaatttaatctttacattaatttatgaggtaggctcttatcacccacacatcacagatgaagaaactatgacatgaagaggttaagtagcttgtttaaggttgcaaagccagtaagcagcaaagcgggattcagagttgagcactctggctccagagtccatcctcttaattgccatgctgagctgttccctctagtgactatattcagttgctagtaacagaaggaagagtagcttaaataagaaatttatttttctctcacattaaataagattggaggtagtcgatgtagagctgtgtagtggcctcataaagtcatcagagaccctggttcttttccaatcctttgccatgccatcctggttctagtgtacccattctcgtggtcatgatatggttgctagggctccagccatcatgaccacatctaggcaagtcaggagtagaaatgaggaaacagcaaaaagatgtgcccatttcccagtgccttcacctatattatcagcgatccctacctgcatgggaggctaggaagtgtaagttttcaggtggtcacactgcctggagttctgccagtagggaagaaagaatggatattgagaaaacaactaacgaatgtttgtctgccacactgaggaacccatgtatgggctgtgctgaaaaaggggggccaaggctgggtacagtggctacgcctgtaatcccagtactttgggaggctgaggtgggcggatcacttgagctcacaagttcgagaccagcctgggcaacatggcaaaacctcgtctttacaaaaaatacaaaaaaaattaaccgggtgtagtggcgtgcctgtagttccaactgctcgggaagctgaggtgggaggatcacttgagcccaggaggcagaggttgcagtgagctgagatcatgccactgccttccaccctgcatgacagaatgagatcctctctctaaaaatagagggggtaccaagagatgcagggggggtgagggcagcatgactactctctctgtaggagaccttaactctataaatggaggccccaaaatgttactgccatcaaaagccaggaatccttttctggaggcgtaacttcctgccctttctaatccctatcaatctggtttctgtagaactgtgactgctagaaaaccccaggcatatttgttctaagaaaatacttgtgttcggtgaatttaccaacaaagggagcatcagaggatgtgagggaagtctggaatggttgtatcactaagtgagagcagcacagatgtttgtggacctattgagaatgttacagataagaccatttttgaaaagttgtttgcagtgtcattttatgatcttgtgtacattttccaagcgatgtggctattctctaggagggatagtagaaattatttcaattttaatcaaataacctagagaatataacccaaatgactgaaaggaagaaatgtagaaaaagtatataaaataattttttgcattataaaagtttaaagacataaagtaatattactacataaaatctaagttttttactccagctattaatatgtttttctttataaaacatcacatttattaattgctgtgtaacaaactacctcacaatttagtggcttaaaagaaaatttaattattatgcatgtggtacataataatttttgctttcctcatttctactcctgatacttgcctatgatgtggtcatgatggctggggccctagcgaggtgtattgtggccatgagaatggttttgctgcaacttggggttggctgggctcagctaagcagtttttgcctggagtctctcagttgcactgagacagtgactaggacttgaattacctgaatgcttcctcactcatgtctggtgtctgggctgagaatactcaaacagcaggggctcctcctctctctaactctccttctctccacatggtctctcctgcatgacagctttagggtaactagacttgtcacaggatggttcagaactcttatagtacagaacgagagagagacagaggccatattaccttttattagccagtcacacagtaccacctccaccacatcctattcagtgtggctgtcacaaagaaccatccacctcttgatgggggcatgggcaaggttctaggagagcacattcttgtggccattttcagaaatacaatctgctacactccagaagcatctgtttgccttattatcatagcttctgatttaattctcccagcaaccctaggagattatatgagcttattatccccattttccagagaaaattgaagatttttatggttaagtcatcctgctaatgagtagcagcttgtttcaaccgcagttgtctgcatataacacatttaactcagtcaagggcacatggtgagcaatcagaaggtgttagctagctgctgctacttctgcaaacaaagactaaggagagtttagctgattttaccaaagttgtccgagtagacttccccaaattagctgttagctttggcaggactcatcccacctcctgtagcctgccaatgttataaacttgggccttgaagtcatcctgaaactgatcttattttacacatggtggtaattgtaactgttagttaagaagcaataaaaaaataataaggggtgatatagatttctcaggattcaaaggccatatgccttcccttctatttcttccctaaaaccgttaattcataaccttagctatcctataatttgcttcaattaatgacaaacataaaagataggtgaaaatccagttaagggagttctttcagattctgtgtgagttaaatcaagtccttcttctatagcaggctaattccatgatgaagctgtggtgctaagtttatttttgcctaggcaggtagctcttccttgccacatgctatcctcttcctctttgactgtcatcctgaaaatgtgttcagtgttaagaggatttgataacaatgtctgggtatctccataacttagtccaaatctggtaccactgttaggaaaataatgtaagccatattgatcacccacgtcttattcatttgaaggataatatagttattactaattattgcgtgttaggtaacatacagccattattctgtccctttaaggtttattgatttgtaagttcccttgggtagaagagtacaaaacaaaaggcaaaacttcatcatgtttaaataacgtgattttcttctttggtgtgtaccgtaccgtgcaggagacagggaaaacaccaggtttaacggtccacaagccagataaccatgatgagttctaaagattttctctgtctttaatgttcttcagttttgtcatgagaagactggatatagctctgttgttgttcattagaggatttatatctctcttcaactctagaaaattaccagctgttatctctttaaatattgtctccctctcattttccattcccttggagattctattagatgtgggttggatcttccttatatctctatgtttcttaaccaattttttcatatttttttattttttaaatctcattggtgatttccttggatctgtcatacatttacttctccaattatgtctagtctattatttaacctttaacctttccattgagttttttgtcttttagcaactgcatttttttttttttttttttttttttttttggtgagacaaggtctggttctgtcacccaggctggagtgcagtggcatgatcttggctcactgcaacctccacctcccaggctcaagccatcttcccacctcagcttcccaaatagctgggactgcagtcacctgccaccatacccagctaatttttatattttttgtagagatggggttttgccatgttgcccagtctagtctttaacttgtgagctcaggcaatccacccaccttagcttcccaaagtgctgggattacaggcatgaggcaccacacccagcctagtgactgcatttttcttttttctagaagttctgtttggtccttttctgaacttttcctggtctcttttttcattttccctgtttatttgtttttatcatggattttataccttttatttattttctttttttttttctagttacatgattacttaggattttatacattttattacctctctatattaactttggttttttacattgttttattatctctaattcttattggactaattcttttgtttgatgcatctgttagttttccctcgtggtggttggtttcttcatatggtttgtaattttttattgtgagctcatctttggcgagagtggctcatatgccctgattgagaatgtgttcctccagaacaactttatgttggtttggctgaatcctagcaatttcagtaatcttggactggcttttaagttattttctcaccttgaagcacatacagtcaaggaatgtacatttgtaacttatactatgtgtggtgcaagcctagaatttccatttctcaatatgactttcttttccataaatggccctaagctgatagcaagttttcattctgcctctctggacatcttgcagcatttttctaaaccctctttcatagatgggatagcttttcaaggctctggacgatatgcaggtggcatatccagaatctccctttgccctggccaaggccacatcactaatcttgtgtgagctttgaagccccttcccctcagcccatagacctatacacagtcctaaaatcttaatgggcagtcctactgacagctgccttgtcaccagctcctgtgatcattctagctttgatttttctctttctttctggcacctggtgttcccctttctctttcaacaagtttttgctgtgctttcctagcacttccatatgtacgtagcaggaggaggctgaatgccatctgctctgtctgccatgttgctgtaaatcacagtgagttttttgtaagtgtaacagcttccattctgcagtgtgttttgagtctgactcttagatccatcacttcctcacagtgttatcttgggcaagcatcctaacatttctgagtttcagaaacaaaatagagataaatgctgactttttagggttgttgggaaaattaaacagataatgcatgtaaaacttcttgaaacttcttctggcacatagcaagtcagaggttctcaattctggctaggttggcttcagtatcccctgggcaactttttaacattagacatttctgggccagaagcaatggcccacacttgtagtcccagctacccaggaggctgaggtaggaggatcactggggcccaggaggtcgaagtttgccatgagctgtgatcatgccactgcactccagcctgggtgatagagtgagccccgtctcaaaaaataataaaataaggtaaaaaaaaaaaacaaacacagagatttctgggtgctacccctcagcagttatgattcattaagtctgagatagatcccagaaatctgcattttgaaaagctccacaggtgatcccgatatgccacccagtttgaaaacgttcttaaagttattcgaaaaatcgtaagtaatttcattgttctcagatttctaagcacttcaaagtcatttatttctcccacactgatattttcatctcagatgtggtgaagctgtagagaaaaacaagcgtctcatcacggcagaccagagggaatatcagcaggaactcaaaaagaactataacaagctaaaagagaacctcaggccaatgatcgagcggaaaattccagaactgtacaagccaatattcagagttgagagtcaaaagaggtaagaacagggcagaggaggcctcttcctgtgggataaagagcagcgcatggggcctagcaccttggggcatgctctgctgcacttggggagctgcagaacctcgaaagggtggaagagggtcccacagtcagagaggctaccagagtgtgattcattctgcctctgtcctccccatccctgctccttgacctctcccagacaccttggtgttggtcttgtgccagggtattcccagggctgaatgatggcctgtgttggtttttttgtttgtttggttggtttgtatgtttgttttggcacagtgtgaaggggtcgcagacctttcacttattatttgctgagttgtccatgactgatgtccatttctactgggtgatccacccccaaccctttctaaaaggctaactgatcttttcttgcttctgtacgctctctttccctctcctccctctcttttcttaatttcagggactccttccacagatctagtttcaggaaatgtgaaacccagttgtcacagggcagctaagaaaagccatcttcattcgtggagactgtggccctgcaaccctggagaaggacttgctggtacttaaaaaatgggacatttgccacccaggactgactgtacactccctgatcagccagcactctggaagctttgggatcccaggaaccatggaattattcccaaatggactctgaccagatttttgccatactggggggtggcgggatggaggatgggtactcaggcatgactgcgtatttattaaagtgtgtttttccacaatgtaccaaacaaggcataagcagcttctcctgctgactggccaatcactgcccatctgagagatgatttcctctggcccatatttgaatttattggagtaactcaaattgcctgaggaaaaatggaaaaattatccaccagtcgattcaaactgaatttcactctttataggaaggcagggcaaacttgtaggagtacgaaacattttcaataaatctacaaagggaagccttactacaattccaaaaatcatcatggttggaaatttgggaggagattatttgtgaacttgttacccttttggtaatggtggactaattgctgtatagttatttttgttttattattactgttacattaatttaacatgcatttatagaagaatacattcaaagcactgatgtaggagatacacggtacttggagcagtcagccagaaatcacagatactgctttcacttaaatggaaacaattctccgataatgctttgctttttttcttatgtcactcttgtgtactatctatttttctcctctctgggaccaagtttctttttataaagcaataatatctctgttttcatttcagaacattgtgctgtctgtcagcatatgtatatcagctacaaaatatattcaactttgacttcttttgacaaaggactttaggaaaaagaggaacaaagacattatttgagaattaaattatatatttttaatatgactgtgaccttgactgataataaagatgtaataagaattgcaagctaaatgtttccctttgcaactcatgctttgtgttttgttttgatgacctactcgctcgtaatgttttgtaaggcacttcagagagaagacagatgcatcatcctggcctccatcaaataacactatccaaggtggcacctcttctgcaatgtttaaccctgctagtaatgaacgatgacttagttcggatatttcagaactttttgtttataccatcaggtatgcatgaatttataatctgaaagaggacttaaaataataattaaaacttaccagcttaagtgctaaactttttattttttaggtatttggggaagaactctttttaaagtatacacctaactgctttttaaaatgagtacacatgacatactttaattccatatgtattcccctactctttgggagacactgtgttgagaccaaggtcaaaaaacgtggtcaccgccctccaaatcgtctccgttccctgaggaagatcatatacctgtgtagtagccacagtacaaaacagactagaacacagcccatagcatgtaaccttttcctgactaactcaaggataggccaacacctatggtattagattctgccctaaaacaataagagttagatgctaagttatatagtcctggaccttaactcaaatagccagaatagccctagtaacctagaatattcctgattaaatatcccctgcttttagatacctgttgtccatttgggtttgttttttacagtctcttttgtaccacagtggatacatttgcttcatgagtgcaggaaccatgttcactgctgcattcttacccctagccctgcaacaaacacacaaaagatacccaataaatatttgttgattcactaaatgaatgaatgatgagtaggcctgcttctagaagtgcactgccaataagaatgtaatgcaagccacatatataattttaaaaattctagtagccatattaaaaataataataggccaagtgcagtggctcatacatgtaataccagcagtttggaagaccaaggtgggcagatcacttgagcccaggagtttgagaccagcctgggcaacatggctaaaccccatctctaccaaaaaagatataaaaaattaaccaagtgtggtggcatgtgcctgtagtcccagctactcgggaggctaaggtgggaggatcgcttgagcccagaaggttgaggctgcagtgagccatgatcgtgtcactgcactctagcctgggtgacagagtgagaccctgtctcaaaaaataatcagcatcataaaaagaaaccagcaaaattaactttactagtatatttaacccaatatatataaaatattatttcaatatgcttccactataaaaaattattttacagtcttttatttccatattaagtctttaaaaatctgatgtgtagtttgtacttacagcacgttgcagttaggactggccacattttaagtgcacagtagccacagggggccactggctaccatattggatagtgccattctagaagctttcagctttttcaactggatgcctctgatttgtggactcagaatacagataaccaaagaagtgggactagtgtctgaagtaagaatgacagggtatgattgagagccccatgagcttacctaggagagaaacttgtggggttgcagaataaggatttgtcaatattggctctagctgttcacactatttctgggccaactcccagatcatttctcaactccagatagttaagtggggagcatggctgcactttttaaagtgatggcacaaaaaaagatattgaacgttggtcctctgattatatattctaaatatgcagttagaaaagaggccttttaagaatccctaagagtaaagcaaattagtatctttgtttcctgaaaattagagaaacttgatatgccatgatagccctcttcattttatttggaaaactcttctatgaaagcttattagagaaaattttctgattagcttcatgcctcccctccttcagcaaggtcaagggtgcagttgtcactatcacataagaatctcataaaaattaaacatgaatatactgcacagatctgattgggtttgtcatgccacacattgttttaaattccataattctattctataaagagtggtttctatgacaatagatcgttttaaaaacaaacaaacaaacaaaatttagagttgtcattggtaattgtggttgcaagtatgctttcaaagaccagaagcttttgttttgctttgaatgtaatttttttcttttttctttttgatacggagtctcactctgttgcccaggctggagtgcagtggcaccatctcagctcactgcaacctccacctccgtggttcaagcaattctcctgcctcagcctcctgagtagctgggattacaggcgtccaccaccacgcctgactaatttttgtatttttagtagagatggggttttaccatgttggccaggctggtctcaaattcctgacctcaggtgatccacctgcctctgcctcccaaagtgctgggattacaggcgtgagccaagcttcaatattcttaaacccaacctcacacagcctgatttaaaaactaaatttctgctaggcacggtggctcatgcctgtaatcccagcactttgggaggcggaggcgggcggatcacgagctcaggagatcaagaccatcctggctaacacggtgaaaccccgtctctactaaaaatacaaaaataaaaaaattagccgggcgtggtggcgggcgcctgtagtcccagctactcgggaggctgaggcaggagaatggcgcgaacccgggagacggaggttgcagtgaacgcagatcgcgccactacactccagcctgggcaaagagcaagactccgtctcaaaaaaataaataaataaataaataaataaataaaaaactaaatttctggccaggcacagtggctcgtgcctgtaatcccaaccctttgggaggccaaggctggcagttcgcttgagcccaggaggtcgagactagtctgacaaacatgtcaaaaccccgtttctacaaaaaatacaaaaattacctaggtatggtggtgcctgcctgtagtctcagctacttggggggctgaggcatgaatccaggagttcaaggctacagtgagctatgattgtgtcactgcactccagcctgggcaacagagtgagaccctgtctcaaaaaccaaaacaaacaaaaaagaaagcaaaaactaaatttctgataatcactaagtttttaattatgaaattactagaggaaatgcagcatcaccttggttgaaaaccatttggagagccgtgcacattcctgatccctaagtccttgatgttgcacccatcttgaggagcagtgctctctctggaccgatgttactgaatccaacccagttcctacttgatgtttgtggcattagcttggcagctagtttttacgtttactatttttactacatattaggagatggcaaattactgatagccaggataagggaatgattttcaaggcattatagctctaaaaaacaattgagaaatcagctccctcatcacttccttaatgcaatgagagaacacgacacggatgaacaaactgttctgttatccaacaagattatcaagagttattagtgagataataaaaaagtatatgtgactgccaaaagtctccagactaaggaccagaagacctggtttcttgttctttcactttctagtcctgcaattctggcgaagatactatactgctctgagcttcagggtttttttcactgtgaaagagggtgcaagttcctccacattcttccaatctactgaggaaacccaatgagataatgcatgggaacatgttttggaaactcaaaagtgctgcccaaaatgtaaggtaacactgtttacaattgacacttccagaaagtttagccagcacccccacacatggcatccgcttctgacaacgttaatcaaaatcaggccaaaggtgcaggcaggacagaggcctgacttaccagaaaataaacgtctggtctattccacttgtagtgccagtttacattgtctggcgagagccaactaccagggcctccgggtagaagaaagaaagggtatcagtggaactgagagtgtatacagtggcgcctgaaagcgggtagaagaaagaaagggtatcagtggaactgagagtgtatacagtggcgcctgaaagcgggtagaagaaagaaagggtatcagtggaactgagagtgtatacagtggcgcctgaaagcgggtagaagaaagaaagggtatcagtggaactgagagtgtatacagtggcgcctgaaaacccaacctcgccaggcttccctgtctcctgtgtgcagcatgtgtgcagtgcattcccctggaaggtaaattcgcggagtcccgcagcccacctgtgtccacctagcctgtaagtgccccctgagggtatcaaagcacgcggacttccgcctgaagcaaagccaccgggcggcaagtttccccgttaacaacaacgaagacagagaggacttggcagctgtgacggatctgcaataattaaactgacgttgctgtttagaagcctgggggtcgcctgcagcctcccaggctccactccatcggctccagcgctgcaggcgggccgtgcatgtctctagatgcatattaagcaaaaagtttctaaagaggatcgcgtggaacccagcaattgattaagaatctcaatggccctaatcccctgagaattgaactaagggctccccagcaaacacagcgatttacatggggcctagagagagcgagcactgccgggggcggcggcgaagggcagcagtggtgggacgggcggggtagggggagttactgagcatgcgcccgggtaggggcgtgggggagttactgagcatgcgcccaggtaggggcgtgggggagttactgagcatgcgcccgggtaggggcgtgggggagttactgagcatgcgcccgagggtgtttcggggcgtccgaagcgggcgtgctccagcctgctcagcagcgagtggttggaaattagcaaagtgagagggtgcgtggcctgagggactcggggaggctgagggctttttttctcaacactgtgaagctcagggaaaggagtagaactgggaaccaagtaaagtaaaatcgtggcaagtgggcatagacctgaaatctccttcgtgagggaacccagaacgtgcagctcaatgtatgtttggaacgaacaggtgaaaggaagcaggaggaggagggagttctagcgaagacttcggagggaagcaacccatcccctgccacaagaaagcaccgccactccagtgggaacggacacgcgtgcacacagccacgagtgaggtttgaaagaggccccaccctccattacacctgtgctccaccgtggcccccagccaagtttaatctcccattcagcacttacttctggaagcttctttccctttccttcccaccactcattggcctttcaccccctagttttttgtctgtgtgtgggactgtcttcccccactccccttgactgaagttccttgagagcagcagccctctttttatcagggaagagatttgaagctcaggacattcttatccaagtaggtgctagccacctgggtagtcaagacagggccctgcacagttaatgtgaatcttgtcataatgccagggttattgttttgcaaggagccggtcatagaacactagattgcattgtcactgggaaataagctcattctattagcttgtttctcagctagcttatgtagaaatttgccacagttgttactgctgggcacctgccctggatctgatcatcaattatatcatctcttccatctgatggactgcacctcaccccttgctttttcagagctggcgaagctgggccaaggaaagcgatagtgccagctgagtggaatgtgcaggaagggaccgaggaggggcactatgtactggagaaaagagatggggtctccaggacaggggtaaggacactagactgagggcacaaaggaaggaaaccacaaggaagtagagtagggaagtggggagcatgctgaggagagaggtcaagagatggtgaccgctctctgcatgccccaaggagatggtgatgacactcccaagtccatgtgggactccctccttatgcgggcctcagtctgtcatcttccttggagcaggaccaaagtaaataagataaagtcacaatttctcatccttcttcactcaacttttctttgaggtgagttggcatttttgtaaaagaatgcattctctgccagatgcggtggctcacccctgcaatcccagggttctgggaggccaaagtgggaggcttgattgaggccaggggttcgaaacctaggcaacatagcaagacctccatctctgtaaaagaaattagccaggcatggtggtgcatacttgtagtcctagctacttcggaggctgaggcgagagaatcgtttgcacttaggcattggagattacagtgagttaagcgttctcctgtactgccatggtaggtgggtgttgctagccacatgaggatatgtgagccggtcaccagggactgcggctgactccccgagcacaaggacagtaagaataaacctccgattattcccctgcccccaaccccaacttcaattaaagagatatacccttatgtgactgacaaaaaagagccctgctctcccagagtcacatccccatacgccaaaacactcttacatataattattggtgcttcataaatggctgataaaaaaacttttctatcagggaatacaccctaccttattcacagcctcttatagagagctggcctgcccacagtctctgtaaggggcagttgtctcttctgagtgaccagtttccctgacctcccctcaagccatgactgaccaaggaagtcaatgtcaccactgagaagcaaggcgtagcctcagactctgagtttctaactctttccactttcctaagatggggttatgcctcatttctgagagatttccaaccctctgccatatattcctctttttgtgaggtcacttggggaggtgtctgcttcttagcaccagaagagctctctcaggacccagttgctgacccagttgctgcaaatgctgaaagtaggaaatggaggtcaagtgtaggccataaagattttcccactcctcctcttgaatcaggcatggccttgtgaattactttggcccatagaatgcggcaaagtgatactgtacaagttctagccttggtcttaagcctgccagcttttgctttcactcccttggagccctgagctagtatagaaagagatccagctgcaaggactggttacacaatttgcagggattagtgtaaaaggaaatgcaggtttccttgttttaaaattattccgaattttaaggcggtgacaacagagccctataccaagcagaggcttgatccgagctggtgcaggcatgacagccaggcttcctgatacatgagtgatgctatcttggatttctggccccaattcagcctcctaatggtcagcatgagagcatgaactaccctaggtgagaccagtagaagaacccagctcagattacaaaactatgagcaaacaaacggttgttattcaagtaaagctcactaaagctcttcatgacaaacgggtatagtcatgggggccgctaaggcctgggttgagattttatatagcaataggtaactgaagcatgaagaataagagtttgcagtgagtggtcacccaccatattccaggccctgtgttggtgcattgcatgtgccagctcacctgatcctcacaacacctttcataattcctttctacaggagagaatacagcagttccaaggacaagggattcgtaccactgctcctcactcagtaaatagcagagacagaatttgaacgtgagtctgactgattccaaaacccatgtaatatccctgcattgaaacagaggaaaatccaaggaaagtgcacacagcttggagactattggataggggtctgattcagtctttcctaaatttcctcataaatttgcagttgaagtatcaggcagagaaatgataaccaggtgaaagacccctaatgggacatcatgacatcacagctctgtgatcatcaaccataatccctagagggtcacctagagttatcctacaatgaggcttacttgggttttctgataggtataatactgagaaaatttgctatggttagctatgggtattcaccacttattttagtgtatatcatcccccaacaaaccacaggcacctgtgatcatctgggtatgtgttcaggaactatcttgcacccagaaagaacaagaattttttttttttttttgagacagagtctctctctgtcaccagggtggaatgcagtggcacaatctcagctcactgcaacctctgcctccatggttcaagtgattctcctgcctcagcctcctgagtagctgggactgcaggcatgtgccaccacacctagctaatttttgtatttttagtagagacagggtttcaccatgttggccaggatggtctcgatctcttgaccttgtgatctgcccacctcggcctcccaaagttctgggattataggtgtgagccagtgtgccagccaagaattaatttcaacattagactcagccagagttaatgaagaagctttccccacatgatggctcctcacaagaaatactatctatttataatattcattggctttacttgtctttaccaagccttcctgagtgtcatcagtgggtgagtgagtgtatggataggtacctgcctatctgtctgcccatggtgatgaacacatcactgtaggtcagcaatgacattgagtctaaatgctgttggccataaggaaaatagtgacattccctggctcagaggaaatgctggtaggaaagccatatggactagtatttataagtacaagctcaggggtcaaagatgctgaagttcaatgccttgtcctgtctcttactaattagtgatattggacatattgattaattgcataagtatgtttctcacttatctataaaatgagatgtatgagggctaaatgaaatgatgcatgtgaaaaactgaacaaggtgccaggcctaggacaagggctcaataaatgtcagcgattattttatttgatgaacaaaagaaggcaaatgttctttctttgatgccccctatcttttccctgtgtcgtttctctaaaaaagtatatgtgtgtaatttctatgccttccctccactctcccattatctaccacttcatcatcctctcactacccatggccactttccctcattatcttttctatatttcttccctcctcccctgaaatggggttgagcagggggagatcagaggatgagaaaaggcagggagacattggtggcagggtgacaatggagcaccacaagctgtctaggccatctagactttccctgaggacacttcagtatctctgagaataccattttctcaggactcctcacactgggagaaaccttagcaatcatctgatggtgtacttgttacagtagataggcagacatgtgcagtgcaggagagggccccccaccctgaccaggaatgtcaggtgaccatcaggtgatggtcacatggttgttacaccgtctctctcaaataataactggttgcagccagcaccagggaaaggcagtctccaaatagataggaaaaacctgaaagtgacaatcagcagcttcacaataagatctcaggaattgggcaggtgggctcaagcatgtgcactaagaggcaaagtggcggagtttaattggtaaatgaccttcctgtaggaatgctacgctggtaagggaagaaagcctcaagaaagcatctgtaccattccagcaaatacactgtgcatgctcccctcccaaatgctagcaggccactgcacatatggacagcccaccccaagggaagaattgggagaagtaacccaagaccccgaaagtatgccaacctgtaagaccgcaagtcaaaggtcaaactgtgcacttgatctcacaaggtgcccactcggccctcttccaaatatactctacttcctttcattcctgctctgaagctttttaataaattttcactcctgcttgaggactaagctctgatcttttcttatcttccaaattcctatctagggggtctggggagttatgccctacaaaccaaaaattctcatcagatgggttttatttaaccctatatattgtgactttttagtctgactctggcataatattacatgacaaaatcaaaatattttatcccataacatgtctctttggcatattttgaaatggccctgcaaagccatcctttgtaggggaaaatttgcatctgtaaagaatctctgttaacatagctagatatttttcttccaggcgctcccatctgaagagattaagagtctagcacctttttaaaattatttatttatttatttatttttgaaacagagtctcactctgttgcccaggctggagtgtagcgtcgccatctcagctcactgcaacctctgcctcctgggttcaagccattctcctacctcagcctcccgagtagctgggattacaggtgcctgccaccacacccggctaatttttgtatttttaacagagacaagttttcgccacattgaccaagctagtcttgaactcctggcctcactgtgatccacctgcttcagcactccagcctgggcaacaagagcaaaactccatctcaaaaaaaaaaaaaaaagttagaaaactaaactacaaggtccttaaatgcctgctccacagtattagccaaacatgaacaagatcccaggtgttaggccgggcgtggtggctcacgcctgtaatcccagcactttgggaggccgaggcgggtggatcacctgaggtcagcagttcaagaccagcctggtcaacatagtgaaaccctgtctctactaaaaatacaaacattagccgagcatggtggggtatgcctgtaatcccagctactcgcgaggctgaggcaagagaatcgcttgaacccgggaggcagaggttgcagtgggctgagatcacgccactgcactccagcctgggcaatggaacaaaagactccatctcaaaaacaaaaaaaaaatcccaggtgttctggattcccatccaaaagaaaaggggaaaccaaaccccctgcttccatctcacccaggatctcctgtcttcccaaagcactttaccgtctttcctgcccagctgttgaaatatcaaactgtaccaagattttggccatgatggactctgttctctgcacactaagagatttatcttcctgatcatcagtagaaatattaataaataatattggttgccatttattgagcagtgtgttaaacatccatattatttaatggatgtttttctagctgtgttttaaagttttaaagttgcagcatttgaatgaatgaatgacttctgagccaaagtgagaaaaagcaaacaagacacaaatgagttttctaaactatgtgtctccccgaaattagctctgctactttgcacaagtctcctttcctaagatcccgcttctcatctgttcaatggggatatgaacatctacaagtttatggtaaagtttaaaagcacatttgtctgatactaagagccaataaacaatcgttactttcattaccccagttggcaatttgagcagggcatgacagggagtttgggtgacaggcgataaagtaacggacattatggaaagtctgaaagaatgtaataaggataatatattttagatgtatttttctcttttatattttgtgaatgacttttcccctggttagcctaaggtaattcttatgactcagggaggtttgagattgttacagcaggaatgcaaacagaaaaaaaaaaaaaaaagatctagcttttgatttccaaatttgagttcctagaataactgtctttaaaattcagaggttggagataaagaaaaggattttctagattcctatcacttccattaaaataccaagggtcagaacaatgaacctgaattctaaagctattggtagagagaaatgacctttgatgtaagaggtgtccctactgcacagaaaagatggggtgtttttcctttccaaaccaagggaatgtcaggggaagaaaagatagagattaaaggggaaaagtgagttttatgtatcttggcttctccattcagggctgatatcacaagtagtagataaattgaaagaaaggaatcccaaaagaagaaaaagactgtgttctgctcctcacttaaaactcagcaaaagggacccccaccaagtggcccatgccaatatgtaacacagaaaggaaaaccaacagcatgggcctcttggcttggaggaagccaaagtgcacatttcttcagtcatactacatctgggttcatctagccacctctgccatgctgcccaagttcaaccccaatgagatcagtcatatacctgccaggtgccctggtggaaaactgggtaccatgtctgccctagcccttaagatcaaccctctggacctgtctccaaaataagttggtgatgacattcccaaggccacaggtcaccagaagagtcaaaggattacaatgaaactgaccattcagaacagacaggctcagactgaggtggtactttctgcctctgccgtgagcatcaaagccctcaaggaaccagagacagaaagaagcaaaacaatcaagcacagtggaaatgccatttttcatgacactgtcaagattgcatgacagatgcagcaccaatccttagtcacagaactctctgggacccgtaaagagatcttggagactgcccagtctgtgagctccaatgttgatgggcgccagcctcctgacatcatagatgacatcaaatcaacagtggtgcaagtaaatatccagctagctatgaactacgaaggaaaaaatttcaataaaggatcatttgacaactaaaaataaaaacacagcatggttatgacatagggtctgcatgagtgcctttgtgcctccttgaaaaagccagtttccccatgcacagatgtcagtagtacaagtcaaccaggtatccagagacattgctaaaagatgtcaataccaaatctaatcacagcataaggaccagtgtatacaaatctaaagcccactttctcctgctcactcctaaagctcactttctcacaacactgccaccccaatataccaagaaaccatctagaaaggagggcagacaatagccacttacctttaaaaacaaaaccaaactctttacaccaaaacttcttccatatccaaagagtctaaaatacagttagtgatgaatgtggatgtggagccaatgagtaagatttgatcagttacagaaaacaagtgaagccacatttactttgcacaaccaaatgtagtttgctaagtttttgaccccattatatgaagaagacaaatcatccataactctaccacgctaaacatccattacttttttttttttttttttgagagtttcgctttgtggtccagcctggggcgcagtggtgcaatcttggctcactgcaaccttcgcctcctgggtttcagcaattctcatgttcagcctcctgagtagctgggattacagccacccatagatttttaaaatacttctctttcacttgtcttgcataggcatgattattgcaaataactgcaatgcatatcagtcacaattttatatcgtgctctttgtaaaattcatcaaaattccttttccatgctgctgtgtgttcttcctggttaccaatgttaacagacgcataagctattagtcaaaactcttgtcattgcaagtatcataaagccaattccaactcaactgaagaaaatgggtatttaatggaagaacactggagttgctcattgacctacaagaaccacgcagccctgagggcctaaatgcaggggacgggggcttgaagtcaccagagttcttcactgctcattcttcctacagacatctccacataaatgtattaggcatttggccatgttaggtcattttcattagccacattttccaaatggggacggagggactaagggagttagatgtgactcactgcaggtgattcagctgctaaatggcattgatttgaaaaccagcatcttgattcagattggtggatccatacaaattgcaagggacaaaacttttcaaaaatatgtaagaatagtcacataggataagaatatatttgatttttgtgaggactacagctgaaggagaagagaaacatgcaaatggggttccatttcccacaccagggcagcttctgtcatctcagaatgcccacctggcatcttcctgacccttggctcacccacaaggaagttcatggcaatattgttttcagaagccaatattctcctgtctctacttgcaagaaaataactgagcccccccagtaagtataattggtgcgaacagtgatttattatatgcccagttctccagatggcctttcatatggaaatgatttttcctgaaaacagaaaaatatgggttttttcccttctcagcaggttataacaggtttacaatccactgcatcaaaactagaatcaaaaactttaacggagttcccttaaaacagaaacacaaaaaacacgttccatctggtaaataattgccggagttgcattcctgtgcattcaggcacaagctaactgctgtacagcataaagctgtgaaaatgtctaggcttaatggggaaacatgagataagatctacttaggtctatcatatactcaaattgcaaccttctgggatgctggttcatgccagactcaaatcacccataatctgatgggctagacagatgtgtaagattattccaggatatctgaaaatctcacatgtgagtacaaaaggctaggtggacacgtgcagcccttattctatgtgaatgaaggggaatgtttaccaagaaggtcattttcagatgaccatagttgaagagcaaagtcaaatgtggttctaagtgacatgtcctctgcctaaataacagatgagaaagtatatctaaaaaggcttatatcatcctgtgatggaatacttaagaatggggaaagcatttagcagtaaaaagtaagttaccaaaaggatttaatgcagttagtatgtagcaggttaatttcagtagatgactctaagttatgattttcatccagaaagaattattttcgtcagctttccaccagtggaacatacttcctcctaagctccctgcctctgaaagcataggcaggggagccgtgtattagagacgttgtggggaagatctccacatttggaaagctgaagatctgcagattaggggtgacactcaaattccttaaggggttgggcagataaattgtgtaaaatggtaaggcattagaaagtggaccagactgcagaggactggagaggcacagcccacctaaagacattcaaatttggtacagatgcttcttggcttaccatggggctactgtgtcccaataaacccacctaagtgaaaaaatgcatttagtacacctaacctaccaaacatcacagcctagcctagcctaccttacacatgctcagaacacttacatgagcctacaattgggctacatcatctgacacaatgcctgttttataataaagtgtagaatatctcatgtaatttattgaatactggactggaagtgaaaaacagaatgattacacggtacttgaagtatagtttctgctgaatgtgtatggctttcacgctatcataaagttgagtaattataagtcaaaccattgtaagttggagactatctgtatttaaaaacaaaacaaaacaaaaaaaaacccaaaaacaaaaatagactggtctggccaaatagaccactttggaaggacgtggcctatggatcaagaggatatttgccgctcctggactagcaaatccttaagccttctttgcctgctgagttctgtgatgtgtataaaaataatgcacttttatctaataagagccaaacacattaacctctgtggtaggagaaagtggagttgaacagaagtattgaatgtggtctccatcctcagaaaactcaaaactactttaaaataagatatgtccatacaaaggcagccaacaacggcgggcaaaaagctcatgacggctcattaggaagcatttctaactttgatctagatgggttcagaaagagccacagaataggcaaggcttgagtggggcttaaaagaacaaataggtctgacatagtggctcacacctcgatctctactcgggagcatcgtttgagcccaggaggttgaggctgcagtgagctatgatcacaccactgcactccagcctgggtgacaaagcaagaccctgtctctaaaaaaaaaaaataaaggatgaacattcagctaaatggagagtgtataggaggatagagttgttagatagtaataggacaaacaagaagcccaggggcgaggaggagggtcatgcttggatccttctgaacctctcaacttcttcctcagatcctaaaattggcttcctgtcacctattctgttctgagcctcctcctcagcctctggacctctcccttcttatgaactaaaaggtttcttagggtcacagttcccacagctgggccctaccacctgcagtcagagcccttagcgctccccttgtattcgcctggtacatatcccagcctcaccgcctgtttgcagacttgtcaacacagtcattgggctacctcttggacaatcacccttgatgctgaatcacccaagcaaattaattgaattttcaagtgacgagtgtaatcctaagcacttaatggtcagaagtgagggggcacaaactattttcggattcgaatttgtctttattatgtggtgtacacctttgttggggtactaagtgccatcagtaaatagctagcagcaattgatggcttacaacgtgccagaatctgtgctgagcccagggcatgcatgccctcccttgccaactcaacctccaaaatggggcacaatattttcccctctctcgagatgggtaaactgaggctcaggggttaaataacacatgcaaagtcatacaactaacgggcatggattcaaacccaagtcttctgtctccaaaaactgactacaatcacatgtggttgacggttatcactgcatgtgattgtaccattcatatggatgtgtaaatgcaccctcaatggcacagaatcacctgctggcctatcattggatgtaagcagctgccatctgccaaacaatacacgcatttgatgtatgaatttgtatcgctgactcttcagacgcagtagtcctcccttatccaaggtccaaatatatgaaacagaaaattccagaaataattcataaatttcaagttgtccgtgttctgagtagcatgatgaaatcttagccatcctgctctgcctgccggggtgtgaatcatctttttgtccagagtattcacactatagaggctccctgcctgttaatcacttagtagatctgttggttatcaggtcaactgtcgcagcatcacagtgcttgcgtccaagtaacccttattttacttaataatggcccaaagagtaatgaggtcagaatattgttttattatattataagttgttatcctttattgtaccaaatttataagtgaaactttatcatagatatgtatgtataggaaaaaaaaacatagtatatagagggttcagtacaatccatggttttgggcatcctctggggtcttggaacataccccctgtggattagaggggagtatggtaatgcagcattctcaccacatttgaatcatctgggggcactaataaaaaagcactgatgccttagcttcaatccccagagatttagatttaactggttttggtttgaatcaaacattggaatgctagaggagcttcccagatgatcctaatgtgtagagaacataggcagtgaatagttgctaggagtgagggcttggggtctgatttctgttaccataggccagctatgacacacctatgagtcttagttttctcatctataaaatgggaactacagaactgtgtactttatagcactgatgcaagggttaagttagatggaaacaatggaatgcaaaaatggtaaggttcctggtgccatccctaaaagcctcattgatccataatgaaatggaagtttatagtctcttaggcaaacacccattggttatatgagaaaatgtattctcctggctttctactcagactttctgacacctcagggtagaggagagggctggacaggcactcttgacaacctgctagctctttcagagatgtaaatgcaaaggcctttcagagctagacagctgacatacagatgtgaagtaactgggataagctatcagggctatttaaaaaaagggagacagagcgagcaggtatgatttgaagagaagataccccataaaagggcttaaagttcattaaaaataataattactaccaacaaagtgctagccaaacaaatccgtctgtccccacatgcagcaggtagggtgccagtttgcaccacgagtagttcacaccttcagctttagagattcaggtcagtggctcctccctgcttctgcacttgtgagctgagggcagctacttccccttccattggaagccagggggtttcaaggatatgtcggtgactatgaaggggcttgcagatgacagccagatttgttaaaggcagacaagcagttatttgtttaaaagttcccaccttacagagggcccatctctgtttcaggctagctgtgtggcctcacctaacttctctgaaccattgctcacatgtaaaacacggaaaaaattatccacttctcagggatgttgtgaagattaaaagaacaagagatgtagagtgctcagcacagtgcctctgctctgggaagcactccagatgtgtctgcttttgttgtgattttgccattcttcaacaaagttaaaagagcctcaagcactgtaagcattgtttctccccttgccctggtaaattatttaaatgacatggttcattctaatacattacctcatccctcctttgaagccacagtcaaaagcattgacaaacaagtttgagagagataaggagaggcaagataaaagatataaagtgaccaaaaagaaaaaaggtagataatttgttccttgtctgttctcaaggatcacaggtctggtggcttgctgaatggggtatggagagggaacacggtacacctcccacatctgtggcctgcagtggccccagtgagcactgggcagcacccaggcagagagaaggactttctggatttctctggggatagttactctcagtgtttccaagaataagaatccagcatgggattcatcccaccttcattgcattttgctttgctttgacatctgccatggagaatgcaaaaaaaaaaagttaggcctcataagacataaatgtgtcaatgctttggcctatccaggcccagatttgagttcagagaggccctggaagcctggactagtcctagaccaactttggttcttgggctttaagaaacagcattcattcacctgattttcaactggggaaccaccctccaccctcactgtcagtcactgtgctttggatgaaactgactttatccctgtcttcagggagtgggtgtggtattcaggcctggccaatcagagcatcacattcctctgatccagtgatagatagtgacccattgagaaatgggcatgtgaacccctcagagtcagagtgatacaaggaaactgtttttaagggctttgttaaggtataatttacataccataaaattcacccatttaaagtatacaattcaatgatttttagtaaattttcaaagtaaccacaaaaatctggtttttgaatatttctataatcacaaaaagatctcttgtgccatttgtaggtacaaggaaactttagcagagttattgaggaaaattcacctgttccttttgtctgggtctgtttgcaataatgattacaagagcctggatctacatagaacctgagaataaagcaaaaactgcttagtaaagagataggctgggcacagtggttcacgcctgtaatcccaacactttgagaggccgaggcgggcagatcacttcaggtcaggagttggagaccagcccggccaacatggtggaacctcatctctactaaaaatacaaattagctggatgtggtggcgcatgcctgtaatcccagctactcgggaggctgaggcaggagaatcgcttgaacctgggaggcggaggctgcagtgagccaagatcgtgtcactacactccagcctgggtgacagagtgagaattgtctcaaaaaaaaaaaaaaaaagaaaagaaaaagagagagagagatgtagagaagctgagtccggaggtccctggttgaggctctgatcaagctgaacctgaagtcagagcttcccctagacttcttcagttccatgagctgagaagtttcccgttgtctttagccagtttgacttgtgttttccatctcttgcaatgggatgaatctcgcctgactccaaaaatttttgaccagactctaaagattagaactggaacctttattaattgaatatcagacaggaaagcaaatctccagatttgctgtaatcaaaggattattttacatatgatcatagatgccattttacaaatgaggattcagccctgcaaaagtcaattgcttaaccaggatacataggagaaactggagaagtccgtgtaactctgaatttgattttgtaaccctgaatttgatcctgtctttcctcttgaagtaatcatcatcgtcgtcatgatcatcatcaccattacctcttacaaaatgtttactatgtgtcagacctatgctgagtacgtactgtataaatattaactcatttaatcttcacaactgccttatggggtaggtattattattattctcattttacagatgaggaaactgaagtctgtagaggtcacataacttctccaaggttatatagcctgtgagtagcagaggcaggatttggatgcaggcacactggctacagaggccacactcttaatctgtgcactgtactgccttttataaataaaaattaatctaacataagcttttaatcagtgttccagtggtctttcagctagagatactacctttttctgaacttatatttccgtcattataaaaaaataaaaagcaaaaacctcaaatattttctgtattttaagactcttcaattatataaacaatttttatctgatttcaagtagtcataaacttctgtgcttcttacaactttgttctgctcttctaaacacagtaaaagtaaagtttaatcatggcaaaagtctaatttttatgtcttcttgcagtaaaaaactagatgactgctctgctttattgatatttaatatgatatggtaatgatatttaatgtaatttaatatgaaattttacattttatatcagccaactgacaagaaagtaagacctggaagttatttttatgtagaagaaagatatgctgaattttaggaaattcagccagtggatatatacaagatggttgaggaggggagctgcaggcacggagaacagcttagaaggctgctcctgcaaatacagacagttcccaacttacaatggtttggcttatggtttttcaaatttatgatggtgtgaaagccatacgtgttcagtagaaaccacactgcaagtaccccataaccattctgtttttcactttcagtacagaattcaataaattacatgagaaattcaaactttattataaaataggtttgtgatgatgattctgcccacctgtaggctaaggtaaatgttctgagcgatttaaggtaggctaggctaagctatgatgtttggtaggttagatgtaagtgcattttcaactcacaatgttttccatttacagtgggttcattgggatgtcataacctcatcgtaagttgggtatcagtacctcagatatatttgtttagtatagggagtctgtacaagttacttgggattgacttggctcctggggcaacagaactttgttctaagttctaatgccattgttaaaatcaatgagtcatcaatagggcactagaggtaattgagaagctgccctattgggaggggtagataactagaaaaacagcagcatgaagtgtggattggagtacttaatggtggcacctgggcaaattattctaggcatgtctgcacagacctcaaatgatggaggtgggttagagttcggcttcccaaatcctctgtcagtgatctcttattgcagaaggcagcctggtacccctaagagtctaagacacagcttcagcggccctttccagttttctatttaaaattcttgtagaatttctgcttcactccctaggaaagcctatgtctgccttcgggatatgtgaaaatttgacaagaagtaaacaccttccctgttcaacataggccccaccttcccaagctctcatttctaggtttcttgttctttggtccatattcattctatgaggagatggtcaacatggctacgaactccacatgaactcagtattaactggttaatctactccatgaatccctacaaatacgggagcatgttggggtatggttcttgggtaatgtgtatgcattttgattgaggctgaggtttttgctgcaatcagtggtctagcctcacaatatccagtgtggtgggaatgtgtggctcaaagaggagaggaggatggagcttctggagaaggaaaggctttggagcaagcagggatattagagtctaacaagtaacagcaagtttcttacacttttgtgttcaacactttgttgctcattcatgctggaaaagaagacaagaaacaagccaaaattttcattcatcctcagattgtcttattctaacttggagacaaaatctggatttgaaccttgtttctgccgtttatgagttgtttgaactcgaacacatcaactaatctcaattacctcaactgcaaaggagcagttctgataacatccttcctgtctcattcacagggttactgggggaatgaatcagtcaatgtaatcaaaaatgctgcatacagacagtgtaaactgtgactgtcttgtaagagtcaagtgtcaataatgactgtcactttgatttggggtcaggattcactcttactgctgcctgttatgtacaatctcaagcagtgttgtttattattattctaagaatagcatagcttttgggtctgtattttacaaaccaaatattgtaattttagggataatggaatattaggggcataatggggaaagttgaaaaattatggtcagtggagagatagttaaaaaaaaagtactggaatagaagttaggagacttcacctagtacctcagtgatctggagtcatcatggcaccatgctgggcctcagtttcctcgatctgtaaaatgaggatgcttgatccattgtttcttaactaggaggagttttggaatcacctggaaaatccccaaaggtagaatttttgttttgtttcttgctgtgtttccaaggcctggaaaagtacttggtgtggggaagctactcaataaatacacatatattttatgaatgaataaactttttcaaaattcataggcctggttccactctgaaatcctcgtgcagtttggggtagagcctacatgtgtattttggaaaggcctttctgatcgttttgccaagtgctcctggctaattaataaccaccaagagccactaaactcaacaatctccaaggtcccttcacatgcagttgccacatttagcaaacaaaaatgcagagcatccagccaaatttgaatttcagataaacaatgaatacttttttagtgtaagtataggtcatgcagtatttggttgctgcaacttaaataaacataaccagataagacttctgcttagactgatagtttgggccagagagtggcaccttgaaactggcccagatttgaaaatcagacagagatagtcttggtttgagtctctgccctgatcttagcagattgcttaacttcactgggctccacaactacagtgtctaccctgtagagttggtgaaagtattagagataatagaggtaagatgcccagcacttagcaggcatttaataaagcttagctattattactattttttatctgctccacggggtttgaagaaaaataatagtatcaatgagactgttattggcaatactgtttactcgtaaattggcacttgaaataaccaagattatagttaacagttctaggtagagcttggcaaagttagattgaatgctgaccttgtattaaacaatacctctatgtctgggggaacaaaaccgtactaagtacagatcatccagaataaataaaggaaggaagtacttttatttcattcattatgaaatgtcatttgcttaactgacttttttgacgttaaagataaatatttgttcaggttttatagggtcactctctggggaaataggctattacttggccagcggaaatacttcaatcctgaccaggtttttctgacttctaagttaaaggcatcttcttcttctagagttttagttgtttctagacattttaaatacatctccactggttaaacaaatagacagtcaggcacagcagttcacacctataatcccagtactttgggagcccaaaaaaggtgggaggattgcttgagctcaggagttcaagaccatcctgggcaacaaagtgatacctcatccctactaaaattaaaaagaaaaaaaagccaggcacagtggtgcacacctgttgtcccagctagctgggagctgaggtggaagaattgcttaagcccaggaggttgaagctgcagtgagccatgattgtgctactgcactccagcctgagaacagagcaagaccttgtctcaaactaataataataataataacaataggcaaacatagcagtaaacataaaatgttcatttaaaaaattatctccagaaagatctatttggacaaaatctttagataatttcattatcaaatttaaaaagagatggctggaaaataaattgccaaagtttcaactgagcaactctgatattggcaaaaatacgttaagctccctatgtttacttcattgctcattcaacacatatttattgttgagcacatattatataccagacagtgtggtaagtgccagggactatgagtaaacagaacaaaattcttgctcttgtggagcttatattctgacacaggaaaacaaatataaacataataaatgaattaattagaatatagatggcaataagtgctacgaaaaaagatgaggagaacaaagatgagactatgtgaagggctaaagtggctttttttttttttttttttgagacagggtctcattctgttgcctaggctggcgtgcagtggtacaaccatggctcactgcagcctcaaactcttgggttcaagggatcctcctgcctcagtctcccaagcacctaggaccacaggcatgtgttaccatgccccatctaatttttaaacattttgtagagatgtgctcttgccatgttttccaggctggtcttgagctcttgggctcaagtaatcctcctacctcggcctcccaaagtgctggaattacacatgtaaaccaccgtgcccactcctggagtgcattttcttttttttttttagacagagtcttgctctgtcaccaggctggtgtgcagtggcatgatctcagctcactgcaacctccgcctcccgggttcaagcaattctcctgcctcagcctcctgagtagctgggactacaggtgtgcatcaccacgcccagctaatttttgtattttttagtagagatgggatttcaccatgttgcccaggatgctctcaatgtcttgacctcgtgatccaccctcctcggccccccaaagtgctgggattacaggtgtgagccactgtgcccggcctggagtgcaattttaaatagcatggtgatagtgggcctctctggggaggtgacatttgtggacaggagagaaagaaggagcatgctgatttggggcgagaaaagggaaacgtcaaacacaaatcacctaaagcaggagtgatatggtttggctgtgtccccacccaaatctcatcttgaattataactcctacaattcccacatttcgtggaaggaacccggtgggaggtaatcaaatcacgggagtgggtctttcccatgctgttcttgtgatagtgattaagtctcacaagatctgatggttttcaaaatgggagtttccctacacaagccctctctttgcctggtgccatccaagtaagacgtgagttacttctccttgccttccgccatgattttgaggcctccacagctacatggaactgtaagtctattgaacttctttcttttgtaaattacccaatcttgggtatgtctttatcaacagtgtgaaaacagactaatgcaaggaacatacctggagtgttccaggaacagccaggaggcaacgtggctggacaggagacagggaagaggagagtagtaggagaaaagacagagtcattattgtcatcataattgtgacagaactccacaaacctaacttccagttttgagtcttagtttatttactctgtgactgtagggaaatccttaactgcttaaatagaatgatagtacttaacttgcaaagcatcgatagttagagatttatttcacaaaactgactagagagaatcagtatagcttagccatgctgtcggtacttacgtggatagctctgggtttatatgctgatttacttactagatgtgtgtccttgggcaggttacttaaacctctctgtgcttcaggtttcctttctgtaaaatgaggcaactaataaatgcatcctttagagctgttaagggttgcctggacaactgtgaggctgtctgtgagagacagtctcacatcacatgcttaacatagtgattggcatatagaaagtactaagtaaatatcattatttattattatttgaaaagtttaagattaaatatattgaaatatgcatttaaatgtatatttgaaatatatatttaataaccaaaacatgcttttgagaaaaaatatcttattgttattaatagttgtggccaggtgcggtgtcatatgcctataatcccagcactttgggaggccgaggcgggtggatcacctgaggtcgggaattcgagaccagcctgaccaacatggagaaatcctgtctctactaaaaatacaaaattagccgggcgtggtgacccttacctgtaatcccagctactcgggaggctgaggcaggagaatcacttgaactcaggaggcagaggttgcggtgagctgagatcgtgccattgcactccagcctgggcggtcaacaagaacaaaactccgtctcaaaaaaaaaaaaaaaaagaaaagaaaaccagctgtggcctggtagccggcctccctgtctctgaatattcacatccttgtacagtcccttcccatattgtaccagggttggtttgtgcgaccatagaatatggcagaagtgatggtatgtcacttctgagattcggttataaaagacattgcagccaccatcttggtcattctttttgtctttctctccatccccacttggtctggagaaaaccagctgccatgtcatgggacagttcacgtgacaaaccttttgccagcaaccatgtgagttgctgagcctccttagaagagtgaagaagccttctcagaagtggatccaccagccctggtcaaggtttcaaatgacagaagcccccagtgacattctgattgcaaccttatcagagactgtgagccagaaccatccagtgaagcagctcactggatggttctcaggaactatgtgaaatgataaacatttatagtctcatgctgctagttttggggtaatttgcttttttttttttttttttggagatggagtctagctctgtctggagtgcagtggggtgatctcggctcactgcaacctctacctcccaggctcaagcaattctcctgcctcagcctcccatgtagctgggattacagctacacaccaccacgcctggctaatttttgtattttagtagagacagggtttcaccatgtcggccaggctggtcttgaactcctgacctcaggtgatctgcccacctcagcctcccaaaatgctgggattacaggcatgagccaccgcgcctggccggcaatttatgtagcaataaatactaatagtttacatacatttttttttcttttgagatggagtcttgctttgttgcccaggctggagtgcaatggtgcgatctcggctcaccacaacttacacctcccgggttcaagcgattctcctgcctcagcctcctgagtagctgggattacaggtgcacaccgccatgccccactaatttttgtatttttagtagagatggggtttcactatgttagccaggctggtctggaactcctgacctcgtgatccgcctgccttgacctcccaaagtgctgggattacaggcatgagccaccgcacccagcaatacattttaagttttcataaacttttgaatataaagaatttattgggctcaagcccaattctatcatttttgatctttaaagatcttcactgatccttggtagtttacaagcattcattttttatataattgttatcagtgtatacatcctacttcatatctgatttttcctcttagaattatttcatgtataccaatagagtacaagattcttagcatttatactggcggtatagaattctcccctgttactgtgtaaccacgctacctccaatagtcccttttgtacctggtttggtctgtgtgatgatagaatatagcagaagcaatggtatatcacttctgagattagattataaaaggcattgtgctaccatcttggtcattctaactttctctctctccccacttgctctgggggaaaccagctgccatgtcatgggcagcactatggagcaatacacgtgacaagccttttgccaacaaccatgtgagctgctgagtctccttagaagagccaagaagccttctcagaagtggatctatactggctgtatagcatcctgccccgctactgtatgtcacaccacctcaaacagtcccttttgttggaatttaaattccagtttttcaaaataataactggcacaataaaaatagtgcaaattagctgggcagtgtagtgaaagttaaatagatcagctctcttagatacataaaacacagataacacagaaggggcaagtcctcttaaagtacatagaccgtgaacaaatattgaacacatgcatttgttaaataagtgagcaaatacaaggctaacctaagacagcaagtgcaaagtaactaggtgaacttacttgtttagataataactttctagaattctgtgtgtttcctagagaaatacaggaatgacagctgacaataaagctttggaaaaatcctgtaagtaattgccttggctccaagtatcaaagcagaatttcggagaaggtcctcctgcactaaagtcattgtccccagactatgagtttctgcctccttctctttcagcattctcctcccctcctctggctgtcctttgtcagactctacaatcatggctagaagaaaaaagttgacttaaccgttctttgttgaaattcgggactatgttagagataccaggtctcaatcaaatacagccttcaataaaagactcttacgtaaccagatcctatgagcagagagccatcgtgcctccaacttagtttcttcagattggctggttttggtgctcaacttttgactttacccaccttcctgacaaagtgttgaggaccactaggtaagcatgctatcttcaacgttaaaaaaaaaaatcatgattgaaggcagctgcacttcatatatcaaggagcattgaatataactaactctaaaacttcatcaggtcatgaggttttattgacatcagtgtatttggcttcagctgtgataatcatgtggcgcagtctcttttcctccccgcaatgccttgcctcccttggaagactccctccaccccaccccagccccattcagcttcgttcagaaaaaccttcatttttatctcccattaaagtttgtctgatgaaaaggctctgaggctcaaatgacagctcagttgtttgaaacctgctgggttagagaatggtgctataaggttaagatcaaaaggtcaccaggtcagggtttccttgctgaggaagaaaagcttcagtgacagtgactcagtgtaaagttatcatcactagcataattaaacacacacacacacacacacaccacaatgcatacactgtcccagctggaaggggtcagggtggacttctggctctggcctccagcaacctgggttcaaattctgcctctaccacttggcactgtggcttcttgcagctatttgaacctctgtgagccccattcttcttgtctgcaaactgtagataataatcatgactaccttacaggagaagtaaattggttcagagaacacacttaactacagtgccaagcatggaagtaagctctcaataagaattattgattattaaaactacattcttggccaagtgcaatgactcacgcatgtaatcccagtactctaggaggccgaggcgagcggatcacttgaggccaggagttccagaccagcctggccaacagggtcaaatcccatccctactaaaaatacaaaaattagctgggcatggtggcacatatgcctgtatgtgccagctactcgggaggctgaggtggaagaattgcttgaacttgagaggtggacgttgcagtgagctgagatcgtgccactgcactccagcctggacaacagagcaagactccatctcaaaataaataaatacataaataaattcataaataaataaatgaaagaaataaaattatattcttgttttagttataacaacattttatatgtctctcaagccaaagtctaatagcattacaagttgtttttgcacatgtatcatctccctttaaaggacagatagtttcttgggattattcttatttttgtcctttatgaagcctaacccagcactttcagcacagcaggccttcaataaatatttggtaaataaataaataaatgttctaaataaagtggatctgcagggacaggtttgtacacataatccctctacttaggatcctagtagaatgacatacacattctgaatgctctataaatattttataatagtaacaatgatataataattataattatgaatgaagattactcttagctcaatttcctgaactagaattatgtccttcagccacggagaaaatgtattcatacagggttccagcttaatgtaaacagaattgtaacttgatttttaaaataactaaagcaaatgaaccaatgtgtcctttcctttcctttcaaacagttgtttccaggaaccagaagtgtggggctatcatatgcaagttgtgataaattaggtcttttccttcaacatttagtctcaaaaaaaagaaaaaaaggaaaagaagactccttaagggcagtatgaccatgggcaagggtgagggaacacacagctttccttagtaaatctcaagcctccaaggttggcgttggaaaggatctgcaggtagcaaatccagctgtcccactgtgcacgccctccccagttcaccttttctctgagggagactcattggtgctcaggtatgcatgtgactcttcacacacacacacacactcacactcacactcttgccaccatgacttccatttaatgttcaagaattcttctctcacagctctgtaaaatatttgagaaggacaaaaactttcaaaaaacccttaattataactgtagtatataaccatttttttaaatgaaattaaggagagtataaattggaaggctgaggtgggcagattgcttgagctcaggagtttgagatcagcctgggaaacatggcaaaacctgtcttgacaaaaaatacaaaaaattagccaggcgtggtggcgtgtgcctgtggtcccagctacttgggaagcggaggtaggaggatcagttgagcccgggaggtcaagggtgcagtgagccgtgattgtgccactgcactccagcctgggcgacagagtgagaccctgtattaaccccccacacacacacacccacacacacaagagtataaagaagaaaattacttctagggaccaccccagttccatccgtcccaaaggtctggtatgacttcggggatctctcgctggggtgtcttccttgctccctcctgacttgcttccttgctgccatataccctcttaggccctgatgggaaactcagggcacgagatttctacctgcagcatacccaaggctcattctgatccaacttactctgtgaggtttgatccttactgcaacttaatgaaagaggcacaggtaggtattactgccattttacagacaagaaacttgaggcttggggagattcaacagttgggctattgctatttgcacacaattccaagtatttagcagataactaattgcaccacacgaaggtctactacagaaatgggctgatggggtgaaactcggaaccagggcagatgctctttaactacaaagcttgtataacgcgtggtcatgttcagtattaatactagattagcttaactgaattctgagacaatggacacaagacaaattagatttgatgagaaaggagggagaggaaaggttctaaacatgggcatgctgtcagtaggatagtcctccttgtgacccacaactgacagaatggaggaaaatattttaaatcatatatcagataaagactagtatcacttatcagatatgaataaagacttcttacaattcaataataaaaagacacataatctaatttaacaatagacaaaagatgtgaatggacatttctccaaagaaaatatacaaatggccaatacgaattctcaacataattagtcttagagaaaagcaaattaaagccacagtgagatactacttcatagccactaggatatctataatcaaaaagaggataacaacaactgttggcaaagatttggagaaattaggacccttatacattgttaacaggaatctaaaagtgtatagctactttggaaaacagtttggtagttcctcaaaaagttgaacatggagttggctgggcgaggtggctcacgcctttaatcccagcactttgggaggccgaggagggtggatcacgaggtcaggagatcaagaccatcctggccagcacagtggaaccctgtctctactaaaaataaaaaaaaattagccaggcgtggtggcgagcgcctgtagtcccagctactcgggaggctgaggcaggagaatggcatgaacctgggaggcggagcttgcagtgagccgagatcacaccactgcactccaacctgggcaacagagcaagactctgtctcaaaaaaaaaaaaaaagttaaacgcagagttatcatatgaccaagaaattccattcctagatacatacctaagagagaggaaaacatgtttattcaaaaacatgcacttgaatattcatagcagcattattaataatagcccaaagtggaacaacctcagtgtccatcaaaggatgaatggataaacaaaatgtggtacatccacacaatagaatattgtccagcaataaaaaggaaagatgtacagaagccccaggagccacagccccagatgaagctggcatccctgggcccaattcctgctgccacagttccactattgccagcccccagaccttggagatcctccaccgccgacaaggctgctaccaactgccatccttgcagagggggctcctgcaaatcttttaccttgtacttgaagcaggggccagggaagaggactctggaaaggacatgtgggcctgagacaccttaaaaacaggaaaagccctgaggagcacgaaggggaaacttttttacctgtacccttttggggacttttggttaaaactgagaattacattgacatagatcaataggagaaatgcatacgaatttgtttaatataagttttgtgtggcataggagactttacaaggaaatgaagacccaaagatgcaattagagatgaacatgtatatactgatttagacaaagagaagtactttatgaaaatgtgacaaggaaaaggggcttgctagttaattggtgaagaagtggtgaagaggataaggattagtctaacaagtttgtttgtaatatttccctcagactcttcccctccttgatgatgataatatttccttctggtagagagagaacatcttttgcatgggaattttatctgctgcttttaagaaacagaaggaagggtagagtgatcttcttgcacctgctgttttttaagcgcctttaactcaaaatggtcaacatgctagagtagcatatttttaactccttcaagcagctacaacaaaatggggagaaaaaatagttacaactgtggcagtaacctacacgtgtcaaacatctctcatgaagcaaaattaacaagaataataaacaagtgacatgtcagctatggagttatcctcttactgaaagagatcccatagataataggaatttcaaaaaatctgtaatggaaactggctttaatgtaactggtaactccataaggctcttcactctgaaccactcattaacaagtgcttcagttgatgagcaagttggttcttatcctggactgcagatgccattaggtctctgctggccctatgctgatgaagacttttttaaggatgaaaatgagccccatgttaattcatgttcaactacagaaaacaacaagtgaaactttgtttgctccaaattggaaactgaaatatggaaacagcagtgtggaaggaaatttaacatatgaaggtgatttatcagaaaacgaaaaggcaaaggatactttattcaattatatttaaaggagggacctaaactgaaagccagaaacaacagaaaatgttgtagaatctttcacagaggagccaagtgaagtttttccataccctgattttctccctcctacggagcttcagtaccctggacttgcacagatgaggccctcacaaaatctgaaaattggaaagcaacaggggaaccttcagaaagctctattattggaaatggaaagattacaacatatgactatacaaaaagagaggtcaaagttacaaactactttctgtaccccagcagttactgaatgactttcttcctccaaagctatactgagagtgggacagccaaaactttctgattcactgagtcttcagacatctcgtgtagataaaagttgagaaaaaagaaaaaaaaaaccaatcgggttctttcaagcttgagcaaaatgcttcaaaatggatttggagcaatgctggaaaatataaatgaaattctagaccaccaactctaaaaagttcatccaccacaaaacagttggttgcaacttaggactttaaaactcttaaaagttcatttttaaatccgtggcaagaactttcagcaaggaccagacaacgcactgactggttaaagtggcctcaataaggtgtctgcccccaaggttttcagtaccagtctccatcttttcttgaaaatgagaagaaataaatcaaggcaccaagaaccaatcacaaactttataaaaaaaaaatagtgttgcatagaccattctatatttagaagctatttgttgccttcatttatagctaagggcttatgtattgactaaaaataattcttttctttcatatatctcagtgtgagcaaatctattccaagaagcccagctaaaatatggttcattgttcccagatacaggtattcgcccacgcacagacatacacacacacacacacacacacacacaccccaattgcttgatatgatatcgattggaatttgtgaaaattactgctgagagtattttaattttcttaattgttactttttaaaaaaatagagatgaggtctcactttattgcccaggctggtctcaatccaattcctgggctcaagctatcctcctgctttgggatctccaaatgatgggattataggcacaagcgcccagcctcgcgagagtctttatataaatccaagggcttctatgctgacatgtttgacaatctttcgcatgttatatttcaagaaatgtttcacttagtaaacggttctattcaaagattgttcttttgtgacagttttccagtataattctatcatcagtaaatggtataatgggtagggggaggaagaaagtactgaaacatactacagcatggatgagccttgcaactattatgttaagtgaaagaagctagtagcatgttgttatgttcctagttatatgcaacgtccagaatcagcaaatccatagagacagaaagtaaattagtggtagccagcggctgggagtagggaggaatggggagtgactaatgggtatggggtttcttactgggatgtcaatgtctggaattagtggtgatggttgtgtgactttgggaatatattcaaaaccactgaattatacattttgggagtaaattgtatggcatgtgaattgtatgtcaataaaataactaaattaaaaatgaaatttcaagtataaatccactaaaaattcagaatctgccatacttttgattgattcgttttgcttactcttgagggcctatcaatgtttactgactaaatgcaaagagggagaaataaaggagaggtgaaggctgggaattctggggatggagagcactttttttttttttttcttagagtcgtgctctgtcgcccaggccaaagtgcagtggcatgatctcggctcactgcaacctcagcttcccgggttcaaggattctcctgcctcagcctcccgagtagctgggattacaggtgcacgtcaccacgcccagcgaatttttttgtattttttagtagacatggggtttcaccatgttggccaggccggtgttgaactcctggcctcaagtgatccacccatctcggcctcacaaagtgctgggattataggtgtgagccagtgcacccggtcgagggcactatttatttatttatttttgagacagggtcacactctgtagcctggactagaatgcagtggctcaatctctgctcactgccgcctcgacctccagggctcaggcgatcctcctaccttagcctccagagtagctgggactacaggcgcgcgccatcgcgcccagctgatttttttttttttttttttttttttttggtgaaaacagaatttcactgtattgcccagaactcctggggtcaactgatctacctgtctcggcctcccaaagtgtgaggattataggcctgagccactgcgcctggccgacgagcacttttaaaatgcaggagtcttcctgcctctgatatctcatcccttatcaccatgcaaacaattctccttttcatagaagagtagacatttggggcggggtggtggtggtgggggattttagaaaatatctactgcatccaaatgccctactctacagacgaaaaagcaaggcccaggaggaggaaagagtttgcttactgccacccagtgagctggcaaaggcgctgagattcaaaatgagctttcctgccttcacatatcttccggctgccctttgcctattccctaaacagtcaggagccatcaagttcaggaatttgcaggtgtgcttcgctgtgaactgtggaaaagcagcgtcttctccccagaggcaagcatgtcgccttgtgaagtttgatggctcttcacttgcacactcacaaaaaagactgagcgtgtgtaacgccctgctggatgtgtgcggtgctagagagcttgggggtgaggggaggactctctcccttaagaaaatcagttgactgcagagctaacattgttttttgagtaatacctggtttttataaagtcgtcccttcagttcccaagctcctcttctgtttgttcaagccaccttcaatttgaaaaagactgaagtcacagcttctcaatccctactaatttctcatggacctactggattgctccaaatcgagtatttgggactgaactaggaagccagttcaatcctgagcccccgaggcaggcgttgggtcttctgtggagtccccagagacctgcaaccttctgaacacgcatcctcccctttccgccgaggactctgtcctgcagccgagccagggcgaatgcacggaggtcacaagggaggtgcccttggaggcgggaggtttctggccgccggggcgaccgtgctgacgaggcacctgcaggaaacagagctctgcacgctccggtccccctcacccggggagggagaggaggtacagaggcgctgggggaggacgtcgagcaggccagcctcgttgccagaacccccgccccagccggagatgggagcaccgcaccgtctcacgggggctggatttcttctccccttgcgggtgtgtgtgcgaggatggacgtggtaaatacgggttggcagaaggagcgaaccgcggtggaggaagttcttctgcttagttctcgccgcggcgaggcccgcgggccaggcgcggcgacgaaggtgcacgaaggtgccccgcgggcctggtggagttgcagcggcgcgcaggcgcactgagggccgcccgcggccggctccgcggtacaaagagcgcccccgcggggagccgggcgtcctctgggcggagggagcagccggggcttcgccggcccgcgccgttcttctcacgcgccgctccggggcgcagccacagctgtcgcccaccgcgggtgagaggcttgctggtccgccccggcttccccgccccggcggcggccgtgcggttcgggctttaattctggcgcttgccagccggggccgactccgccccctgcgccccgcccttccccgagctccgggtccgcggcggagcgagcgagcggccggcaggttgggaggagcggccgaaggtgagtgacgcggcggggccgtgccgcgccccgtgccgcggcgaggttgtcccggagcgcgaggcccctacccctgcctcgggctggccccgcgcggagccgacttggcgcgcgccggggttgcgcggcggccgtggcggtggcggagggcagcccccgcgggctcccgctcgtgcgggtgaacccggcggcctcggggcggtcctgggggggggtccgagaggtggcgtcggccccgcggccgtcggagtttggcgcgctctgcagcggcggcgctcggccggtctggaggagggagaggcgcgccgggcacggagcagcgagaaagttcgggccgggccggccggcgggagggtgcgggcgcctggctaccccggcccggcgctctgtccctcggatgcctctgggcccttccctagcccggggcggaacgggggaccctctctgaagcggctctccgtggagttggatgttgcccttcgcgggagggagtggcggtcaagacccctttatcctcggccccagaggggcaggtggcctcgggtcgccctccgccaactccgaggtggcttcggccggggctggagggcggggaggcgggggaggggcgtgggcgctgcggcctctggggcggcccaacccggcgcgggcagcgtgggtttccgaggtcccgcggttccaggtcgagggaaggtgtaggggccctgaagcgggctggtccccgaatgttgcgttttctgtgccgctttgggcaacacgcagtggcgctcgcggcagccacggctccttgaccgttcatctccttcacccgggtcccgtggaactttcagaggcaactgttcttggtggctcttgcgggtcagcacgagccgtgctgcacgagcgtgacctagtgaaggccttgggcgagttggcgttaacaatttatggcgtccgccagcgctcgctttccgcacgtggcctctgcggagggtcagcccatcttattaaatagtggattctattagaccctgatacccgaggctaataaggaagcttaatcatccagatgtgtaatcgtgcagttcctttcctcaccgtcattgccccccacctctggagctgaatggaaatgagggtctgtttgcttatattgaattcctgagtttattcaagttcatttttaggtggcgttaacagctaagtagctgttcatctgccagtttctcctttcatccaactttctctactaaaatgttgagcacgttttatttaaaaaaaattgaagtgtaataaacatataaatttactcttctaaggtcaaaattcagtggtttttaatatatccgtaaagttatgaaatcatcactaccatctgattccatttcgttgcccccaaaaagaacccctataccgattagcagtcattcttccatctcccagcccttctccctcattttaaggcagctacttaggaagtttttctaagatagagactgagtgagaaaactgagaggtgattaactttgatcctttttctgttactaggtttggggaaaggtgctgctgaagcaatggaagaaaaattaagtattggctgtcctatggggaggttaaaatgaataaggatggaagagaagctgccagtagaggaataattgcctcctgtagagacccacaagttgggaatacattttatccccttagggcacagggatgctttctgggctctagacttgcctagtccataaatcactctagtcgaggttctgcctcagcgaaagtgagttctgggtgtgtgtgtgtgtgtgtgtgcgtgtgcgtgcgcgctcggcagggaatgttagaaggaaaaaagactaggcttaaaagtaattttttaaaatatccaaactggccccaaagaaagaaaccaaaaaaccacaggcaaatggccactggaattgatacattcaagactagtttcatttcatgagtatcagttcacaaatagttctgagttaatgtgtgcatacattaactttttatcccaagtgggaggaggaggatggaaaaggatctagttgggggcagtgcaaggaactgggaagaggaatgggataatggccgaaaggggcagtgcttgtgggagctgaggactgttgagatggaataactatagggtgagcagattctgaaagagcagagtgggtctgtgaaaagttggacacttcactcgggctttttgttggataatgtgtgcatgttttaaaaatcatttttagtaaggagagttgaagctatccaaattatgcaacatccactacacttctcactcacccttcaataagaaaagtcaacttgttttcaagtgtttcgggaagttttaggcctgttgcatgggtgacagcttatgccatcttttttttttttttttggtaatttagaacattgacatagcgagactccgtctctacaaaaaaaataaaaaataaccggatatggtggcacatgcacctgtagtcccagctacttgggaggctgaggcaggaggattgctttagcccaggagtttgaggctgcagtgaactatgatcatgccactgcactccagcctagatgaccgagcaatatcctctctcaaaacaagatgagctgtaccataggtatacatatcccacacccccagccctgccgacggagttttgctcttgtcagccaggctacagtgcaatgtcacagtatcagctcactgcaacctccgcctcccaggtttaagcgattctcctgcctcagcctcccaagtagctgggattacaggcacctgccaccatgcccggctaatttttttttttttttttttgagatggagtctcgatctgttgccaggctggagtgcagtggcgcgatctcagctcactgcaacctccgcctcctgggttcaagcgattctcgtgcctcagcctcccgagtagctgggactacaggcaccgtgtcaccacacccagctaatttttgtatttttagtagagacagggtttcactatgttggccaggatggtctcaatctcttgacatcgtgatgtgcccacctcggcctctcaaagtgtcaggattacaggtgtgagccaccatgccagtttttgtatttttagtagagacggggtttcaccgtgttggtcaggctggtctccaactcctgaccttgtgatccgcccacctcagcctcccaaagtgctgagggattacaggcatgcgcccccacacttggctaatttttgtatttttgttagagacgggggttttaccatgttggccaggctggtcttgaactcgtgacgtcaggttatccatccgcctctgcctcccaaagtgttgggattacaggtgtgagacaccctgctcagccttttttttttttttttttttttttttttttttttgagatggagtttctttcttgttgcccaggctggagtgcattggggtgatctcagctcactgcaacctctgcctcccgggttcaagcgattctctgcctcagcctcctgagtagctgggattgcaggcatctgccaccatgcccggctaattttgtatgtttagtagaaacggggtttctccatgttggtcaggctggtctcgaactcccgacctcaggtgatccgcctgccttggcctcccaaagtgctggcattacaggcgtgagccactgtgcccagcctgtagctatacatcttaagagtacatcttcacaaattgtcacaaagtgaacataaacatataacaagtactcacggaaagaaccaaaatattgccagcattgcagaagtgcccctatactcttgtccaatcactgcccctcccgaagagtaaccgttgtgccaactgtggattagttttatctgttttcatgctctacacagactcacacggtatatagcttttagtatcctggtttctttctcaacattatatttgtgagattcagctgtgttgttgcttgtggctgtagttcagttattttcactgctgtgtaatattcaattgtatgactacaatttatcaatttttaggtttgaggggcatttacatagtttccagtttcttacatggtaagtagtgtgactatgaacattctaattctagtacacgtcttgatacacaatatccaatacaaatgtgtacatttgtacaaattctattcagaagtagaatttcccagttccaaactaggattcagtttagaggtacagtcatgcggatttctgaagtggttgtagagtttatacttctacccgtagtgtgagagagttctgttgtgtcctttttaaattggaagagcagtagatctgcagagtttggcaaatggacaaaatatgacctatttattattttttttttggaggcggagtcttgctctgtcaccaggatgagtgcagtggcgcgatcttgactcactggaacctctgcctcctgagttcaagcaattctcctgcctcagcctcccgattagctggaactacaggcacacgccaccacgcccagctaatttttgtacttttagtagacacggggtttcaccatgttggccgggatggtctccatctcctgacctcgtgatccacccacctcggcctcccaaagtgctgtgattacaggcgtgagccactggcccaatatgacctatatttaccccatcctagcagactaattatttgttgtcttcacttccagtgcttttccatgtctgttcatgtttttatgaagtcacaattctaatattcaattttgtattttgtttcttaacacagtatcttaatattgcttcagtctctgactttttaatccctgcatatgcctaaggatatgctttcatttaataatcctcttattagaaatgtgtgttaatttctggtgttttactagtacataccgttgtggaaatcatctttgtgcatatagtttttacctccctcttgggtatttcataaatttgagatttttgtttatgtggcttgggatctttgttaaactgctgcctgcagagttatccttgaacctaatatggaattgattaaagaaatcttttttatttttttgagacaggatatcattgtgtcacccaggctggagtgcagtgacaggatcagagctcgctgtaaccgtgaactgctgggcccaagcaatcctcccgcctcagcctgcctcccgagtagctgggactacaggcatgtgccactgcactcagctaatttttccttttttttttttttagttgtagagatggggtcttgctaggttgtccaggcgggtctcaaactcctggcctcaaacaatcctccctccttgccctcctaaaagtgctgggattacaggtgtgagccactgcacccagtctaagaaatctttaaattgctaatatgttacctgcaaaagggtgtctcattgggttaaattgcaattctgaaaataatggtgaggttgaccatgataacttctttaaaaatagcataaattgaacctttgtggcaatttcatttaggtatcactgattaattttctttatatggtcctgtttacaaaggtattgagccaagagcttgaaaggatataagaaggatcataccattaagtagttgattgtccagaaattatatctaataattaaaaataccagttaggcaaaattcttacacatgaccaaggagtgttcattctacaaatgcagtgcttgtttaagttctgagggagaagtctttcttgtctagatgattaggagctgcttcccccaaaagtaagacttgagctcagctttaaggagtctctagaaattggctagggagcagacatcactaaagagacactgagccttctcaaggagagagatcagcggtgcatagggagagccccggttgaccactggacagtggggttggtgatgctggcttccttactattctttttctggaagataccgaaaataaatgaactaatatataggccgaaaaaagtacttggaggattttgggagaaagctgtttggtacattcaagtcagcatcatggggtttaatggtaaacacctgccagagattagaatgcagtaggctgcttttttgcctaattatagatcttaactcctttcccctcaggtaaaattcagtgataatttctctaagatgaaggctgctagaccagccttcattcagaataagccaatatcacttaactttagtaaacagtacttaaatttgtattatgtgcaaggccctggtgggggaaatcagagactagaaagctaagagttcatagggaatgaatgtataatgatgcaaaattgtattaataggcaaaatgttagaaatactcaatatcgatacaaaaggttcactctggaaaggaaagggatggagaaattaatgctgagtagagagatctgggtgatatttagggggatttggccttgaaaaatgtgtatgggtgggaattagagtaaagggcactgcatttaggcaataggttttgaaaaagtaaaaggtggcagtgcttgacacataataccatggtcagtcataggcttggagacccaggtgaatggcaatttgagattgtacctttcttcctgtgacttgtgactgctgagccagcctggtgatctctgtggaaatattgtaggtgtaggcccaggctggctacttttaatctaggatctgttgcttgctgtgtgacctttggcacagttactaaacctctctgtgtgtcaatttcccatctataaacagggataataaaagcatctcctttattgggtacttgtgaggattgaatgagttaaaaccaactctgttggttgaggcagtcacctgtccagactcaagaacacttagaagggtggttggtatacagtaagttttatacatgtttgctgttattcccttaatttttgaatttctgaattatagaatttctaatactcacacatagtgtaaataatataaacaacaaagggtttaaaataaaaacaaaactcatcattcttgtctggtcccaactcagctacagtcttggtttaggtgtgataactgctgtttctgtttttagttcttctagtggttattttagcaaattaccccccaaaatttagtggctcaaaaatttgttttatggtgttttggattctgtgggtcagggattcaggcagggctgggctgggtgattctgctgctttcggtgttgactgaggtcattccctggtacccagctggtggatgtgctggtccactggctccaaaaaggctttgctcccatgactattgccttagtgggagtagctggaatgctgggctcagcaatgactgttgagcagagcacctacacatgttgacttcatttgtcttcatggcaactacatgtcttcatggtgacttcagcatggtggctccaggtagttgaacttgtgtggcagcaggcttccctcatgtgttactaagggctctccagagaaacataaccaatagtgtgtgtgtgtgtgtgtgtatgtatatacacacacacaagatttttaaaacaaggaattgacttattcagtttggaggcgggctagtcctaaatactgcattgtgggccaacagatggagacaaggagagtctagaagaagactgaaggaggtctgctggagaattccctccagctcagggaggccggtctttttgtttagttcatacctttagttgtttgcatgaggcccacccacattatggagggcagtctcttttacccatagttacctgatttaaatgtgaatctcatccaaaaacatcctccaagtcaacacataaaattaaccatcataccctgctacgagcaccttgggtaaaccagttggaagcttcatggccttttatgacatattatcagaagttaataacttcccttttgccaaactattggttgtagcacaaaacttgctcaggctcaagcagaggggacatcgacctgccacttgatgggagtgtcaaagaatttgcagtataaaatatactgccagtctatgcttgagttcataaatttgacagtgtctgttaacttcctgctaaggaagaagtggaatttatattccctcacacctctctttcctcttctctctgcctcctggtttttattagatatcttattatttttgccttattatttttagttgtcttcttttggttacctttctgatttaaaataaagcagtccattctttaccaggccgtagagatatggaaaactcaggtttgttgaagggtatggtgttggggagggacatggcagaaaagcagcttcaaatggttgaggcttgacaatgaggctcttgttaaaacactccagccactaaaaatgggaattgcctatgagtgtgtcctctttgtgagcctagcaggtggcataatttgacactttttattttttctctttggcttttaaactcagatacctgtttgcctttttcttccctacacttagcatttaaattatgaatgctggaagcaaatgatattttcaccaatgaagaatcttattacagacacatggttgagttgagtgtttgtatgtggatgtgctgtcagaaataagtgctctcttgcttttttcattaccaaagcaatcagttaattggaaacagagtgtcaggagccctgtaactctgttggaggtgttttgggttttttctttttttggattcatttagttaatacaattgagcaatggggcttagtttaactctcagaacacataactaatccctttttataattatcatccaagaaacatataagaacctctagtcttgttggtttgcattcattgtatattgcagatataacctcttttgatatttgtcttactaataaaatttgacttggttagtggcaagaatgtaaatttgtgtttgatatctgcataatatttttggctaaattttttcagatttctgttgttaattctgactggttcaccctttgaccttgggaaaaaatagaacaaaagcaattagaacaaaagtagatactttgggaggccgaggcaggcagatcacttgaggtcaggagttcaagaccagccatagccaacatggcaaaaccccatctctactaaaaatacaaaaattagctgggcttgctggtgcacacctgtagtcccagctacttgggaggctgtggcaggagaattgcttgaacccaggaggtggaggttgcagtgagtcaaaatcacgccgctgcattccagcctgggtgacagagcgagactccgtctcgaacaaaagttgaaatgaaacataaatactgtattcaccttttctcttttctgtcctcctcctctccttccctccttctcttactccctccctctcttcctccctctctctctccctccctccctcccttcctctctccctcccttcctctctccctcccttcctctctccctcccttcctccctccctctctccctccctcccttcctccctccctccctcccttccttccttcctccctccgtccctcccttccttccttccttcctattcatctcaatagagctgctttttcctctaaaaataatagcttcagggtagccctttttaggggatgggattatccctgttatgagatggttcagctcacttttctgccaaatactccctcatctcctttacccaaatggagccacagaccaatctgaccatcttggtgtcatatccccttctagtcacaactcttgccccgagggtatccttacttctaatatcatagatcaatttagtcagtttttgaactttatgtacctgagatcacagagcatgtactctttcgtgtctagcttctctccatgttatatttgtgagattgatccatgttgtatgtggttatgggttcatgctcattgctgtatagtgttccatcatgtgaatatactgctgttcatcctgttgtccatgaacgttaggtttctagttttggaccagtatgaacagtactgtcatgaatgattttgtatgtattttctggtgaatataggtacacatttaagttagatatatatctaggagtgcaatttttgggccatgcagttcaactggagtaggtaccgtcagagtggttttatcaagcggtattcccagcagtggtgtatgagtttcagttgcaccacagtgcttgttattgtctgttgtcttattttagctaatctggtaaacgtgtgttattgattccctagatgactaatgaagatgaacacctcaaaaagggttcatactttttattttattgcatagcaaagtagaaaaacaaagccagtttgaccgggtgcagtggctcacgcctgtaatcccagcactttgggaggcagaggcgggtggatcatgaggtcaggagatcaagaccatcctggctaacacagtgaaaccctatctctactaaaaaaatacaaaagattagccaggcgtggtggcgggagcctgtagtcccagctactcgggaggctgaggcaggagaatggcgtgaacccaggaggcggagcttgcagtgagccgagatcgtgccactgccctccagcctgggtgaaagagcaagactccttctcaaaaaaaaaaaaaagaaaaaaaagccagttaaagaattcatctagagacattgtatcagttctttaaccactctagcttttctgtttctctacacatttattgtgtttttttgttttagttttatgagagatgtatttcaaggaatttacttctaataaaaatttaaagaacagaagtttatggataactctactagttctgagaattaaggtatttaaaggatgaaactgctcatactgtattactctttcaacttttctaatttgttaactcagtctatttatttttgcctttcactttgacatttttataggagaatttgaatcatgttctatagtttccaggaattaaatttccacataaatgtaaaagaaaacttgagatcctgatgcaccattttttaaagggttttaaaaaggggaattgttaacgtagggataagctatatattgtgaggcttcgatggcagtgctgttaagttcttgtcacttcttagcaaatgaaatgcatagtttcaaggaaacctcacgtgtggtttgatgtgtttgagttcgttttgatttatttcctgttgacattttgagatttcttcctttagcttttattctgggcacctattttatcctctcagttgtttctttttaagacctgtatgcctctttaggaatccaacatgcagctgtcatctagctttgtacttctgtgcatatattccatcttcccttaaatattattggtgtattgctgatcaggggacagacacaaggtggtcttaaatatctgtaaggtacttacaggtgttgtttggcctcttggtggcaagactatgtcctgggtcagattatctaaagggtttttggagaattcaggcttttgaccttggaggcagaataagatttctctgcctccagagacaccaaacttttaactccttttggagttatacttcaggagtaggaggaaagtttgctgaattcctatcaagaaaaggtggttgagagacatgattgaagattgcttaattcatcacagtttctcagctctggcatgaaacagttgggagaagcgattcaaataactgctgatgaaagttgtatattatttttccttttttgaagtttagggaattcagggctagctcccaaatgagatcatgtgaacttagtgatgttctttctggtgggtctttattagagtcagtggggagggaaggggagcggttttggctgtagagtgggatctgaaaattgttcataatgctgggaatgacagaaatgtgggtgcgaagtgcagtgcagagacactggcttgaggaatagcaaggccttttatgatgggcccaggtgggaggggagttactaggttatacttcataggcattcaaaaatacttgttgaatgaatatggatcattttatcagtagcatactaaggctgtcagatctgcatgaagctattgattcactagttatcattatagtggcttagcagcccgctggggggtacctgtccttcaggtgattaggaatttcatgcctccatcagtgtaagtttgaacacttgggttacgaagaaatttgtcctaatgaggtttggccccagatgccctgccaggtgtgcatctgagtgtggtttctattcttcatcaccctctacacacacacacacacacacacacacacatccgtcttgtgttttttggtgggctcagagccacgagggagctattagttatccttccaaaattcagcaagctgtttgtgtttgtttttgtttttgttttgagacggagtctcgctctgtcacccaggctggagtgcagtggcgtgatctcagctactgcaacttccgacggttcaagcagttctcctgcctcagcctcccaagtagttgggagtacaggcatgcaccaccatgcctagctaatttttgtagtttgagtagagacagggtttcaccatgttggccaggatggtctcgatttcctggcctcatgatctgcctgcctcggccttccaaagtgctaggatcacaggcgtgagccactgcggcccggctgcaagctgtgttttgtcgggacggtttcgattagtttttaggctaataaagaacactgtttctttttgtttcttttttaggtttattttagccaacctgaggaaacaaaagcctactgttaggatattcatgggaaaatagggaagccttttttttcctttagtgaaatcctatgtgcctatagagctttttcacactttctagagaaggtaagcatctcttcctgagaaagagtggggataatatgtctgggctcaattctgcctgttgtagggaagggtgtgccggtgggtcaccttttgaggttaagaacgagtaataagaccttgaggattcttttttttttttttttttgagacagagtctcgctctgtcacccaggttggagtaaagtggcgtgatctcggctcactggaccctccgcctcccaggttcaagtagttctcccgcctcagcctcccaagtagctggaattacggagtcccccaccatgcctcgctaatttttgtatttttagtagagatggagtttcacattattggccgggctggtcttgaactcctgacctcaagtgatccacctgcctcagccttccagagtgctgggattacaggcatgagccaccttgcccggccaaccttgagggttcttagccatccccaaatgatctgataaagtagccttagtactgtggaaaaaagtgtcactctttcctgctctgtcaactttgatagcaaaaggaggaaacactgctaaaggggcttgaagtttatatagtttgtgaatcattttcttgggaacttttcaaaagaagtgttgtaaacctctgacctcacatccagtttgaccagataactgtgcttacctgttgaggcccatctgatttgagtcctggcttaaagcggttgttcacatgttgaagtctgtatttaagctccgctcccaggctgggttgtgtcatcccgagcctccccttctccctccttgacccccagtggcccagggcagtttttactttaccgtttcttcctggctttttacctatacttttcggccagacacttcaaggggatctgattcgatgtaggggaggggttcggagcatgggttctagaatcgaaactctactatttcctgcgaggtgtatgttttctttgcttctttgtgtttggaaagaaatattgatattgtcattccgtggtgtttaagtgtgtaaagaggaggagctgggaggaagatgaaggaagacctaggatgtagtatttcctgactataaaactccctaggaaaagtcctcaaagagccaccttgtttactttaggctagaggagcggagaaagggcggtgaccctgtatgacatacagtgaacaagagaggtggaactctggcaggaagtaaagggtagaggcaggctcagggacccaagtcttgtaggaaaccacaactccatgaagcctatatggagtttcttagcattgtctttaaatttttttttttttgttttgagacagagtttcgctcttgttgcccaggctggagtgcaatggcatgatctcggctcaccgcaaactcccccttccaggttccagtgattcttctgcctcagcctcccgagtagctgggattacaggcatgcaccaccaggcctgactaattttgtatgtttaatagaaacggggtttctccatgttggtcaggctggtctcaaactcccaacctcaggtgatctgcctgcctcggcctcccaaagtgctgggattataggcatgagacactgcgcccagtgtctttcaacttttactaggcaccttataattgtgtcttttcccccaaagcccgctctcacgacagcctctggatatcaagatctgtcagccttaacttagtaagtgttctgagtttctctgaacttccaacttctcaggatctgccacaaatttgcaaaaggtggtgttgaatatttttccttcagaaattaagtttttaattcttgtatattttcataggagtagctatgagaggagtcttaactttgggtattgtttttctttggcttctagagaaaagtttgagaggtctagtgattttcattaagttcttttttaagcaatcatttgtgaaactattcacatcctcagatcttggtaagatttccatgcagagcctaatactgaaaagctaaagaagaacctggactttttggaatgatttcgacctctcataaaatcccagacaattacatttccttattttgccaggagactggtatgccagttaagtttataacctcgatccttgttttatcctccatcagttagagattaattacatgcctttggaatggtgagctgttgagccttgtcgtctttgaacctactattgttctcaataaggtcttctaaaggtcagacaaacaagtcatttagatttttctcctccccttaaagcatgcatttataaggcaaaaacttaatgatcattcattccattccattgatcattaaaacagctttaaaaatgaagtggtttcattactcatattagtctagttatgctcagtgacttaaaacaatacattttaatttctagacttaatgagccactccactctgggacatacttatggcagagggtaagaaaagaaatgaccatagccgggtgcggtggctcacacctgtaatcccagcactttgggaggctgaggtggatagatcgcttgagcccaggaattcaagactagtctgggcaacatggcaaaaccccatctctacaaaaaatacaaaaattagccgtgtgtggtagcacgcccctgtagtcccggctacctgggaggtggaggtgggaggatcacctcagcctggggaggttaaggctgtagtgagctgtgatcataccactgcactccagcctgcttggtagagtgagaccctgtctcaaaaaaataaataaaaattaaaaaggaagtgaccagttcattcatagttattaacacttctgcttgtgtgtcacttctactcgccttcacttggctgaagaaagtcatatggccaggcctgccagcaatgtggtagagaagtgtggttaattcttccatctggagatgctataagtcacgtgacaatgggggatataatcctctttcagggaggttagcgaataattgaaaacaatataatctaacataatggaagactatatttaactcaaaaaatttaatggcctgtgttctgattcagaaatagtttttagaattggttaaatctgcactttgggttttattttgaaaagattatgcctcagaaatctgcctagatatggaaaacagggtctagtttttggacaggactgattaatcttttatgaattggagagctgtaccaacaacttggtaactttccattagttgtttcccatggctccagatctgtattttaatcaagaagttacacttcttcctctcttgacttttatatcttgattttgcatgcattgttagtatcctattggtcagatgatttttgtttaattgcctgatttaatatggttttggcagccaattaacagtggatgctactgtcaagagaagggtagagatggggccttttgacagaaataaaatttattaaggcctcatcagtctgtcttggtatttttctttcaaaaatgaaactgatgaactgttgctgatgttcttactaggaaatttctgtcttatataaaagatatgaaatcggaattctttgaagcaagatgacaaaataaagtcatacattgctgtgaggaacagaacgtttgtgcctcaattggttattcaccatctacatgttgagattctttttgtgggggatcttggccatttctgcatgttcaccctcacactcctttttatgaggtgtgggggccatctacttaggcaagagtcttaggtagcttctgtaatttttatgagaaagctgaagtctcttctgcttggttgacttttaaaaagtaggtgcaccaagcctcagctggtgtcagactgctgcacttggggttcttcctgagctcttaacctgcttccagctcttagtgaaaacttgtttttgggagatggtgttcattcatgaaatttcatcaaacactgggcacttggaattctctactttcttttccctccagattctttttttttttttttttttggagacagagttttgctcgtcacccaggctggagtgcaatggtgtgatcttgggtcactttaacctctgccttctgggttcaagcgattctcctgcctcagcctcccgagtagctggggattacaggtgtgcgccaccacgcgtggctgatttttgtattattggtagagatggggtttcaccatggtggccaggctggtctcgaactcctgacctcaggagatccacccacctcagcctgccaaagtgctgggattacaggcatgagccactgtgcctggctcagattcttttattgaatgaacgtctactatgtcttcagcttccattatttagaaatagagaagagtttaagaaacagccacaggcagctcatacatggtgatcccttttgcctctctcagtggcccttttttggagaactgttagaaaagttgctgtaggccttggtattagaaaatgttggcacatttcttgggaaaatgtttgatttgttgaataatgtaaatattgtaagagattgtgatttcctcattgctttgaccaaatttatatcccactgttaaaaagaaatggagaatttcatgatggttatttactaatttaggtctcattttacgattctgttttcccttttgctgaatttatttatttttaaattaaaggtaaatatagttacatctagttttgaaagatgccgcaagtgtttttggaccaaggttgggtacagatacatatatcgtggttccttcatgcagttgaaagttttaagaggactctgtgtgggggagtgcacatacacacagctggatagcactcctaacgctcctttctgtgctcactccgtctctttcatggttttcacaagcagagcatatgctctgtggcatactgggggtactcagtactctgtctcagtgctgagacttggagaaaggcattctttttgagcccttttgctcatgaggaagggggtcctggtgtaccccagggtttgttctccaggcctgggacccacagtggggttgaactggcagaaggcaaagaccataatggttacttctgcagggacagatctggaagggacttcatgctgacttttgggtttttaagttggtattttctgatgagtgactttggtatctcatagaattctgtaaactctaatgcactccttaagcttagcaatgtgtgcctgcctgtgctctcctgaccaccagcctctgacctaccctggttttcacttcattactcctcccttggtgctgacagctcatgggaattaagccagaattggcccaaaagctaaatgcctgcactgctgagctgtggtttcccatgaaaatgccttccctgagttaatgttagccttttgcttgtattgatggataatgcaaaacatgatcatctgtaaggtctcagttcttgatctcttttctgtagacactcattctcgtggtgacctcatcttctctcatggctttaagtgtggttgatattccaatcattatcacatttaggtctccagctctgacttttttctccagttccactctgtaaggcccaactccttccccagtatctacacccgagtgtgtggtggccacctcaaattcaacgtcacccaaacagaatttcttatttcccccaaactccttctccccacagacttctagtggtaaaacccctaaactttgtaatcatcttcactcccctatctcatacaccctacctttaattcagtagcaaatcctgtttcaccttcaaatatatgtagaatctgcatcgtcctccctctttccactgccaccatcctctctcacctcaattactgcactagcctgatacctggactctctgcttcccttgcaatccattctcaacagccatcttttaaaaacaaaagtcacattgtggcactgcgtagactctctgttggctccttgtttctatgggaggaaaagtttttacagtgaactccatggctgtccttgcccggtcccttgttattctgtagcctctcctgtgctcgcccccacctctgctcttccacaggtgtcccttttgcctcccttagggcctttgcactggctccttcctggggctggagtgctctgtcctcacctcagtgaggtccttgctcagatgtcaccatgtcagtgctgtgattattcagagttataacctgtcttctcctggcactccaggtctctcttaatccgcttggcctcttcttttttttttccatatcaaaaattaaccagtattattatggaatttacctattatatttattgtttattttcagcatatcccagtagaatacgggcttttccagggcaggaacctttagctggtttgctggttggtggtacatcaagctcctagaacggaactggaaacgcagaagacacttaaataggtatttgctgttaaatgagctgctgataaggatttactatgctgttcagaacccattatgtgaggaaatatatatttcagttcactgttaggaaaacgtttatttccttgatgaacagggactcccaacttacctgattccctcttctgctttggctaccaggatgccaggaactaagtgtcatgctcagttgtgaaagtgattggcttcaacttgctggtgaagtaatacaacccttcccttcctttcccttttccccagcctttacttgattaagtcgttctgtagttttttgttgttttttttttcttgacaataactctgccttttattgtttgacttttcaagtaactttttggagtgtatgtgtataagaattcaagtcaatcttcaaaggaagagaattcatttattacagagatttgtttatcttagcttacggctggttttattttagctttggccaggttggcaccattgtttcaagtagtatgtcacttattgtggggttttttgtttgtttgtttttgaaactgtgtcttggcctgtcacccaggctgaagtgcagtgctgcgatctcagctcactgcaacctccgcctcccaggttcaagcgattcttttgcctcagccttccaggtagctgggattacaggtgtccactacgacacccggctaatttttgtacttttaatagagacggcatttcaccatgttggccagctggtctcaaactcctgacctcaggtgatctgctggtcttggtcttccaaagtgctgggattatgggtgtgagccaccgtgcccggctcgttactggttttgatcagtgttctgaaatagtaattttgggtatgctgtctctctacaggcttctgtttgattgaatttcatttatacaggtattaacatgcttgtaaactactattgtctattgctttattgctttggttagtcaatcccaaactcttgctgccttttttttttttttttttttttgaggcagagtctcactctgtcacccaggctggagagcactggctcactgcaccaatctcagctcactgcaacctccgcctcctgggttcaagccattctcctgcctcagcctcccaagtagctgggactacaggcatgcgccaccacacctggctaatttttatatttttagtagagacggggttttgccatgttggccaggctggtctcaaactcctgccctcaggtaatccacccaccttggcctcccaaagtgctgggattacaggcgtgagctactgctcccagccaactcttgcttcttaaacccaaggaccctgatttctgacagaatatgtatacatacgtgtgtgtgtgtgtgtgtgtgtgtgtgtgtgtgtatttatttgagacagagtcttgctctgtggcccaggccaaagtgaagtgcagtggcatgatcttggctcactgcaacttccacctccctggttcaagcgattctcatgcctcagcctcctgagtagctgggattgctgggatgcgccgccatgccctgctaatttttgtatttttttagtagagatgggtttcagcatgttggccaggctggtctcgaactcgtggcctcaagtgatctgcctgcctccgcttcccaaagtgaggcatacaaaaagccgtagaatttcatatttttgagctggccagatttgtcaatggctctaataagtgttgcatttttatttaaggaggcatgtggtgatgttagccctgtgatataggagaataagcagcaaaggttgggctggtttccctgctcccctggctgccgtttctccattagaactggaattggggatttcacaaggacctcttggaaaacttcacagttagttttaaaaaaaaatgcatttgtcacccagaggatcaatatttttctaaaatttctaaaataaaggatcagtttgtttctgaaatttggttacctgaagccattgacaaattagttgtttcttattcaggttacttttaattgagttgtgcatgcaaacccacatgtatccctctctgcctctgaggagaatggggcctttcttggagaacacaaaagtaggaattctgattttattttgtgatcttagtcactttacaattataaaaattttggagctaatgagaaacctgaaaaattctgaagtcttcaaggagtgtgatcctggtgctgtctctcaggcatttctcccagagaacgggacggcagagcaatgactgttccccagcccacaggtaggagctggtgggcagcaccagcagcagtagacctagaagtcttagacttagatgtgatttgaaatatggcttttattatgggagcagcacacataagaccatcattggttctcatatgggaaaaacccttgaatattggctctaggacagattttaaggctgggtgtggtggctcgtgcctgtaatcccaacactttgggaggccgaggctggaggattgcttgaggccatgaattcaagaccagtctgggcaacctagcaagaccctttctgtacaaaaaaataaaaattacaaaaaattatttaaatgaaatttagcaatgttttatgtacgtgtcttctcatacttcaaaaagtcaagttgttctacaaaaccgtccatgaaaacagtagctttctgccctgcttttcccacctgattccctctcctcagaggaatctctcatctatcttctgatgttgaaccataagaaaatgctgatatttgactgctttagatctgtgaaaatgactgtatcttgagaaagcatgcttatcatgtcatttcttgatttttttaaattcaattttggatatttactttcctcacactgtggaagatgaagatataactcttatgacttcccccaacacgtctcttctcctgctgtaatattaatatgatttttgtttgattaatatataatgtttatagtattatttagactggaaataattcacagccaagacatgtaatttaaatatttccttcctcatacagcttttgcccacccagagttaatcattgttttgagtgcttgttttaagtacctgtcactgactcattcccaaactgaagcctaaccttcctttctgtgtgtttgcacacctcagggtagctgtccattcatcctttcttcctgaaggcgtcccttctgaagtttccaggccgttctgtaccttctctctgtttctcttccctggatactatggtatcctcctcctttgtggtttcttttggtctctggtttttgtgtgttttttgtttgtttgtttgtttgtttttgaaatggagtttcactcttgtcgccctggctggagtgcagtggcgcgatcttggctcgcggcagcctacgccacccagtttgaagtgattctccttcctcagcccctcaagtagctgggattacaggcaggcgccaacacacccagctaattatgtatttttggtagagatggggtttcactatgttggccaggctagtcttgaactcctgacctcaggtgatctgcccacctctgcctcgcagagtgctggaattacaggtgtaagccactacactcggctgctctctggtcttggtagagagcattggccaacagcttctgcacaaggttacaagggagatagtctccttgagatttggcatatctaaattgtcttttttttttttttcttttaccttcacacttactagtttggccaggtgtacagttctagtttgaaagtccttttccctcagaactttaaagagattgttcccttaagttccagctttttattaaaaaaaaaaaaatagagtttcccctcacttctctttaaaagtttttaggggcggggcgcgatggctcatgcctgtaatcacagcactcctgatcacaaggtcaggagattgagaccatcctggccaacatggtgaaaccctgtctgtactaaaaatacaaaaaattagccaggcgtggtggcgggcgcctgtatagtcccagctactcgggaggctgaggcgggagaatggcatgaacccgggaggtggagcttgcagtgagccgagatcgtgccactgcactccatcgagcctgggcaacagagcgagactccgtctcgggaaaaaaaaaaaaaaaactttttaggatttttctttttgtccaagtattctgattggtctttttgcattcatttttctgggcacacaatggccttctcaaactgggaacttaatgtttttcaattattggaacatttaaaaaattatatttagataactttccctcttttcattgaatttgcattttctaatgttggtggtccttctgggcaatcctctgattatcttacctttttctctcctattttctatgtcttggtctttttattccattttctggtggatttcctcagctttaccttacaaccattttactgaattaaaaaataacttttttttttttttttttttttttttttttgagacggagtctcactctgtcacccaggctggagtgcagtggcttgatctcggctcactgcagtctctgccttctgggttgaaggttgaagcaattctccagtctcagcctctcaagtagctgcgttacaggtgcccgccaccatgcccagctaatttttgtatttttagtagagacctggtttcaccatgttggccaggctggtctcaaactcctgacctcaggtgatccagccgcctcggcctcccaaagtgctgggattacaggcatgagccaccatgccattttcaagctaatatgtctcaatttttttttctttgaggcaggatcttatttgtaagccaggctggaatgcagtcttatgatcactgctcactgcagccttgacctcctgggcttaagcaatcatcccacctcagcctcccgagtagctgggactacaggtgcataccaccacgtccagctaatttattatttgttgtagagatagggtctcactatgtttcccaggctggtcttgaactcctggactcaagtgatcctcctgccttggcctcccagagtgctggggttacaggtgtgagccactgtgcctggcccatggctcagatttaaaagatgtaaaaggtgtatagtgaaaagccacccacttcctgtactagctaccatattctctctttacaggcaactggtattcctccttccagagataactctgttaatatatatatatatacacacacacacacacacacatatacacacacacacagacacacacacacatatatacactttttttttttttgagacggagtcttgctctgtcgccaggctggagtgcaatggcgccaccatgcccagctaatttttgtattttcagtagagatgggctttcaccatgttggccaggatggtgttgatctctcgacctcgtgatccacttgccttcgccttccaaagtgctgggattacaggtgtgagccaccgcgcccggcctcatacatatttttaaaatgtgtgtatatgatcatattctctctccctgtgaaatcacagatgataatagacttcatatattgttatgcatctttttttcatagaaccatgtgtcttcagactgctccatgtggaggtatgggtttctttttaaaatcattttaaagagcagcatagtatgattttaaactccatattttgtttaatcagtttcctattgatttgctacatccaacaatgctgcaaggggtaactttgtacgtgtattatgctcacacgtgatagtgccatgtgtgatgaatatggaattaccaggtgaatgcatatgtgcatttgtacttctcacagatgttactccagctgcctttcatggaagctgtgctaacttatgctctcacaggcaaggcatgaaagcacttgtttctttatatcgttgccagtacagtatgttatgacatttcttaatctttaccaatctgttaagtaaaaaatggtatctcatctgtttttaatttgcatttctcttaggagaatgagcatattttcataaatttataagagctgtttgtatttgtgtttctgcgaactgttcatatcctttgccattgggctgttaccaagttgtatgacattatacctaagggaaataagcccctcatgtgataagaattggagttgtttgcagtttgttcatcttttgattcgggttatattacatttttccatgttggtgaatttattagcagcttattttaaagtctttggatttaatatcatgaagagaaaaaggcgttccccatcttaaaattattatttttaaaatgtccagggtttcttttggtacttttgtagtttcaatatttttatatttaaattatttatccatattgaatttattttagtacatatggatccaagtttactttttttcccagatggctactggttttcccagtcatttattaatagtccattttccctctgactaaatcccccatgcctatgtgtctgtttcttgacttctgtttcttgacttctgttgtgttgctctgcctagctctgtgatgttgagctattcatgttttagttgtgacactattctaattgttaagaatatgtttgtattagggaggattgggcttgtattaaatattttattgttgatgttaattgtcagttttgtagtggtatttaaaaatgaattatgtggctgggagcggtggctcatgcctataatcctagcactttggaaggcccaggaaggtggagtgcttgagcccaggagttcaagaccagcctggacaatatgatgaaactctgtctctatgaaaaatacaaaattagccagacgtggtggggcatgcctgtagttccagctacttggcaggctgaggctgcagtgagtcatgattgtggcactgcactccatcgtgggtgacagagtgagacaacatctcaataaaataaaataattttaaaaaatgaattatgcaaactttaaaggaaactgatcatattttatgtaactcaaagaatgtttagggacctaggctggtaaaggtcagagttttctaactcaaggtttgcttccttttttttttaaatccctccaatgagggggaaacagatgctaaaacaatagtgagaagtacttaattggctgggtgtagtggttcatgcctataatcccaggactttgggaagcccatgcaggaggatcacttgaggccaggagtttgagaccagcctgggcaacaaagcaagaaccttccctctataaaaaatacccagatgtggtggtgcgtgcctatagtcccagctactgaggagactgaggtgcgagggttgcttaaacccaggaggtggaggctgcagtgagctgtaattgtacccctacactccatcctgggtgacagagtgagaccctgtctcaaaaaagtaaaaataaagtagtacttaatttgggatcaagatcggcttacaaatcagaacattcaggcttgaggaagagaaaaagcaattaaataggtcaacaattgcaaagcaaaactcaatttgagagttggataaagagatttgattgtggggactctgtcatttgagatgcaactcttggtccagtctcaggtgatgaaaatacagcatcagtagttaactggagtacagcagcattggtgcctttctttctgtgaaaaaagtctttatttgcctaagatgtagaaaagagactgtagtgaaccagagaccattttattctgaactgtggcagaataaaacgccttctggcgtctgtcctcactgttactctgaaatagcccatatatcgggaaaaaatgtggctgcttctgtgtgtgtgtgttgtgtgtgtgtgggccagattgttgttgtgttacattgtgataccaagagagaagagaacttttgtctagatgctcacctgagacatccacctggcctccaagcagcatgcacatgagtgaggaatttcaacaacttgtttttttcctgtaagataataagtgtaaaacattcattggacatgagcacaaacacagaggcgttatagactagactgtaaaatcgtctgtgggccactctgagcccctgtggtcagtcctttccttggatgactctaaaggggacttgggccccacttaggcataacggtgaacagagatttaaaaggagtttgagagcattcgtgtacagagatttaaaaggagtttgagagcatttgtctttttttttttttttttttttgagacagagtttcactcttgttgcccaggctggagtgcagtggcaccatctcggctcaccgcaacctctgtctcactggttcaagcgattctcctgcctcaagcactttttttttttttttttttttttttaccatttcaatcattttgagtgtatagttcattgatgttaagtatgtttacattgttgtgccaccatcatcaccatccatctccagaactctttcatcttcctaaatagaaactctgcacccattcaacccttaactccccatttccctccactccctccagcccctggtaacaaccattctacgttctaactgttttatttttaaatttagacatatagttgatactcagaagcttaacattccttatatgaaagtcttcaccaagctacttggcgtgagcatcttatttgccctttaagccttaccctgggaataaaatatagcctttatcactgtttttggaatatcttggaagtgcgtaaaactgcttcagtttattatgtagaagtgcatttccagatttctggagtgtggatcgaagattttcataccagcagtagggtctcaaccttgtttttcttatctcttggcaagaaagcaaagctggccattggggtataataaaccttgtgtacacagctgcaggagggaacagggaggtggctgtgcttggaggccgggtgttttgccgacgataatggggcatctctggcaccatgttgctggtcggaacagttttggagttggattttgtcctgcagtgatgtctttgaagaggaaagcacttttgaatatttgcattgctttgaagccagtgccatggagatattgtgacttattgccagtcagaggcaaagctgagtgtgtgaggttttgaacaaaggttgttgaaaaaaggagataatcattaattttttcagtaaaattcattgaaccccaagggcaatttggaggggtcatagctgtttttagaatctgttgctaatcactgtatatcgtagatattaagcctaggttaagagcattagtgtgggtacagagtttagatttgccagtttgtgactttaggcatgtttaacctttctaagtctgtttttccatctgaagaatggacatagagaaaatttatcactgggctttttgtgggggacagatgaggtaaggcataatgcatttaaagtggcaggcacagtctaaatactacctagtgctcctgcacaggcatagaaaatggaaaattgtttatatattttaccctcctccaaaacactcttagaccatctgatttttatttgacttatctgaatcctgaatagtttttactggatcatactctggtatctggactgtccctggtttgaaggtggtgctgctgggtgagaagccaaggatgagagaggctgtgttttggaggcccagtctgtcaaaactgaggtggcatttctagttcctgatagagtgagacagatgcaaaggtcatgggagctttgaacagtttctatgcattatgtgttgtttttcatcttctggaagtgggctggaatttgttttcagcagctaagttcattatgtagttgcctctaagccatgcctccccttttccatgtttgtgaaaagcaaaacaaaaccaccaggcacattatcttttacgaggacctggagattgactagctgacacccccagatttcacatttatgttgagataaggagaataatgtaagtcacccagactttttgtcattctgcatttttattcacagggatgaacagaagcttgcagattgggagaaaggggggggcagaaccagttgttttcaggtggacccaaataatgcatctgctttgataactgcctatctcgatttgcttggaaagggcatagagtaataaatagtttgtgggagtgtgaagaatgagcctttagactgacccaacttgtggaaattcagaaaatgcagaaatgtacgttcttccagcttgtgaatgttgaacaatggaattgttagaagaacttttgaaacttgttctttttttgaaagtattattgtgctcggttggctacatgtgctttggtctcaaaaatttgtgccttaatcacattgctggggaggctgtggatttcactatcaacagaaagtaatgtaagatgtgatatcttttcagcaggacctaaggagattttctcgaaagaaaaggggaaaatgccgctcttaagcaaaaaatctggaccatgttggcagacatacgtctttgaaacataccagcagagaattatttaatcatttgccccttagttttatcttgatcactcctagcgtgattttttccccctcttagttatgcagcagcctactggctgacatttaactattgattgttcatcctggggaatgaattactgtgatttatagtcaagggtacagatgtaaagagacagaaaggatcagatgtttctagtgccttttttcttcctctgatggcttctcccagaaacttgataaaagcaccaacactaaaacatgtttacaataagaaagctgtttattcatcttaagtagaaaattctataagtttatgtaaaattttgcccatgtgggaacaattagtcttttaatttgagttgtgtattgtaattccatggatggagatgggtggaggttgggccgaggggaagctgaggtaagaagccagaccagagaatttaaaatgatgtctttctttgaggatgccccctttgcccctcctgctgggcctcgcagccgtgggattggccacatcacttcctgtccaagttggcactgagagtggcacagtaactctgcccagtgttctcagactgcagtgggcaagtttccagcaatagagtcacccaaagaaacaacgcagcctcctttttttctttctctgttgcctagggcagttttcctcagacctcagtacctatgtcccttgcttttggaataaccccattaggtccccaaaccttgcctttgatgtatgtggcttcttgaggatcccctacatttgcatctgtttccttcccttatgcaaaggccctacgtcttccctgggagaagagtcctcgggggctttcctgtgggagaaaggaaggatctattcctgcccacacttctttctctccagatagagaaatagctcacatttttggtgcctactctgtactgggcactgtactgtgagttttcatgtgtgacctcacaggtactatgatcatctccaagtgacgttcagagaggtggtctgccccaggtcacagggctaaaattagtaacatgtaaggaaaatggctttactctcagcgtgagatgaaacagacaatacagtacacctgctgagtgacagagttgtccctgagttgttagggcctttgcccgccttggagctccacttgcttggtgcacagtaggcagcaaatgggctgtagaatcatggtatttgtgatttcctgtgtccttgacagttgagatattctctaaggctatttatgttctctctaccatgctcgtcacaagcagtcttctgggtcctcacaagcagtctttattgtttatatttctattaacaggtctgttcaaggcaacgtaaacctttcctaccatgttcctcaaaattcttccaagctccttcactacccaattccaaaaccacttccacattttttggtatttgttataacagcaccccacttccaggtactaaagtcttttagttttctattcctgctgtaataaaacccacaaatttcatgcttaaaacagcacgtgtggggcgcggtggctcacatctgtaatcccagcacttcaggaggctgaggtgggcggatcacttgaggtcaggagttaaagaccatcctggttaacatggtgaaactctgtctctactaaaaaatataaaaaaaatagccagacatggtggcgggcacctgtaatcccagctactcgggaagctgaggcaagagaatcacttgaaacccaggaggcagagtttgcagtgagctgagattatgccactgcactccaacttgggcaacagagcgagactgtctgagaaaaaaaatacacaaaagcacacatttttttatattacagttgtgtagatcagaagttggacacaggtctcactggaataaaatcaagaagtcagcaggaccagttccttctgaaggttttggggagaatctgtttccttactgctgcagcttctagaggttgcctgtattccttggcttgtgacccgtttcttcatcttcaaagccaccactggcaaatttagtcccttttacgcctgacatttcttctggctcctcttatgtgatcccatctttctgtctctgaccacagaaataaaagactttttaaaaagactcattagattgggtccatctagataatccaggaaaatctctccatcccaaagtccttaatcttaatgccgtctgcacaatgacttttgccatgaatgtaacatagtcacaggtttgggaattagaagttgggcacctttggggggcgcatttttctgcctgccacacatgataaggtgtagacacaatacagttaactctcttagttcgcagtcggcacccctttaagtaaagtgtgtggtttctaatcaagcattttattcagggtgcatctgttccacctggctggcagcacgcaccttgcaggtcaggtgtgagatgagcaagacccattggaagactggaagctacctccttctctcttttaggacaaggaagcgagagagaagcgaggagaccacttgagttgtgactctcctgcttatggtgaaattaagaactaaaactaaaacaacaggaaccctttcataacggaaatactgaagtataaaatgaaaccacctcctaaacaactctttttcctttgaaaacaaagctaagctgcgttgatgcttgcacctctgctcttgcgtgggaaaattggacccctctgtgacatttggtatgttactgagcagggttcccttggggaggacgagaagcctcctctccacttgacacttggaatttgataccagttcctgtctgacagctggttagcctgtcaggccctcacaagttaaatcttgtctcagaaaataatttgctagaagatcaaagcatggatgggataaattaatttttcaacaagccacaggtttgggataattgtctctcaagtgttgctaatgtctttgataaacaagtaatttgggggggctctttttttctcttgagattataaatcttgattgattcatatgttgaaaaagaactctgaaagcttgcacctaagatgaagccctggaataacctgaaataataataataggtatatttcaacacctgtgccattcggagcagtgattctcaacaggtgggggtgggagatcgatttttgccccccaggggcatttggcagtgtttggagacatttttggttgccatgattttggggaggggtgctactggcatctagggagtagaggccagagatgcccagaatagcccacaacaaagagttatagaatgtcagtagtgctgaggtggagaactcttgattgagaaaggagtgttttctattttacttattttcgtgtgtcttaacactattcctggatttaatttctttgaggatagggtccatccttttattttctcactcaacacaacaagttgccctgagtaggctcaaacatttatttactgttgattcccctctctcttgttaagctattcatccttttttttttctgtcttggagcagagctattgagggcagcactgaaaagcagatggtagagctgtggcagaatcaacatggttgggagagcggaaagaacacaagctctggacttctctcagccccttctttctcgtctgtaaaaaaaaaaaagttaataatagtgcccaacttaggatgattgtacttgagaaagatcgtgttgcaaaaaatggggatgtagtaagtgctcagtaatgccttctcaggcagctgagcaggagactgtgtgcaaggccctctatctcagggccctgtttttttgtaaaaagttgagtaaaggaggggcagacatcttacacatttcagaattgttatcagttctccaggaagaagagggaaagaaaaacatttatagcatttcagtaaagattactccatgattgacaaaacaattttgaggatcctaagaggcacattctgcctcaggctggagcagtttttaaaactaaattgacagcaactagttcaagttggaacagtcctaacttaattatagatacctgcagaggttccttcaaacaggtgggtttcaacagcgtggtgctatctagcaaaagctattgtttgcttagttatttgtttgagagtcagcttagaacataaggaaggagtcagagttggggtggaattctgtctctgattggatcagagcctccattttcctaattgtaatatggaaataatgattgtccctcagaggatggttataagggacaacatatttgttacacatttggcatagtaagtacttcataaatgacacctataaaagtttttgtttgaaaattttccagcttttgttttttatttatttattttttgagacagtctcactgtgttgcccaggctggagtacagtgacacaatctcagctcactgcagcctccacctcctgggttcaagcaattctcctgcctcagcctcccgagtagctgggattacaggcatgagccaccacacctggctaatatttatatttttggtagcgacgggatttcaccatgttggcccagctggtcttgaactcctggcctcaagtgatccacctgcctcggcctccctaagtgctgggattataggcatgagccatcatgcctggctgaaaactttccagtttttaaatgtcatgcatgtttttgctcaagaacgctttggctgtttggggcattttgtagttccatacaatatttttttccgctgtaaaaaattacattggaattttaataggaatagtattaaatctgtaggtcacttcggggagtatgaacagttttaacagtgttaattcttccaacccatgaatacaggatatctttccatttatttatgtcttcagtttcttttagcaatgttttatagttttcagcatacagatctttcacctccttggttaaatttattactaagtatttcattctttcttttttttgagacagggtctcactctgtcacctgagctagagtgcagtggtgcgatcacagcttactgcagcattgaactcctgggctcaagtgatcctcttgcctcagcctcccaagtaactgtgactgcaggtgtgtaccaccatgcctggctgatttttaaatttttttgtagagacatctctgcgttacccaggctggtcttgaactcctggactcaagcagtccttctgccttggcttcccaaagtgctaggattacaggtgtgaaccattgcacacggccttattctctcttgatgctattgtaaatgaaatcattttctttattttttagatagttcattattagtatatataatagaagtgctactgatttttatatgttgattttagtatcctacaacttcactgagtttattctaacaatcttttggtgaagttctgaaggttttctatatataagattatatcatctgcaaacagagacagagtaacttcttgctttccatttttgatgtattttatttttcttgcctaatagctctggctaaaacttctagtactatattgaatagaagtggttaagagtgggcatcctgttttgctcctgatcttagaggaaaggctttcagctttttaccactgagtatgatattagctacgggcatgccgtatgtggcctttattatgtcgaggtccattctttatacctaatctgttgagagtttttatcatgaaaggatgttgaattctttcaaatgatttttatacatctattgagatgatcccttgatttttatcctcgattttgttaacgtggtattagttaattttaattaatttgcatatgttgaaccatctttgcatcccagggataaatcccatttgttcatggtgtatgatccttttaatgtgcttttgaatttggtttgctggtattatattgaggatttttgcttctctagtcatcaaggacattgacccataattttattttcttgtagtgtccttgctggccttgcaaaatgagtttggaagggttgattccatcctcttcagttgttggaaagagtttaagaagggttggtgttaattcttctctttaaatatttgatgaaattcaccagtgaagccgtgacatcctgggatattctttgttgagaggtttgtgatttctgattcaatctccttacttactattggtctcttcagattttctatttctgtattattcagccttggtgtaagttgtatgtttctaggaatttatccatttgttctaggttatctaattggttggcatatatttgtctatagtagtatcttatataatcctttgtatttttgtggtatcaattgtaatgtctcatctttcatgtataattttgtcttttagttcagctaaaggtttgtcagttttatcttttcaaaaactcctggtttcattaatgttcatttttttccttctgctgactttgggctgttccttttctaattccttgaggtgtaaagttaagtgtatttgagctctttcttccttaatataggagttgattgctgtaaacttccttgtagtgctgcttttgctgcatctcttaagttttggtttgttgaaaaacgaaaaaaaaacacaaaaaaacagagagctggaggcatcatgctacttgacttcaaaatatactaaaaagctgtcatcaaaacagcatagtagtggtgtagaaacagacatatagaccaatggaacagaatagagaccccagaaataattcatatttacagtcggttggctctttgacaaagttgccaagaacacacaatggggaaaagagagtcttttcaataaatggtgttggaaaaactgggcatccacatacagaaaaattaaacccctttctcacaccatatacaaaaatcaactcaaaatggactaaagattgggggcatggctcaggggtagaggatttgactgcaaaatggactaaagacttagtaagatccaaaagtataaaactacttgaagaacacacagagaaaaagcttcttgacattagcctgggcaatgatgttttggatatgacctcaaaagtatcacagaagcaaacatagacaaatgggattgtgttaaactaaaaaaaaaattctgcatagaaaaggaaacaaacaatagaatgaagagatggcctgtagaatgggataaaatggttgcagaccatacatctgataaggggttaatatataaaatatacaaggaacccatacaactcaatagcaagaaaataaataaccggattaaaaaaatgaacaggccgggcgcggtggctcacgcctgtaatcccagcactttgggaggtcgaggcgggcggatcacgaggtcaggagatcgagaccatcctggctaacacggtgaaaccccgtctctactaaaaatacaaaaaattagccgggcgtggtagcgggcccctgtagtcccagctactcgggaggctgaggcaggagaatggcgtgaacccgggaggcggagcttgcagtgagccgagatcgcgccactgcactccagcctgggcgacagagcgagactccgtctcaaaaaaaaaaaatgaacagaggaccttaatagaaatttctcaatagaagacatacagatgaccaacagatacatgaaaagtgctcaatatcactaatcagggaaatgcaaattaaaaccacagtgagtggccagatgcagtggctcatgcctgtaaatcccagcactttgggaggccgaggcaggcagatcacttgaggtcaggagttcaagactggcctagccacatggcaaaacctcgtctctactaaaaaatacaaaaccacagtgaggtatcatctcacatctactagaatggatattatcaaaggcaaaaggtaacaagtgtgttgggaaaatgtgagataaagggaccctcttagactgttgatgagaatgttagtacaaccaatatggaaaatagtatgagtatggaagttctgcagaaaataaaaactgaacttccatatgatccagcaatcctacttctgggtatacatccaaaggaattgaaatcaaagagatacctgtacttctgtgtccctcgcagcatgattcacaatagtcaagttatggagacagtggaagtgttcatcagtagatgaatgggtaaagaaaatgtggtatatgtgtacactggaatactcttcacccttacaaaagaagaaatcctgtcatttgcagcaatatagatgaacctattcataaatgaaatagccaggcacagaaagacagatactgcattttctcacttatatgtggtatccaagaaagtcaaactctcacagaagctgagagcggagtggtggttgtcaggggctgggagatgagcggtgcttgggagggcgttggttaaaggtaaaaagtttcagttaagttaaatatgttctggagatctattgtacagtgtggtgactgtagttaatgtatacttggaaattactaagagattagctctcaaatgttctcaccacaaataagtgcgaggtgggtatgttaattagctagatttaatttcacgaggtctatgtacatcaaaccatgtatattgtaaatatatacaatttttattttttaattataaccttaataaaagtgggaggaaaagtgataaacggtaataagcccttaaaggtaataagttaacttgtcacccaacgtatttattaatttttctatacaatgtaatgtgcttggagaacattgaggccgggcacggtggctcatgcttgtaatctcagcactttgggaggccaaggtgggcggatcacttgaggacaggagtttgagaccagcctggccaacatggtgaaaccccatgtctattaaaactacaaaaaaaaatagctgtgcatggtaacgggcgcttgttatcccagctactcgggaggctgaggcaggagaattgcttgaacccaggaagtggaggttgcagtgaatcaagatcacaccattgcactccagcctgggcaacaagagtgaaactctgtctcaaaaaaaaaaaaaaaaaaaattgaaaatccgcaagcttcagaagacacactactgcgtgtttgtccttctacggaagtcagtacagatctcaatgacttgttctcatttcaccagaaaatgaccattgtgcattatgctgtcagtgcagatggaaaactagcagcagtttacaaagtttccacttgaaaaaacataactctaattgatttaaaaaagtagttgattgttgcaagacttgacatttctctagttaatttctatgcctgttgttttgccccttaccgtcttcaaaatctgaatccaaatccagggcttctctattaggaggctccatatcatatctctttaatcctgataatttctcagttttttgtttcctacctacctggctattttcttacgctatctttatttgcttagtaaatataacatttcatgttctattttattttattttattttattattttattttttatttttgagacaatgttctgttgcccaggctggagtgcagtggcatgaccatggctcactgcaacctccatctcctaggctcaagtgatcttcccacctcagcctcctgagtagctgggaccacaggtgtgcaccaccatacccggctaatttttttattttttgtagagacagggttttgccatgttgcccagactggtctcgaactcctggaatcaagcaagccaccccccacttggcctcccgaagtgctaggagtacaggcaagagccactgcacctggccctgttaacttcttatgtcatttccccactttaatatatttgagggctagttctgtgtcatgtatgtattttaacatcactaccgcatctggtgcagagaggggcattctgtagtcttcgtacttcttatcttcactattgctgatgagccataacaaatttgagatgagcaattaatagatggaccggccaacaaacactatgtggaggaataagtgaggccaaagctgatggatgatgcaaagtgaggacgtaacatatttcgctggggaaccagacagatatgcagagtaagcgctctgataggggaagtacgggctgttatgggcgcttcatactgggaacattaatgggaggtggaggtcgtagttgaagctgaaacctgttgggtgaggtggagttcgccaggtgaagtggtagacttggggaagaggagaggagggggagcatcctgtgtttagaaccaaagagagtttagtgtgtgattattgggtgggggtgggagggtaggtcataaagggcctggtaaactgttaagaaattttaaactttatctcaagagttgtgggaaatcactggcaagttttaagttggtaggtgaagtgctggctggaggaatccctccagcttgggtatgtgaggatggcctgagaacggaggcacctgcagtaatcccccagtgagagacactgtagcctgagctgaccttggggctagaaaaaggggacaaatggcggctgaggaggagaatctctgtgagttgattgaatggggagaggcaaacatcaagcccagtgcccagacttctgggaggatctggctgctactcagtatggcggttgaggaggagaatctctgtgagttgattgaatggggagaggcaaacatcaagcccagtgcccagacttctgggaggatctggctgctactcagtgaaaggaagcctgggaggtttgggagggcagatggatgagctcatttatggacagattgagttcaagcatctacagatcattgaaggggaaatgtgagcttgaaccctgcatttgaagttcagaaaagagaaagagcagaatgaattgagttctgggagtctttcccatgtggatagtaactgcagcggatgaggtgataagatcacctagttagaggtgggggagcagaagagggcttagggcagaactctgaagagcaacctgcaaaggagactgaggaggaatggacagaaagggtggaggaaatcttcatgggtgcttttcaaggaggcagtggttaccagcattagctcctgcagagccaagagaattgagtcattttgctgggcttagcaacaagaactttcagggacttcatggcagcgtgacagcatatggagatgcagtactgttggcctgtacagagcctttttttttttttttttttttttttttaaattccctgagatgtagtctcgctgctctgtcgcccaggatggagcgcagtgactcgatctcggctcactgcaacctctgcctcacgggttcaggtgattcttctgcctcagcctcccaagtagctgggattacaggcatgcaccaccatgcccggctaatttttttgtatttttagtagagacagggttttgctatgttggccaggctggtctcgaactcctgacctcaagtgatccacccgccttggcctccaaagtgctgggattacaggtgtgagccaccacaccctgccagtacagagcctttgaagacattagaaaatgtgtgcctttctggatggacacagtccctggcttggtgagtggaccgtgcatgggacttcagctcttatgtgccaccttagctgggtgcacttgtttagtgtgcagaatacaccttccatgcgtggtggcctaggatatatctgcacttctcaatcgaaggcaatgttgcctcccagggaatatttggcaatatccgaagaaatttatgattgttatagctgaatcagagagggtaggtgctactgtcatctagtgtgtaaaggccagagatgctgctaaacactctgcagtgtccaggacaacccctgacaacaaagaattatccagccccaaacaccagttgtgctgagaaacgctggtgtctgtgaccctttcaggctcatgggaaaaggcggtcagagagggtgatagctggaggtgggtggacctgagaacaggctccttacatactttgctgcagtctcatttgcttgtggcagttttcaccttgcctctcctacctctctaccatagaactcttactcatcatgttataggttttcatttgtttattcttatgtagccattttcactattccctctcccacccccactcccccaagcagtaaattctgtaatgcaaggcaatcttgtgtccttatttctgtttctgggcacactgtaaaacatctgtattttaatagtatctgtcaggaaattctattttggcaaccaagtacgggctaatctaaagtagcccatacttgagtgctatgttgataaggctctaatgcatagttagccccttgactgtcaggcttggaaaaaagacaggaagtattccttgtctttggaaatgagcctactctggctttgggaaggaaagagtacaaatggttctcaccagatagggttgcagcagctctcccagcattttgggaacaaatcaggtcattatctcaacaatgtcaaaattgtgttcccagatcggttgttgtttgaaacatttggggctgatgcggaggaggagaattaattagcagctccctctgttggtgttctttttcagccttctcacattgcagcacgagagtcccttagacatgctggctgctcatttgataatctgtgttttgctcagtacaaaaggttgctggctaagttttgtgagcccctctaacgtcaggctggcagtatcttgggttcaattaacaagaaagtctacagtaacattttgtcaatggggaaggacttgaattc

SEQ ID NO: 61131 - DNA, 3878 bp, Homo Sapiens
cagaaagtaattgatttctctgtggatctctaacagtgacaagaattttcacctatgcctgtgagaataccttcaaaagtattgggtgctcatcataaacacacatcagtttaacaaactcttatggatgcattgactttcccagttagttgctagatgacttcggatgatttgcataatgggtctcagtttccatatctgttaaatggcaataatcagagaattttaaaaaatttaaggacacctggaaagcttgaaagatccctagaaagcatgtgtttattccacatagtgggaactatgctagattccaaagacacaaagacaactaagacaacttagaataagaaggaaaagagaatgattcgttgcaatgatccccttgaagctccagttgaaagtcagagtattgccctggattggaagtagtctccaaactgacatcattttctttttcgaaccatatctggcctgtctctcttgccagttgcatattaaaggtaacagatttgaaaatgtttggaataaaagctctagttaggtgtggtggcacacacctgccatcccagctactggagagtctgagactcgatgattgtttcagcccaagagttggaggttgtagtgagctatgatggcaccactgcactccagtctgtgtgacagagcgaagaccttgtctctaaggaaaaaaaaaaaagcactatacaaatcccacattgggaaattttcactgaatcaatggttaaaggtttatacaatggatggagtatttggttagtgaggagagatttttgaggatcgatggcaatacttatttctagaaatagccttgtttttgctgattactgttggtagggatcagtttaatgctttttcccctaatgtacctagagatttgtggtagaattagctatgcaaattgaatccttaaaaaaaaaaccctccacaaacctgtatgttatatttataaactttacattgtactaaagtcagcaaatgtcacagaactaaaatcagtaaatgcaaaagtgaaggtttctatagcaacagtaactcacccatattgcacataaaatgaaatgtacattaggatttacatttaatcgcctattagtggagaaaagtcctatgtataacaggtgcaatatgaatacattagggtgaccctagcaactctttatcttttaaactccaggctctagctgccgtaactcttttatatctaccaagttttgactcctttagggaaagtgaggtaggaaaattagaggcagcgttagagcagaggtgtgtacccctagatttaaatgcagtggaatattaccattgcataaattatcaatcaactcagtaggtgtttcagagaaagaaatagacccagaatagtaaatgtttatgaaattgttgcacgtagggtacttaagaagaatttctgtctagcatagtcggtttatccaaaccttgagcgcttctgaaacatgctaatgcaagatgattttgtgactttgagttggttgcggaatggcccaataggagggtggcaggattggagccagggacatgggacatggccccagcccatcactctgcacatatggcctcccttgttgaatttcagtttcttcctataatgcattcctacttcctataatgcattcctacttcctataatgcctgctatccagggttctaagaatcaaataggagtggaaggagaaggatagagggtattttgtggaagctaaagctctctatatggacaatgatgtcgctattgtgaatgtgactttcataaggcaaatatcatccccagcagttataccatgcctttggctggtggtccctggagacggcctatccttggccgtctgcttacataaaggaatgtctcttcgctccgcagcagctcttctggtggagggctctgagtcattgctgagaataaccgtcatgcctcctccagctcagtctacatcagataactctagatagagactcttctattggtcaaaactttcttttataaaattggaagaaatttttctagtgactagacagatgattcactctaaaatgcagttgatttttaaaaataattttaagtaaaattgatcataagttttctttttcttttttcttctccatgagctttaatgttctttagtattccttggcttcactctgaactctttgattcagttggtccggagtaggccacaggatctgctttttatccagtagcatggtaatctttaaaaatttattttccaattgataaattaattttgtatagcttaagacatcaaatgaggttatctgattaccacccagatcagattttgccagccccagaaaccctaccctgatgataacccctttccttgtatagtcttaattgactttttttggtattaattctcttatgtttccccagacactatgtttccccagctgctattgattctcagactggcctgccttgctgtccagcgaatacttgttggctgtttttgattccctgattttctggtctatcagatgttctctagcttccttcctgcctagaccctgataacatacatgtctatggctgtagtggtttgttccactggcttgtattttgggatgtcaggtccccttttcttttcaaatataatttttgttttattgaaaaaattgaaagagctttttaaaaacataattggaccaatttttgtcaagtgccactcttgtgcatacataaacaaggctataaatgaaatacattggttaggtattactaagacttacactcagggtctaatggtttagaattgttcttcaactcatggttgtccacgattttccacgtagtataacctttgtgccaccaaggatgttggtgagatggcattcttcaaaataatacttttagaaaacagacatgatgcaggtctctgagcaggctttgcattaggtagagcttgcctaattttgaatttgattttcaggaatgtagcgaatcttgttggatgcgcactctccctgactcttaccctcaactatttgattgagaggagaaagagtgatctatctgtccctccttttcttccaaaccattcgcacccattctgcaaattatgattacagctttgattttaaaaccatttaagaagtagcattcatggtggcaccctgtgttgtctaggatggaattgcattgactcattcattccttaataccttattgagcttttttttattatgtgctcagtgagggaggaccatatataaaccctgccctcaggatgctcacagcctagtggggaaggtagccagctgaacctccagttataactgagggtgccaagagtgagctgttgagagcagcgaggacagaggttttcccagccaggattgcggtactgagacatgcacacacgtgcatacacatgcacagacatgtacactcacaccctaaattgcttgtgctatgtgggaaattttgacccacatattcctatgtttaattgaaggcactgttaacttcttaacaatgctacatctctgatgattttaggaggaattagactgcgtaaacatctcaaaacagggaggtgaagctaggaagcataaatgccccagtgatggctgcaactaggtctcttaacttattgtaatctaaaccttgggtgagggagaaagaaaaaaagagcagctttttaaagtccactgaagacttcagatgtggcaaaaataatcattttttttctggccatgagaaattgtctgagtagagggtggaaaatttcatccttatcaggaagttaatcatagtaatttatgtggaacttccaggtggttacttagtcaatcttaaaaaaaaaaaaaaaaaa

SEQ ID NO: 61132 - DNA, 144 bp, Homo Sapiens
aaaatcggggatttcggcttcagcaatgaattcacctttgggaacaagctggacaccttctgtggcagtcccccttatgctgccccagaactcttccagggcaaaaaatatgatggacccgaggtggacgtctggtcctgtggt

SEQ ID NO: 61133 - DNA, 399 bp, Homo Sapiens
  misc_feature (375)..(375): n is a, c, g, or t
  misc_feature (388)..(388): n is a, c, g, or t
taaaatatttgttttatttggaatccatgtatttgtaattttagtgtttgtattaatacaagggagaaatgtttaaatctgtctatgccatatgtgcctctggttattgcccaattaattgtagcctcaggtaaactttggtttctgtctttaatttttgtcagaagaaatataactgatctcaaaacatctgcttttattgtaggggctcgtgctgccatctccattcctctctcttttcttgcaatctggggtgggaagttctttaatatggaacatttcaaccaccttcattctacccatgtccactatcaggcacattcaaacttatcccagcccaggggtgttcatcttaggggcagggggattttttanggggatccattanggccgtggagc

SEQ ID NO: 61134 - DNA, 2113 bp, Homo Sapiens
tttatgcatcatggtttgatatatgcttgaaatatttactaaattagatattgctgcatgtggtccatcccacatataaatggaaaagagaaacttaacatagttcataaattaaaatatttggtttcagctgtattcatattgaaaccataaaagaatcagaattactgtgggtttatgattgtcaggttaccaccatcactacaaattttctgataacaacatattagtattctgataaggtttgtggcttctttgcaaggatatttgaatactactcaacacactacataatggttaactattgttgtctttattttaaggaaggcatgaatattgttagatttgcccctaagtaattgagtgatcatttttatatacaagaaaatcagagtagaatgcaaaatttggaacaggaactcaataatacttataaataagttgattcaaagaaatgtttcaatttcttgacattgaattcatgatgttttgcttttaacatgtgatttttaaaaaatactgttatgtgtacaggggaaggctaacctgagactttcccttcatgcgtattcttcctgtgcactgcaaaaggaaactgtgtgactgctttccttcctgactggccatcacatagggttactggcagatgccaggaatccaaggactaaaggaataaagggtgtgtgttatagtacctgcgctaagagatactgtcaaactcagaggcacccctcctcctccatgtcttaaccctagaattgttttagaacttcttatggataagtgtttggattaagggagatctgggaaatgggatttgaattttaagcaagtgagccctggggatggctagctgcccaaagtctctaggaccccaaagagattatgagagagaacgttgagaggtctggaatgaattatacatactcttatgatgaaccttctccaacttgtccttgagcagctgtctccatcccatccctcaagtgctttggaacccacatcttataacaatggaaagatagataaccttttattttaatgtgtttatttttattttaatgtatttaagtagtttaaacactttcagcgaaaacgcattgtatttctcactccattcctcaatccagatgtataactaaagtaccatagtgctgtccattattagcccattttgtgttttaacctatacagtttgaggaacaagaaacctacctgacatcaagattatactatcagtgaagccagagaagctatacttattcattgtagacattcttatctttttaaattttttatattaaaaaaaaaaaaaaggctgggcattgtgtatcacgcctgtaatcccagtgctttgggaggccgaggtgggtggatcacgaacgaggtcaggagttcaagaccagcctggccaagatggtgaaaccccatctctactaaaaatacaaaaattagccgggtgcagtggcaggtgcctgtaatcccagctactcggagggctgacgcaggagaatcacttgaactcaggggtcggaggttgcagtgagccaagatcacgccactgcactctagcctgagtgacagagtgagactctgtctcaaaagaaaaaaaggaaaaataatggggtctcactatgttgcccaggctggtctcaaactcctggactcaagcaatccttgcatctcgtcctcccaaagtgctgagattacaggcatgggccattgtacccggctatcttatcttctttatatagatatctaataagatgtaaaatactgacctgcattatctccatgttaacatttacacttcaaaatctgtaaacggacccacgttcatacgcgtgaacagaaatctttcagcaacaaaagagaaaattgtatttctcgatagaaaggaagtggtcagatcatgccagccaaacaaatctgtcaggctttgaaatatagaaccgttaggtaagatactgagataaaggataaagtaagatcagcctaaatgtttcagtctagttaagttgattcgtatattacttagaaatttcattttcagggaaatagttttcagatttaaataactgtaaagagctgagttattctttgacttggattt

SEQ ID NO: 61135 - DNA, 572 bp, Homo Sapiens
  misc_feature (516)..(516): n is a, c, g, or t
  misc_feature (533)..(533): n is a, c, g, or t
  misc_feature (535)..(535): n is a, c, g, or t
  misc_feature (538)..(538): n is a, c, g, or t
  misc_feature (563)..(563): n is a, c, g, or t
  misc_feature (570)..(570): n is a, c, g, or t
aagtaaaaacagggtctcactttgctgctcgggatggtcttaaactcctgactacaagcaattcccccaccttggcctcccaaagtgctaggattacaggcatgcgccaccacacccagcaaatttcttgtctttttgtaaaactcaattgaaagtattccatcttgacattctgacagttctgatgttgtgcaagcatgcaggcttcattcaactctgctgtcggacgtggccacaccctcctttgaaggaagaggggtacagcaggccaagatgctcggcagcctttcctttccagtcctcttttgcaattaagtaaattcctttaatttttaaaaaattcagtttattgagagatgacatatatggtaaaatgcacccatctgaagtgtagagttcaatgagttttgacaaacataacatcaagccacaatgaagatacagaatattctcatcatgcccagaaagttcccttgtacccactggtagggagtctttccttcacacccaacccangcaacacagacatgccntntgnccctatggataagtttaacttctanaaatgcnaa

SEQ ID NO: 61136 - DNA, 563 bp, Homo Sapiens
  misc_feature (452)..(452): n is a, c, g, or t
  misc_feature (511)..(511): n is a, c, g, or t
  misc_feature (534)..(534): n is a, c, g, or t
  misc_feature (556)..(556): n is a, c, g, or t
  misc_feature (563)..(563): n is a, c, g, or t
gagacgaagtgtcgctcttgttgcccaggctagagtgcaatggcacgatctcagctcaccgcaacctccgcctcccaggttcaagcaattctcctgcctcagcctcccaagtagctgggattacaggcatgtgccaccatgcccgactaattttttatattttttagtagagacagggtttctccatgttggtcagactggtctcaaactcccgatctcaggtgatccacacgcctcggcctcccaaagtgctgggattacaggcatgagccactgcacccggccgtcaatttgcctttctttatggtgctgggtgggactaagtcacagcagagtcacctaacagcctggatgcacaggactgaggaaggtaagtcaaagagtgcagggcctttctctaccttctcagcaacaaagagaagagacacattcttctctcagagtcctgctgngcttctgctaatacatgcagccttggggacttatcgacagcacaaagccagcatttctnctttctcagagaaacattaaggnacctggactggcgatagggttnctggatn

SEQ ID NO: 61137 - DNA, 2834 bp, Homo Sapiens
catacatctttaggaaagggaggcaggttgaccctaagccatgcagccttgtgcagtgcttggtgttagatggtgcgtgtggcccctgtggatggagatctacctctggtatgtaggcaccaactctggatccgtgcaggatggttatcccagaatccagagcaagggagcagcctgcgtggaatattatgtgagggcagtgccgggtgcggaggacacgttgcagctcccgagccaatagatgccaggttgtgccaggagctcacacacagcagtctccaggggcggtgctgggtcatctccaccaccaaaaggacaaaatgaaaagtccgaatggaggttaacaggctcgattaatattgaactgactttcccgccacacctggatcattctgtgggtctgcagcaatatatttatcacacttcacagatgagctggcaggggtcaatctgccaatgacactggcagttaccaaaacgtgggcagaatgtttgcgtgcttcatgccctgctggagaggagcctccaagaactgactagctgtcccttttgctttgtttttctctaaaaattggtctcactgttttttgtgctcatgttgatatttgtagaccttacaaggaataaatatctttgactatatgtacatttcccccttgttttcatgttcaaaaggatcacttcagaatgcaaagtaactgacattttcagaaaatgttattcgtgtttttacctataactcactagcttttttctattaaagtctttatatacatttttattattatgttttctcatgtaaagcataagaaaaatgcttgctagtttgatagtagtctgttatccattaaatcttactgaattttggaagtgcgtggctttatatagaagccttagaagttgctcagactgtatttaagatgacatattatctggtttctgcttgacttttttttttcgggggggcggtggggagaaatagagcatttttcttccataatggtacttctaagacatatctaagcacaaagtgaaaaagaattcaattcttaaactggttctttttttagcgatttaggagaactcagaataagctggggcaagggaaggggactgtcttagtccactggggctgctgtaacaaaataccttagactgggtactttataaacaacaggaatgtattgttcacagttccggaggctgggaagtccaagatcaaggtgccagcagatttggagtctggggagggccattcctcatagatggcgccttccacctgttctcatggggtggaaagggcaggcagctctctggggcctcttttctgaggcactgatgactttcctaagggtggagcctttccagaggccccaccttctaatactatcaccttggtgattaggtttcaacatctgaattttggggactacaaacgttctgaccacagcagggatcagttgattcagtgtcatagaatctctcttaatccttttgaaaatcctttagttagacaaattttaatttgacttcaatcttagtctttagggggtaagtgtaaaaatatgcagcaaaatgctgtcctctctgtctgtctctgtctctgttcgtctccctctctggcacctgtccaggaatgactgcagatggggcagggctgcagctgacttgggagcagccaacctggaggttcttcccccgtgtcccctgatcaaagaacagaagcacctcagcaaccacgccccgtcctggaaagtgttacccccccaaccccagacttctgtttcttgtacccctgtggcttctgctcgctgtcttctccttgtggcagttttcatttcggttgagacagccccagatgggacaggatgggtggggggaggcagaaggcttccaaaaccagcagcagcattacactaggtactcattggcccctttctgtgaccgagttcacactcagaacacacgtgttgaaatcgggaaaaaaacggagacctgttgtatcttgcaaggaaaacgttccttacaggtatatttacagaggactgtgtcacactcaggcagaaatgacctcaacaagacagcctcgtggaaggaagaacacttacctacttaactcccctccccgccccgggctgcctagtctagcctagccgtctataacaaccccagtggactgacattccatcttggaatttatggaggtgacaaaagtgtcatttgagatggaccaaacccagcccttccaagaagagctctgtatgttttatcttgacatgtgttgatgaataatgacctgcacacacattctgaatgcaggaagggaagtcctgctctccgtccatcgccagtcactcactcgggggaggccaggaacttagtagctctcggctctggtctgcatcccttcccctcgggttctgctcgcctcggctgtgtctcacaggagtcagcgcccggcggccgtgtgcaggtgctggggccccaccttagctcaagctctcttaaattccttatggcagaatgaaaacaacttcattagggcctacctgagaagaaaacaaaaacaagaaaaagtgtggacatcattatccacttgtcctggctgccttgcccccttctaaccatttcatgcccattctagtgtgggcttctgagtgctcatttggtttttcatatagtttttaaatcagttgttactgtcaagatgaaaacatatcacagatgttagtagcgcagtgctgagtgcttcttaaacagtattaacttacatgcttgatgaccatgtgttcttgattaacaaagccaacgcaagtacaaaaaaaaaaaaaaaa

SEQ ID NO: 61138 - DNA, 372 bp, Homo Sapiens
gtcgacccctgtaccaggggcttgggatataaaagtgaataagttcctggggcttacatcagtcaatatagggttactgtctattgaacaagattatttttgggtttctatctatttggggatatgataatgcatgtatttattcctaaccatcacacaataatattatgaaacaatgttagtaggaggaagatgagagccttcattttaactgggaggacttggttctgtctaagatgttgcttttgttatgggttagtgcctattagataacattctgtttctgtgactgattatttctttttgaccttctgagttttagtttgtccactgagttttaggtaaaaaagacacaaaaaaaaaaaagtcgac

SEQ ID NO: 61139 - DNA, 547 bp, Homo Sapiens
  misc_feature (366)..(366): n is a, c, g, or t
  misc_feature (415)..(415): n is a, c, g, or t
  misc_feature (441)..(441): n is a, c, g, or t
  misc_feature (464)..(464): n is a, c, g, or t
  misc_feature (498)..(498): n is a, c, g, or t
  misc_feature (510)..(510): n is a, c, g, or t
  misc_feature (517)..(517): n is a, c, g, or t
  misc_feature (541)..(541): n is a, c, g, or t
  misc_feature (546)..(546): n is a, c, g, or t
aatggagggttctttcgttggcattccttttcatccttccccaagaggaatcaacttagggagcagatatgcagcgtgtgtgtgcacccagcatgtgttttcttgttcccaccctacattgtttgttgaaataaatatggaaataaggctgagcaagacagccaagccagccaaactgaaataaattcatcactcatgggctctcaagggatggaaaccgtgcatttttttctaaatgattatttctgaagcactgaaggaatggctatatcactaatgaggcctgtacgccatgactgctgattataaatgacctgcagagagacaaggagatagtggatatgaaggggagatggtggcatggangcgaggggaagcagctgctgtggaggctgcagctgctggtggccagcantggggattactatccaaaagcaactnttcctgcttttctgaccccacantaagccctcagaagaacctataattattctgggngaattcaatgantggaaangggtcaaaagccccccaaagattnaaaant

SEQ ID NO: 61140 - DNA, 560 bp, Homo Sapiens
  misc_feature (486)..(486): n is a, c, g, or t
  misc_feature (535)..(535): n is a, c, g, or t
  misc_feature (551)..(551): n is a, c, g, or t
  misc_feature (553)..(553): n is a, c, g, or t
  misc_feature (560)..(560): n is a, c, g, or t
gaggagtctcactctgctgtccaggctggagtgcagtggcacgatcacagttcactgaagcctcaacctcctgggctcaggtgattctcccacctcagcctcccaggtagctgggagtacaggcatgcaccaccaggcccagctaatttttgtattatttgtagagatggggttttgccatgttgcccaggctggtcttggactgctgggctcaaacaatcctcccgcctcagcctcccaaagcgctgggatgacaagtgtgagtcaccaagcctggctcatttactctttaacagaaaaatttattgcacagacatttgtaatgaatcagtaacattaacaaataataccaacacacctcaatgccttcatgctatacttaaaaaacagaagggagaatgggatcactgtgcaagaaataattcttcacagaaagtttcatgtgagggtttccaaaagcccccttgtacccattccctggtgggnacttaactttcaaggaactttccctgggaaaggaggccttttatattgnatttgctttaagggcnanacctggn

SEQ ID NO: 61141 - DNA, 1951 bp, Homo Sapiens
cttttctctcctccgcgccgccgccgccggtgcgcaggccggctggggactcgcctccgctcgggccttcggtttcgctccctcgctgagtcccttctccccgccaacaaaaggtgatgattcctagcggactgggcacgcctggacggcggagggtggctgggaggggcgaggtcacgctagcaacctgtggctgccaggagaaggcggctgggaagccacggaaagacccgggagcgcaggggaggtggctcagctcgcgcgcagcccctgctcttattttactattatgcgtgttgctgttcgtatccttctgggcggtgaaggggagaggcagcctcccgctccggtgaaacccgtcctgggagtcgcccataaaccctgttctccatctcgggcggctggaggggtgaggggggtgcggcgccttggtgggattggcaggtggtgacttccagggcgcagaggagaaaaatctctgctcttgggcgccaggatcaaggatacccaaacccgcggtggctctgccgcctgttcctctctcttggggtgctggggcacctgggccgcatcccttgtgaagtgtagagcagcagagaggcccggccgccggcccagcggccctcccaaacttccgaaatgccgacgggttggacgggtttccgagagctggcgagttgagaaggacaggaggtgtggggtgggggaggggcctggaccgttggagtgggtcctggagaccctaagtggcctatgacaagatttggaaaggtccctggttgacgctagggagctggtggggatcctagcagcgcattttgtctgtgggccctgggccagactctaggctccctgagtgcccagatgggggtctgagattacctattggaccctctcttggcaaagacaaccatagtgtgatagtttgcttttttctcccaaatatgtgtgagttcagcctgtctgggagaatgttgatgttagaaatcaggcccagaggccaacattggcaattcctagatttaagattaaaagaaaatcagagggtctctggacctagttgtgggcaggtgggaactctcctcctacccacctgcaaggtcccaggactgggcataggcagagatctctggagtgttgcagttagagggttgtttttgtgttgttcctgtatttgttaatgaaattgatattattttgacttcctcactaaagatgcaagtatttctcagacctagggagttgagtagggagtctgggtggggtggaggctttttctatgcacattttcccttactctgtcacagctttcacagtctcagttccctccagcccaatccccagactctcagcttagtaaattcacggcttctgggagcttcagaaagttggttcgtaaaccccagacgcccattttggccctaccaccagcaacccaagcaggtggctaggcgagttcatatgtgtttagaaggaaaggacccgtctggggctaggaaggtggggaaatggggttcctccccacacttccccgggatagaccctctctcctggctcccaggatgtgtgagaggctgggaggggccctatatcatctggctgcatctttaacggttcctcattgcccttcattcggaaatgaaacgcctttgatcttttctcaggttgtaaacggaattgcccgtcattaaatatctggggccccatctgcttggtctcccagcatttttctttacagctgtttctctctctttttaccactgaatttttccaaaaggacttttattacaccaccttcacacccagccgcctcttcctcctcccttcgctgagaggcgctttggaaaatatctagatattcgtttgatcacaaactaaaggcttggaggggcacggaggagccgattggggttttgttttttctaaaaaaaaaaaaaaaaaaaaaaaaaaa

SEQ ID NO: 61142 - DNA, 1867 bp, Homo Sapiens
ggcacgaggggcgagaggaagcagggaggagagtgatttgagtagaaaagaaacacagcattccaggctggccccacctctatattgataagtagccaatgggagcgggtagccctgatccctggccaatggaaactgaggtaggcgggtcatcgcgctggggtctgtagtctgagcgctacccggttgctgctgcccaaggaccgcggagtcggacgcaggcagaccatgtggaccctggtgagctgggtggccttaacagcagggctggtggctggaacgcggtgcccagatggtcagttctgccctgtggcctgctgcctggaccccggaggagccagctacagctgctgccgtccccttctggacaaatggcccacaacactgagcaggcatctgggtggcccctgccaggttgatgcccactgctctgccggccactcctgcatctttaccgtctcagggacttccagttgctgccccttcccagaggccgtggcatgcggggatggccatcactgctgcccacggggcttccactgcagtgcagacgggcgatcctgcttccaaagatcaggtaacaactccgtgggtgccatccagtgccctgatagtcagttcgaatgcccggacttctccacgtgctgtgttatggtcgatggctcctgggggtgctgccccatgccccaggcttcctgctgtgaagacagggtgcactgctgtccgcacggtgccttctgcgacctggttcacacccgctgcatcacacccacgggcacccaccccctggcaaagaagctccctgcccagaggactaacagggcagtggccttgtccagctcggtcatgtgtccggacgcacggtcccggtgccctgatggttctacctgctgtgagctgcccagtgggaagtatggctgctgcccaatgcccaacgccacctgctgctccgatcacctgcactgctgcccccaagacactgtgtgtgacctgatccagagtaagtgcctctccaaggagaacgctaccacggacctcctcactaagctgcctgcgcacacagtgggggatgtgaaatgtgacatggaggtgagctgcccagatggctatacctgctgccgtctacagtcgggggcctggggctgctgcccttttacccaggctgtgtgctgtgaggaccacatacactgctgtcccgcggggtttacgtgtgacacgcagaagggtacctgtgaacaggggccccaccaggtgccctggatggagaaggccccagctcacctcagcctgccagacccacaagccttgaagagagatgtcccctgtgataatgtcagcagctgtccctcctccgatacctgctgccgagacaaccgacagggctgggcctgctgtccctaccgccagggcgtctgttgtgctgatcggcgccactgctgtcctgctggcttccgctgcgcagccaggggtaccaagtgtttgcgcagggaggccccgcgctgggacgcccctttgagggacccagccttgagacagctgctgtgagggacagtactgaagactctgcagccctcgggaccccactcggagggtgccctctgctcaggcctccctagcacctccccctaaccaaattctccctggaccccattctgagctccccatcaccatgggaggtggggcctcaatctaaggccttccctgtcagaagggggttgtggcaaaagccacattacaagctgccatcccctccccgtttcagtggaccctgtggccaggtgcttttccctatccacaggggtgtttgtgtgtgtgcgcgtgtgcgtttcaataaagtttgtacactttcaaaaaaaaaaaaaaaaaa

SEQ ID NO: 61143 - DNA, 568 bp, Homo Sapiens
  misc_feature (39)..(39): n is a, c, g, or t
  misc_feature (171)..(171): n is a, c, g, or t
  misc_feature (327)..(327): n is a, c, g, or t
  misc_feature (351)..(351): n is a, c, g, or t
  misc_feature (355)..(355): n is a, c, g, or t
  misc_feature (363)..(363): n is a, c, g, or t
  misc_feature (366)..(366): n is a, c, g, or t
  misc_feature (376)..(376): n is a, c, g, or t
  misc_feature (454)..(454): n is a, c, g, or t
  misc_feature (495)..(495): n is a, c, g, or t
  misc_feature (499)..(499): n is a, c, g, or t
  misc_feature (520)..(520): n is a, c, g, or t
  misc_feature (524)..(524): n is a, c, g, or t
  misc_feature (548)..(548): n is a, c, g, or t
  misc_feature (560)..(560): n is a, c, g, or t
gagacagggtcttattctgttgtccaggctggagtgtantggtgtgatcacagctcactgcagcttcaaactcctgggttcaagcaactcttccacctcagcctctcagtagctgggactacaggtgtgtctcatgacacctggctaatttttaaatttttttttgcaganacagagtctccctatgttgcccaggctggtctcagactcctgggctcaaggaatcctcctgcctcagcctcccaaagtgctaggattacaggcatgagccactgcacctagccaggatccacttcttacactatattgtattttgataatataaantaaaatgcattgatccattggcanatanaaatgaantcngaaataaaangcattcaaccccacacaaaactaacctgaggcaaccttctactctaatgcccctacgttcagtgcataaaaaatcatnacttggcagggtgggacggaaaatgcttttttttaaatacntttncccccccccttattccaaacntaantttttgttgttataaaatccgggnaattccccccanaaaaaaac

SEQ ID NO: 61144 - DNA, 2186 bp, Homo Sapiens
ggggctgcagaggtctttcccagtcgtgcagtaaaaaatttcaaggaacaattctgagctgtttcagccaaatgtctatacctgcattagtcactgttctgcagatagagtgtgatgattaaccagaagtggagcaaggtgctgtgattgggaactgcaccagaatcacaagatctcaatagaggagagcaattccccaaatcatacttgagagatcactggaagattctaacaggcatttggcagataaaaataacatgcctactgtgcttttctatttagatttatattttctatagtttattcttaacctactagtactgctaactaaaaatcgagtgtttcttgtgttaaaaaacatgcttttacaaaaaaaaattaaattttaatacctttgcaactgaaaggagatataaatgaggatattcagaatttcagcattaatgtttaagtttcagaatacacaaacttgtttttattggttaaagaatgtttttcacttcattgcaaacttaaccaaaaagaagagtagttgttttactttagatgttcatcatatattgttcaaacagcttctttttcaaaagaaagtctatgtcaggtaaaattctatttgttgctttgcaagctgtacctctagatgatagatttcatgtatcttagaattagatttctgtgttcttagattcctgtgttcctagcaacttgtagggaataccttaaaaagtatctacttgggggtggagccaagatggccgaataggaacatctccagtctacagctcccagcgtgagcgacacagaagacgggcgatttctgcatttccaactgaggtaccggattcatctcactggggagtgccggacagtgggtgcaggacagtgggtgcaacgcaccatgcgtgagccgaagcagggtgaggcatcgcctcacctgggaagcgcaaggggtcagggaattccctttcctagtcaaagaaaggggtgacagacggcacctggaaaatcgggtcactcccaccctaaaactgcacttttccaacgggcttaatggcacaccaggagattatatcctgcacctggcttggaggatcctacgcccatggagcctcactcattgctagcccagcagtctgagatcaaactgcaaggcagcagcgaggctgggggaggggcgcccaccattgcccaggcttgagtaggtaaacaaagcagcccggaaactcgaactgggtggagcccaccgcagctcaaggaggcctgcctgcctctgtaggctccacctctgggggcagggcacagacaaacaaaaggcagcagaaacccctgcagacttaaatgtccctgtctgacagctttgaagagagtagtggttctcccagcacgcagcttgagatccgagaacgggcagactgcctcctcaagtgggtccctgacccccgagtagcctaactgggaggcaccccccagtaggggcgcactgacacttcacacggctgggtactcctctgagacaaaacctccagaagaacgattagacagcagcatttgcggttcaccaatatccgctgttctgcagccactgctgcctgatacccagacaaacagggtctggagtggacctccagcaaactccaacaggcctgcagctgagggtcctgactgttagaaggaaaactaacaaacagaaaggacatccacaccaaaaacccatctgtacgtcaccatcatcaaagaccaaaggtagataaaaccaccaagatggggaaaaaccaaagcagaaaaaccagaaactctaaaaatcaaagcgcctctcctcctccaaaggaacgcagctcctcaccagcaacagaacaaagctggacggagaatggccttgatgagttgagagaagaaggcctcagaagatcaaactattccgagctaaaggaggaggtttgaaccgatggcaaagaagttaaaaaccttgaaaaaaaattagacaaatggctaactagaataaccaatgcagagaagtccttaaaagagctgatggagctgaaaaccacggcacgagaactatgtgacgaatgcacaagcctcagtagccaatgcgatcaactggaagaaagagtatcagcgatggaagccaaagtgaatgaaatgaagcgagaagagaagtttagagaaaaaaaaaaaaaaaaaaa

SEQ ID NO: 61145 - DNA, 1136 bp, Homo Sapiens
gagtttcactcttgttgcccaggctggagtgcaatggcacgatctcggctcactgcaacctccacctcccaggctcaagcaattctcctgtttcaacctcccaagtagctgggattacaggtgcccaccaccacgcctggccaatttttgtatttttaatagagacgggtttcaccatgttggccaggctggtctcaaactcctgacctcaagtgatccacccacctcggcctcccaaagtgctaggactacaggcatgagccaccacacccggcctagtatttttttttttaagagatggggtcttaccatgttaccaaggttggtctcaaactcctgagctcaagcgatccacctgcctcagcctcccaaagtgctgagattacaggcccgagccaccatgccggcccaacataacttttatatgcactgcaaaacaaaaaaatccctgtgactcactttattatgatattggctttattgtagtggtctggaacccaacccacagtatcttccaagtttgcctgtacattttagctatctattattaaacaacttagtggcttaaaactacaataattttatttatttgcttgtaattttgcaatgtgggctcaaatagcctttctttgctccacacgcagtcacctgaggtggctccagtgggctggagaatccactttttaaatggccttcttcacgtggctggcaaaagttggtgttgactgctggctgggagttcaactgaggctgttggcccaaacctcagttcttcttcacatggttggttgggcttttcacaggcagtaagtctgagaagtcaaacttctaacacagcagctggcttcccccgaatgcaaaaacagaagctatcaggccttcttaaggcatagtcccaactggcataacatcacttccaacgcattctactattgattaaagcaagttacaggcccaatcagactcaagagaagagaactcctaaaggtgcaaatattgggaagcctggttcatttggggccaccaaagtagcagtgtactgtaagatagtcaccctgccaagtgttctgtagctgtatatttgtaattacttctaattgtattgagttttaaaagtaatctctaaaaaaaaaaaa

SEQ ID NO: 61146 - DNA, 1183 bp, Homo Sapiens; identical to SEQ ID NO: 25431

SEQ ID NO: 61147 - DNA, 586 bp, Homo Sapiens
  misc_feature (487)..(487): n is a, c, g, or t
  misc_feature (500)..(500): n is a, c, g, or t
  misc_feature (572)..(572): n is a, c, g, or t
aacctctcacagctcataccactggatctgagactggaattaggtgtcttccttgctactcccagactctttacttgccctctttcctaaaactagctttgaaactcatgttgtcagcctgtaaccatggttctcaattgggcaattttgcccctttctgccacccggggtataattggcgtgtgtaagacgttttgattgtcacaactgagggagttccactggcacctagagagtcaaggccaggaatgatgctaaacatcctacaatgcacaggacagctccccctgccccccaacaaagaatgatcaggtccaaaacgtcaataatgccaaggttgagaaatcctggtccacagtgctcactaatgccacctgcaggacgctcttatctcctgcatcattaacttcgctgtttggatcattcccattagtatacaaacatgttgtaatttccgcatttaaaaatattttctgtccgggtgcantggctcagcttgnaatctcagcacttgggaagctgaggacccagacttttttcctgaactccagacttatggtaactacctactnaacatttacatttt

SEQ ID NO: 61148 - DNA, 1851 bp, Homo Sapiens
gaaaagccgccggtatttctccacctggctctcctctacctccaggcaggcgcacccgaggtccccctcccaccccaccttctgccctcccgcacacttggaccagtgctgttgacccggaagcggacatttctgcagctattctaagcacacgtcggcggagggagcgggacgtggccagcggtcagcggcgaaggaggcaggccctgcgcggggatcacggaagccctgtgattcaccatgaagttccagtacaaggaggtccatccctttgagtatcggaaaaaggaaggagaaaagatccggaagaaatatccggacagggtccccttgattgtagagaaggctccaaaagcaagggtgcctgatctggacaggaggaagtacctagtgccctccgaccttaccgatggccagttctaccttttaatccggaagagaatccacctgagacctgaggacgccttattcttctttgtcaacaacactatccctcccactagtgctaccatgggccaactatatgaggacagtcatgaggaagatgattttctgtatgtggcctacagtaatgagagtgtctatgggaaatgagtggttggaagcccagcagatggaagcacctggacttaggggtaggggaggggtgtgtgtgtgacttggggaaagagagggcggctcccaccgtgaggagacagaaggtgaagacatatagaaactttacaccgcacacaccgtcaacgcattttcacatgctcaactgatattttttgttgcttccttggcccagggagaaagcatgtcaggacagagctgttggattggctttgatagaggaatggggatgatgtaattttatggcattcctgagatttaatttttgtgcagtttcatagaaaggtcggtcaggaggtggacaagttggggtcagagatgatggcagtccagcagcaactccctgtgctcccttctctttgggcagagattctgtttttgacagttgcacaagacaggtagggaaaggggacttgtggtagtgggccatacctggggacgaaaagagacccactgtaattgatgcatcgtggcccccgatcttccgtatcccacacttcttttctcccatcccagttgcaatctcactcacaaacatcacagtaccaccccaggggcggcagtagacaccaacccagaaatttagacagggatctcttatctttggaaaataggggttaggcatgagggtggttatgattaagaagataattttgttgttaaatagcattaaactggaattgacagagtgagttgagcatctctgtctaacctgctctttctctctggtgctcctcatctcacccctaccttggaatttaataagcttcaggcatttccaattgcagactaaaaccacttctaccatctcctctagtattttccatgtatcaggacagagatgtcttatgtagggaaggggcaggtatgaagtgaggtagattatctatacctctcactcattcaggattctcgctcccatgctgctgtcccttcattctcacactcacaggaatgctatgtgatggccagctgcttcccttcttggttatccactgcagctgctagttagaaaggtttgcagggatgacttttagtaaatcatggggattttattgatttattatcacttataggattttgtggggtgggagtggggagcaggaattgcactcagacatgacatttcaattcatctctgcaaatgaaaagggttcttcctcttgggggaaatctgtgtgtcagttctgtcagctgcaagttcttgtgtaatgaagtcaatgctgtcaggccaag

SEQ ID NO: 61149 - DNA, 1299 bp, Homo Sapiens
tcccgccgcccccctccccgccttttttgaaaaaaagcattttaccaccaaccaccaccccaatccaacccacaccgaaccttcgcgcaccccctacacccaacaacaacaacaacaactgcaaaatagaaaacaaatccccaaacccaggcgaaaagcagccaacaccggcggcggcggcggcctcggcaagcacggccagcgcgctcggactgcaagagggttaaaagtgtagattggatttcacccctggaactctagcacgccgagtgaacttgaatctttggctatttaaggaggattgggtttgttgtgaagttgcggtgatccagcgcagagccccgtcctgattgatcgcatcgcggggctcagatgactgtaaaatgaatagatgaaattcttgcttctcgaagattttcttgggcatctcccggaaagtgccttttaaggcgaagtcatgatgtattctcccatctgtctcactcaggatgaatttcacccattcatcgaggcacttcttccacatgtccgtgcaattgcctatacttggttcaacctgcaggctcgaaaacgcaagtactttaaaaagcatgagaagcgaatgtcaaaggatgaagaaagagcagtcaaagatgagcttctcagtgaaaagcccgaaatcaaacagaagtgggcatccaggctccttgccaaactgcgcaaagatattcgccaggagtatcgagaggactttgtgctcaccgtgactggcaagaagcacccgtgctgtgtcttatccaatcccgaccagaagggtaagattaggagaatcgactgcctgcgacaggcagacaaagtctggcgtctggatctagtcatggtgatcctgttcaaaggcatccccttggaaagtaccgatggagagcggctcatgaaatccccacattgcacaaacccagcactttgtgtccagccacatcatatcacagtatcagttaaggagcttgatttgtttttggcatactacgtgcaggaggcaaggtaagaatttcttttcttcaaataaatgcatcaagatataggtgtccttgcattaccaacaatccatagtaaaacaatcattttacaaagccgcataccaaaagtagactaaagtttgagctgtcacagatggtaggtcatttccaaacttggcctggtgggaggaaaaatggcctgcagatagccaggtgacagactgttacctgaggtttgttatataaatgtgggacttaataaactgctatgagctttattattcaaaaaaaaaaaaaaaaaaaa

SEQ ID NO: 61150 - DNA, 541 bp, Homo Sapiens
  misc_feature (541)..(541): n is a, c, g, or t
gagacggagtctcactccgtaacccggattgcagtgcagtggtgcgatcttggctcactgcaacctccgtctcccgggtttaagcgatccttctgccttagcctccaaagtagctgggactattaggcgtgtgccaccacgcccggttaatttttgtattgttagtagagttggggttttgccatgttggctaggctggtctcaaactcctgacttcaggtgatccacctcccttggcctcccaaagtgctgggattacaggcgtgagccaccacgcccagcctgtaaatcttgacaaaattcccagaggcaaaattattagaaggctgggagccaggattaaaaaacataaaatccttggcttttccatttatttcacattgcctcttcttagaatccacttctacaccaaagcagttaaaatcaatgtggatttgtattttaatagaagggttatgggagtagtgggaaaggtagcaaataataactatggttattggatctactggtcctaacatttggacctatccaatcatttaan

SEQ ID NO: 61151 - DNA, 551 bp, Homo Sapiens
  misc_feature (457)..(457): n is a, c, g, or t
  misc_feature (509)..(509): n is a, c, g, or t
  misc_feature (534)..(534): n is a, c, g, or t
  misc_feature (537)..(537): n is a, c, g, or t
ctgagacaggctcttgctctctcacccaagctggagtgcagtggcacaatcatacctcgctgtagtcttgagctcctggacacaagtgatactcttgccttcctgcctcagcttgccaagtaactggaactacaggcatgcaccagcaagcctgctaattttaacatttttgtggagacaaatttccaagaacgaatgcaaacacacagagttgacaaaatgataagtagaaattttaacatgtctgaagagacaaaaagaaaggaaaaatgcaggcctaataacacagattgtgattcctttaatatctagaccttaaattggatatacacttcattcctaaatgtgtaataatattctttgtgcttctaaattatttgactaatgtcaacagaaaagcaccagcatatgctaatggatgagttcaatgctgcatttatgggaaaatttcttattncccaaatagctgaaatgaatcctattcactggctggtcttgctatacgctgnaaatttttaaaatgatgttgaatgnaangggaattcccgttg

SEQ ID NO: 61152 - DNA, 1045 bp, Homo Sapiens
ttggagacggagtctcactctgtcacccattctggagtacaatggcatgatctcagctcactgcaacctcctccttctgggttcaagtgattcttctgcctcagcctcctgagtagctgggactacaggcttgtgccaccacactcagctaatttttgtatttttagtagagacagggtttcaccatattggccaagctggtcttgaactcctgacctcaaacgatctgcccaccccagcctcccaaagtgctgggattgcaagtgcgagccaccacacccagcctaatgtaactgttttcctttccttttagtctttatctcattgttatatgtgattataatgttgtcatttatgcagttcacatcaccagtaattatctcaaacagatcttaaatgctgcctatcatgttgaagtcacgtttcactcagggtcgtcagttacaaggatgctatgggagcaaatcaaacagatcatccagcgcatcacatgggtgagcccacctgccatcactctggaatggaagaggaaggtggcccaggaagccattgagagcctcagcgcctccaaattggctaagagcatttgcagccaattccggactcggctcaatagttcccacgaggcttttgcagcctccttgcggcagctggaagctggccactcaggccggttagagaaaacggaagatctatggctgagggttcggaaagatcatgctccccgcctggcccgcctttctctggaaagccgttctttacaggatgtcttgcttcatcgtaaacctaaactgggacaggaactgggccggggccagtatggtgtggtatacctgtgtgacaactggggaggacactttccttgtgccctcaaatcagttgtccctccagatgagaagcactggaatgatctggctttggaatttcactatatgaggtgggtcctggcctcattcatctctatgagaaagatccagagaagaatctagaaccctggtttagattttgtaccaagagctacagcatggcctctctatatttagtt

SEQ ID NO: 61153 - DNA, 2233 bp, Homo Sapiens
atgatgctggtctaaggtttgatgatgtcttagacttgaagaacatgaacctgtttttgcaaaagttttagagtttggcattttccaacaaaaaggcagttgctggacttttgaattggtcaacgaaattccacttgttaccagaagatttactagttgcatttctagagttgttggcctctcttttctgatttgattcagtggtcagatcatccagggttcttgtgttcagagacccagagtgctataatgcttccgaaataagcctgacctaagactgagacagaaggtgagtatggcagagaccaccagctgtccaccaaagggccctgcttcccttccaccacctcaagtatctgtcggaggctccatgatagttcccacatggaatgtgggtggcaatgtgtgtcgcttcccggcagcactaattaagaaacaagtgtgccttgctcagtttttctcctgttgactgtcagctggatgtggaaaatccagcagagaatgcctaggtgctaggggaggattctgagtgcctgaatcactctgtggagcagagttgcccattaggaacatgagcctgatgttcttgtgatttagaaatcaaattctaatgtgttgagctgatacacaattttaggcttgtttgttaaagcagacaatgtgaacgtaagtagtacagtgagttgggtagttccaacccgccgctgccccctccctgtcctacacttgcttgggttagatagaaagcagcgccgtctcccattcaccagcctaaatgaacctcatggcttcacttcactcattcttgctcatttattcactgagtcctgtagattctgcccctcccttctgcccttgtttgggggcctcacacctacccaaatggcatccacctaaacactttgggttcggctaggtgcccttaaagcctgattttcaaacgttggagaagtttagaagcaagtcgggctgtaaaattgcagcaatgacctggcatggtgtggcagccatgaagacgctcctgatcttctgcttctgggaatgtgagtgactggtggccccagctgctacgttctgaatcccgcagtggaaatccagcatggcgttcccagacagcctgcgctctgcgggctgctcccagccggggacagcaggtgaagactcctcctccccagcctcctgccttccctgccatctcatctgcatctgctgtcagacttgcgtctccctctgcctccccgcctgtctgcctccccaagaagtctcttccagagctgatcgtgtcttggcttcggtttttggaagagccgagccaacacacatcgtatttgagatacagtgggtcggaagcggtacccagggattttctccagcttggacagcgagccctttgccctctctgggtggcagggtgcctccctctaaaatgagggggcgatgcttggcagtttctagaacctgttcagatcaaggcaacctgggagttagagttccgctagtcttgtctggcagtacagtcggtctctaaatatgcttttattgtaccttccccaccatctgggtgaagcatcagtaatgaaaatggagtggaggctgcattgaccttttccagtgtccacgcactatattttaactgggaagttgcatgtattttctatacttaatactttaaaagcttcttgggcctcttgagaggcttgtaagtgcagcccacgtgtgacttgagctgggaacgcaacttcagattgagaagtcccacttttataggacacagcatttaacagcagctgcgtccaagtcgtgtggcatttggcagcgtgtttccaagtggacctgtggtaatcactttgctcttggggaaccgtggccaagggctgccctgcctccaaagaggctcagcaagggaaggctagaagtcctgtgggctggccaggcatggtggctcacacctgtaatccctgcatttttgggtggcagaggtgcgtggatcacctgaggtcaggagttcgagaccagcctgaccaatatgatgaaaccccatctgtactaaaaatacaaaaattagctgggcatggtggtgtgcgtctgtaatcccagctacttgggagactgaggcaggagaatcacttgaacctgggaggcagaggttgcagtgagccgagatcatgctattacactccagcctgggcaacaagagtgaaactctgtctcaaaagaaaaaaaaaaaaaaaaa

SEQ ID NO: 61154 - DNA, 904 bp, Homo Sapiens
atggtggtcatggcgccccgaaccctcttcctgctgctctcgggggccctgaccctgaccgagacctgggcgggctcccactccatgaggtatttcagcgccgccgtgtcccggcccggccgcggggagccccgcttcatcgccatgggctacgtggacgacacgcagttcgtgcggttcgacagcgactcggcgtgtccgaggatggagccgcgggcgccgtgggtggagcaggaggggccggagtattgggaagaggagacacggaacaccaaggcccacgcacagactgacagaatgaacctgcagaccctgcgcggctactacaaccagagcgaggccaacccccccaagacacacgtgacccaccaccctgtctttgactatgaggccaccctgaggtgctgggccctgggcttctaccctgcggagatcatactgacctggcagcgggatggggaggaccagacccaggacgtggagctcgtggagaccaggcctgcaggggatggaaccttccagaagtgggcagctgtggtggtgccttctggagaggagcagagatacacgtgccatgtgcagcatgaggggctgccggagcccctcatgctgagatggaagcagtcttccctgcccaccatccccatcatgggtatcgttgctggcctggttgtccttgcagctgtagtcactggagctgcggtcgctgctgtgctgtggagaaagaagagctcagattgaaaaggagggagctactctcaggctgcaagcagtgacagtgcccagggctctaatgtgtctctcacggcttgtaaattgtgaaacagctgccctgtgtgggactgagtggcaagtccctttgtgacttcaagaaccctgacttctctttgtgcagagaccagcc

SEQ ID NO: 61155 - DNA, 560 bp, Homo Sapiens
  misc_feature (496)..(496): n is a, c, g, or t
  misc_feature (511)..(511): n is a, c, g, or t
  misc_feature (520)..(520): n is a, c, g, or t
  misc_feature (523)..(523): n is a, c, g, or t
  misc_feature (533)..(533): n is a, c, g, or t
  misc_feature (547)..(547): n is a, c, g, or t
  misc_feature (549)..(549): n is a, c, g, or t
cttttccattcagaaataatacttttggttgacttgaatgtttattggctaggactctaattgaggaaaaaaatacaaaaaaaggatgcaaaatattaattcctatttagaaggatttttttttctagatttcctgctactgctttactttcttgttgctgaaagaaaattattttgtcttcccgtgttctatttaaagtggagaataaaaatgccaaattaatgctatgtattaatgaagcagagataaatcctgtttggtaagaaaacctaaaggttcaattccaacccagctatcaaatctaaggctgatttttattggtttatttttgccttaaatgtattcaagcaatatttgttctaaaaaaaatttgtagggaggtagatatctttgtgaacaggttgagctctccttacaacgaacagcagcttctatctttcaatgcaatctggcagaaagactagctcatcacaaagcagaaaaggaattcattanttaaaggtgaaggantggccccanccnttagccgaanaaaattggctggcncngaaagaccggt

SEQ ID NO: 61156 - DNA, 3840 bp, Homo Sapiens
atgttgttaccctcggacgtagcccggcttgtattgggttacttacagcaagaaaacctcatttatacctgccagacttttattttggaaagttcagatttaaaagaatatgcagaacattgtacagatgaagggtttattccagcctgcttactgtccttatttggaaaaaacttgacaacaattttaaatgagtatgtagctatgaaaacaaaagaaacatcaaataatgtcccagcaataatgtcatctctatggaagaaattggaccatacactttctcagatcaggagcatgcaaagttccccaaggtttgctggcagtcagagagcccgaacgagaactggaattgcagaaatcaaacggcagagaaagcttgcatctcaaacagctccagccagtgcagagttgctcactttaccttacctttcaggacagtttaccactcctccttccacaggtacacaggttactcgaccaagtggccaaatttcagatccatcgaggtcatattttgtagtggtcaaccactcacagtcacaagatactgtaaccactggagaagctttaaatgtcattcctggtgctcaggaaaagaaagcacatgccagtttaatgtctcccggtagacgcaaaagtgaatctcagagaaaaagtaccactttgtctggccctcattcaacaatacggaatttccaagatccaaacgcttttgcagtagaaaaacaaatggttattgaaaatgcacgggaaaaaatactaagcaacaaatctcttcaagaaaagctagcagaaaacataaataaatttttaactagtgataacaatattgcccaagtacctaagcaaacagataacaaccctacggagccagagacttcaattgatgaattcctaggacttccgagtgaaattcacatgtctgaagaagctatacaggacatattggaacagacagaatcagacccagcatttcaggcactctttgatctctttgactatggcaaaacaaagaataataaaaatatatcacaaagtatttccagtcaacctatggaatccaatcccagtatagtcttagcagatgaaactaatctagcagttaaaggttcttttgaaacagaagaatctgatggtcagtctggtcagcccgctttttgtacatcctatcagaatgatgacccattaaatgctttgaagaatagcaacaaccatgatgtgcttagacaagaagaccaggaaaatttttcccaaataagtaccagcatacagaaaaaggcctttaaaacagctgtacccactgaacagaagtgtgacattgacattacctttgagtccgtgcctaatttgaatgactttaaccaaagagggaattctaatgctgaatgtaatccacattgtgctgaattatacaccaatcagatgtccactgaaactgaaatggctatagggattgaaaagaactctttgtcttcaaatgtaccgagtgaatctcagttacagcctgatcagcctgatataccaataacttcatttgtttcacttggttgtgaagctaacaatgaaaacttaattctctctgggaagagttctcaacttttatcccaagatacttcattaactggaaagccatctaaaaaaagtcaattttgtgaaaattctaatgatacagtaaaacttaaaattaattttcatggttccaagtcatcagattctagtgaagttcacaagagtaaaatagaaattaatgtgttagaaccagttatgtcacagctatcaaattgccaagataattcttgtcttcaaagtgaaatactacctgtgtctgttgaaagttcacatttaaatgtatctggacaagtagaaattcatcttggagattcgctgtcttctactaaacaaccatctaatgattcagcatctgttgagttaaatcatacagaaaatgaagctcaggcatccaagtctgagaattcacaggagccttcatcttctgtaaaagaagagaatactatttttctctctttaggtggaaatgctaactgtgagaaagttgcactgacgcctccagaaggcactcctgtagaaaacagtcactctcttcctccagaatctgtgtgttcttcagtgggagattctcaccctgagtcccaaaatactgatgacaaaccttctagcaacaactcagcagagatagatgcatcaaatatcgtctctctcaaagttatcattagtgatgatccatttgtttcctcagatactgaacttaccagtgctgtttctagtattaatggagaaaacctgccaactataatcttgtcttctcctactaaatcacctactaaaaatgcagaactagttaaatgcctatcttcagaagaaactgtaggtgctgttgtatatgccgaagtaggggattcagcctcaatggaacagagtcttttaacattcaaatctgaagactctgcagtaaacaatactcagaatgaagatggcattgctttttcagctaatgttacaccatgtgtttccaaggatggaggatatatacagttgatgccagccacaagcacagcttttggcaattcaaataacattctgatagctacctgtgtgactgatccaacagcgttaggaacatctgtaagtcagtctaatgtagtggtgttgcctggaaattctgcacctatgactgctcaacctctaccacctcagttacagacaccaccaaggtcaaacagtgtatttgctgtcaaccaagctgtgtcaccaaacttttcacaaggatctgccataataattgcctctccagtccagcctgtactccaaggaatggtagggatgatcccagtatctgtggttggacagaatggaaataacttttctactcctcctcggcaggttcttcatatgcctttgacagcacctgtatgcaatagaagtatccctcaattccccgtccctccaaaatctcagaaggctcagggactaagaaacaagccttgtataggaaaacaagtaaataatttggtggattcgtcaggtcattcagttggatgtcatgcacaaaaaactgaagtttctgacaaaagtattgccacagatcttgggaaaaaatcagaagaaaccacagttcccttcccagaagagagtatagttccagctgctaaaccatgccacagacgtgtactctgtttcgacagcactactgctcctgtggcaaatacgcaggggccaaaccataagatggtgtcccaaaacaaagaaaggaatgcagtctcttttcctaatcttgactcacccaatgtgtcctccaccttaaaacccccttctaataatgctatcaaaagagagaaagagaagcctcctctgcctaagattttatctaaatcggaaagtgccattagccggcataccaccataagagaaactcaatcagaaaagaaagtttctccaacagaaattgtgcttgaatctttccataaagcaacagctaataaggagaatggtgatatactatcttcttgatgtgcagttttatttagttagctagtattttgttgaggacttttgcatctatgctcatcagggatagtggtctgcagttttctttttattatgtcctttcctggttttgatattagatcagggaagatttcctcaattgtttgttcaaataagttttccaaacttgtagccttgtcttctccctcaggaatgccaatcattcttaggtttggccttttcacataatctcatatttcttagagactttgtccacttcttttgattatttttctttatctttgtctaattggataatttgaaagccttgtcttg

SEQ ID NO: 61157 - DNA, 346 bp, Homo Sapiens
tcgagatcttacccagggatgcatttctcttttgctcctctgtttgtttgtgtatgcatgacataatgaacctttttagaaaatagatgtttattataacmtagcatctgggtatcctctaacatttttaattgccttaaagataaattagtttaattttatataatatattttcacttcttcccaatggtgatggccttcttcaatatttaataaggtaaaattagcatagtattacaataacaattgcgaataatcaaatatgccctaagcagtgttttctcaatatcagggctttgtctctcttctcttgctctttgtaaaaaaaaaaaaaaaaaaaaaagtc

SEQ ID NO: 61158 - DNA, 126259 bp, Homo Sapiens
gaaaggagaaaggagccaaggagggagggaggttcccttaaagactctttcggaagtcacatacaatcttcttgttgatgttccattggctaaacttgatcacatcactacactaagctacaaaggaggctgagaaatatgatctgtgttctaggcaccatgtgtccagatgaaaattgaggctcttatttcaaagaaaaagttcagtccatggccaggcgtggtggctcatacctgtaatcccagcactttgggaggccgaggctagtggatcacctgaggtcaggagttcgagaccagcctgggtaacatggaaaaaccccgtctctactaaaaatacaaaaattagccgggtgtggtggcatgtgcctgtagtcccagctgctcaggaggctgaggcaggaaaattgcttgaatttgggaggcacaggttgcagtgagctgagatcacgccactgcactccagcctgggtgacagagcagaactctgtctcaaaaaaaaaagtatcagaaaaagcgcagtctggatattgggaaatgaccatcagtctatgcatgctcaggagttccatgtctagcagtgtgtcctataggtttgcttaacccatgtgacatttgacacgtttacaaggttattcactgcagcattgtgacagcaaaagactggaaacaacctaagtgtcctgtaataggggactggttaaacaaattatgggacatttatacaatggagaatgatggccacaaacacacatgaggaaactctcaatgcagtgatatgaaatggtatttaagatgtttcactttggaaaacagtttggcagtttcttatagagttaaacatacatctctcctatgacccagcaagttcacctctaggtttttgctcaaaataaaaatatatatgtatatatagctccacaaggacttctatgcaaatgttcaacagagtttaacatgtgatagacaacaattggaagtgacccaagatcgaacagccaatgaatggataaactggtgagtcaaatattacactggagtttaaatgagtgatccaatgtctgcaaccacatggatgaatctcaaaacatgctgaatgaaaacaagctggatacaaaaaatagcatgttgtaatgatgccgtttatatgaaattctagaagaggcaaaacagaccaatctatgatgacagaaagcagagcagtggctgcctctggggtggagggatggactgggaaggagcataaaagaatttcttgggatgctggaaatgttctgtatcatgattggggtgttgattacacaggtgcatttcactgcatgtaaattataccttgatatttttaaaaagcagggtgcagaacaatgtttaaattatggaatccggtatgtttaaaaagcaaggaaatttgcttgtatctgcattgactgtctagaagagacttgtaatagtgattgtcggtgggagaggaactgggtagctgggggctggggaaaagggacactttgggccataccctgttatacctgttgaatcttaaaccagttgaatgtactacctaattaaaaactaaaactgaaaagatcagttagatgcacacgtgacatcaccacattcatgttttaaatctcctaatggctcttcccggcaatctggacgaagttcagactctgagctgtcctggccttatgtggccccactcaggcagcatcctctccaaccacttttctgttccctgcagagacagctcagtgcctggctccctctggttggcctaagtgcatatgtgccattccctgagtgctcagctcctcggtgaattctccccagccccctgcctgagttggtccctcgggtctcactggacctgctgcactttgccttcccccttcctcatctatcagatcaacacgtgtttcccagagctctctgtgagctggaccccagagtcctggagatgtgtgggagccacttttatgggggaacctgcttccttgtttctgcttcagacagcaggcttctcctgccctgagactcccagcagcgtctcctcttcccaggcccagatctggcctggggtagaaactttgataaaatgtgctgtctttaagttaaatatggctccataaagaatgcattccatgacaagaaccaacagagccctggtttcttagaagatacagagaaaacacactgttgtgggagaattgtgtctgccaaaaagatacatcccagctctaaccctgggacctgtgattgtgaccttatttggaaacagggtttaggcagatgtagtcaggtcagggtgaggtaatactggattagagtgggctactccaatgactggtgcccttaaagagggaaacagacagaggagaacaccacgtgaccacagaggcgaagatgggagtgatgcatccacaagccaaagaaggccaaggaggcttgcagtcataaaagctggggagaagcgaggaagtgtcctcccttagggctttcagagagagcatggccttgccagcaccttgatttcagacttttagcctccagcactgtgagaatacatttcagttgtcttaacctacctggtttgtggttatttgttctttttttaaattttttatttatttatttatttttgagacagagtctcactctgtcacccaggctggagtgcaatggtgtgatcttggctcagtgtgacttccaccttctgagttcaagtgattctcctgcctcaggctctggagtagctgggattacaggcacctgccaccacacctggctaatttttgtattttcaatagagacgtggttccactgggttggccaggctggttttgaactcctggtctcaactgatccgcctgtcttggcctcccaaagtgctgagatcacaggcatgagctaccgcacctggcctgtggttgttaactgtagtcccaggaaatgaatacacacacaaaaccagttaatacctaagacaattccagctagtggcaagtgctttggaaaaacaaaacaaaacaaaacaaaacaaaacaggtgagaagggcgtgggatagagagggactgggaacggtgccacattagccagggtggtcagggaagccctcttggaggaggaggcatttcagtggagaggagaagcccagcatgtgaggaccaggcagaggtgctggtgagggggcacttggtgggcgtgaaagctactggatgcagctctgacgatggaggatacctgactgggattttggaggaagtctccaggaatgaaccgggaaggggctatcctctctttgcctctgcaggtctcagaacctgctgcatggctgctgcaggctgtccctcggcctaggccggctggcagccgatgaaggaggccagcctcgcagctgacatgctgctctctaattgtgattaactaccaagtcctctcctgctccggcctgaggccgctggtgtgacagctgcagagtgaatcaatgaggccaggaaggggttaatgggcagcccctccatctgagcccttcagacaataaggggaggtggggaggcctctggtgggggtgtgtggcatcagctggggtgagtgaatggaggggacagaggccttgtccctggggacagggtgtgagtgctctgtggggagaggggtcagacccccctcccattattttcatccacctccatcgtcctctcccctcccccacccagccagagcatcccagacaactgccctcttggctccaaagtgtgcagcatcttcagccttacggaattctgaagcagaaattctaaaagccaaagaactgcagaatcgtgacatgtcaccgctgtgggagagtccgtctagtcctgtcattctgaaactttcttttgcagtggaacccacaactcccaccccagctcatttccccccaaaataatagtgcattgataacattgagaacagaccctggtaccagccggcctcattcatccttcattcagccccggttctaccacgtacaactagggtaacttgggggtataatgcatagtttataggtgtgtgtgtgtgtgtgtgtgtgtgtgtcttccctagagacagagtcttgctatattgcccaggctggtcttgaactcctgggcacatgcagttctccagccttggccttctgagtggctggctcacaccaccgtattcagtagttccgtaggttttgacaagtttgtaagttatgtaaccaccaccacaattaatatatagaacatttccatcgctgaaaaatgttgcctcatgccccttgtagtcaatacccttccctgtgttacctgatatggtagcatgaataaaggtcatctagagttagtgactctaggccgggcagggtggctcatacctataatcccagcattttgggacgccaaggtgggtggatcacttgaggccaggagtttgagaccagcctagccaacatgacaaaaacccatctctactaaaaatacaaaaatgagccaggtgtggtgatgcacgcctataatcccagctactccggaggctgaggcaggagaattgcttgaacccaggagctggaagttgcagtgatccgagatcacatgactgcactccagcctgggcaacagcaaggctccgtctcaaaaaaataaaaaaaataaaaaaattagtgattctaatccttgaactgtgtaaatgttaccttatttggataaaggatctttgcagatgtaattaagaggcagaggttggagtgatgtggcccaaagcaaagaacaccaggaggctcccagaaccagaaggggcaaggaatggattctgctctagagcctccagaggtagagtggctctgccaacaccttgatttcaaatgcctggcttcagaactgaaagagaatacacttctgttgttttaagcctctcagtgtgtggtacttttttacagtagtctttacaaacaaatatacctagcaaccaccatgccttgttttctatctgtataagttttgcctttgcaaggatgttacatagacagaatcctgcagtatgaagcttttgtgagtttggcttctttcactcagcataacacagttgagatgcatccatgctgttgcatgcatcagaagtctgttccttttggatgctgagtagtatttcactgctggatacaccacagcttatccattcaccagttgaaaggcatttgggtcactcctaattgggagcattataaataatgctgctatgaacatgtgtgtatagatctctgtgtggacatacactgtcatttctccagagtagataccctggagtagaattactgggtcatattgtaagtgtatttataattttatcagaaattattacccgggcatggtggcatgcacctatagtgccagctacttgggaggctgaggcaggagaatcccttgaacccagtaggtggaggttgtagtgagccgagatcatgccactgcactccagcctgggcaacagagtaagactctgtctaaaaaaacccaaaaaaccaaagaacaaaactacaaagaatctgatgtggctcatgcctgtaatcccagcactttgggaggccgaggttggaggattgctggagctcaggagtctgagaccagcctgggcaacatggcaaaacccgatctccactaaaagtacaaaaattagttgggcgtgatggtgagtgcctgtagtcccaggtacttgggaggctggggtaggaggatcacttgagggtgggaggcggaggttgcagtgaggtgagattgtgccaatgcactctagcctgggtgacaaagtgagaccctgcctaaaaaaaaccccaaaaaacagaaagaaactgacaaactgttttccagtgtagctataccattttgcattctctccagcacttagtattgtcaggtttttaaaaatttagatattttaggccaggcgctgtggcttatgcctgtaatcccagcactttgggaggcagaggtgggcggatcacttgaggtcaggagttcgagacgagcttgaccaacagggagaaccagatacttgggaggttgaggcaggagaattgcttgaacctgggaggcagaggttgcagtgagctgagatcacaccattgcactccagccctccagcctgggcatcaagagtgaaactctgtctcaaaaaaaaaaaaaaattagatattttaataggtatgtaacaatcatagggttattgtgagaatgaaatgaacatatctgagaatactgcctagcacatggctcctggcttggaagggtaagctcctcttattgcaatcactatggggttatgtcctgtccaggacaaaaccagaggtgaaaactcaaaaaaaaactcaggtgggccaggaggaggctgtggggaccagtgagctcatgtcccatcttgaaggtcaaggtcccgggaagcagctcctgagatggaaatctgcatgtgggtggttttccaggtagtgctcttaggatcttggaggagccagggaagcaggctcgggcagttgcaatagaggccttgaccagtcccatcaggagctgggccagcccttaggacatgtcacagcctgagacagggaggtcatgcctctgtactctgcaagatcagactttggagtggttgcccacaggagagatgttattaatatcttgggtgaagcagcccttttaagctggtgccttgatccgggtgatggctttgaggtggaaaacaagcctgagtggtttcagctttcaacttttcaagagaagctatgtatctagattttgatgttaactctccaaacttttttaaaatgctggaaattctagacttttcaaacctgctgtgaggggctcacatgccaggcacaagggctggagggggcctgaggctgcctgtcgatgccccttgatataaaaccaggctgggtgcagtgccttatgcctgtaatcccagcacttcgggaggccgaggtgggtggatcacttgaggtcaggagttcgagaccagcatggccaaagtggtaaaaccccgtctctactaaaaaatacaaaataataataataataataataataataataataattagctgggtgtggtggctcacccctgtaatcccagctactcgggaggctgaagcaggagaattgcttgaacccgggaggcggaggttgcagtgagccgagatcgcgccattgcactccagcctgggcaacaagagcaaaactctgtctcaaaaacaaaacaaaacaaaaacaaaaacaaaaaaggaaaaccaaacaaaaaaacccccaaaacctgctgtgtcatctgacatcacgctagtgtctggttgccgcactggagaggacaccccatggggcaggaatctttgggttttgatctccaccacatccccagcatgtagggcagggtccaggcctggatgcagcacgagagaaggaacgcagggcccgaatgagtaatttgcctcagtgtgcaggtcatttaattgcaaagagaggaaaaacgacaaccaaaaacaaccaaatgaaaaaatgagcaaaggatttgaatagacatttctccaaagatgtacaagtggccaataaacagaggaaaagatgctcagcgtcagtaatcattagggagatgcaaatcagaattgcaagcacgagataccgcttcacacctattaggatgcctattaaaaaacaaaaacaaaaaacaaaacaaaacaaaaaaatcaggcagagtgctgtgactcacacctgtaatcccagcactttgagaggctgaggtgggcggatcacctgaggcagggagttcgagactagcctgaccaacatggagaaatcccgtctctactaaaagtacaaaattagccgggcgtggtggcgcctgcctgtaatcccagctactcgggaggctgaggcaggagaatcgcttgaacccaggaggtggaggttgcagtgagccgagaccacgccattgcactccagcctgagcaacaagagcgaaactccgtctcaaaaaaaaaaaaaaaaaaaaaaaaatcgcagatctgactgtgtgaccttgggcaagttgcttgacctctcagtgcctccatttcctcctctgtaacgtgagagtaaaaatactactcatacctacctcgtagggctgtcatgaggactgaataagtgcataggtacagacatgcttaggacagtatcagcacatgcaggaattacatgggagttggctgttaatattattacaggagtggatcaaatccatctctgccatggacttgctgtgtgacctagtgcaggtcactttgcctctcttggtccagttttctcacttgtaaaatgggaccatactgccactctccatagggcaagtgtgcggattcgaggagctcatatgtgaaaggcctccttcaggcgcaaggttggtccttggttatgcacgtatgtgagcctcttggcgtgccttcatatgtggggcataggcaagcactcaagtggcctggactcctatctcggctctcaatgtccccgcttcctggcctgggatcagcaggacctcagtggatccaccatccaggcacatccctttctttccctgcttttttcctgcttcttgggcggcaccaccacctactggcctaaagctacattgcagccaatgtgcacagcggggcggagggaagggaatatggccttgggcagctgctgtgcgcagaatatttacctctgtacacgcttagggtgctgaggcttagggagctcacacggagagagccagctgtgaagctggggttagaatccctgtctccctttcacctcactccaaacaccctcttagaatgggaactcagttcaggttctgccttgggccctagacgatccacccctcccttctgagcagggagccaggagctgaagtccagggtccttggaagtatgtcagggttgtccccccagggtcctgattacagaagaaagaacactggactcagagtccagaggttgggggtctagctttgccttccctatccccaactatcagcaaaacagcctttggaaaatcctcacccatttattctagcacttgtcatttcgaaatatatttactgtgggagagcatttaatgtgagtgttaggttctaacgcaaggagaaaattataaaaataaacaaaaacttttaaagaactcctaaaaatcctttaagtcactcataaagtataatatgggcagttttctaaatatagtcctttgcagcaataaatgcacggaccataaagaacagcagtatatggtggtgattgcatgcatttgcgaactgtaattttaggttctgttctctctcaggggtgtgtgggattccgagctgtggatccacacccccacatctctctcacagctgggatcatgtccaggcagaatcgcccacattgtgtacatcattctcccttctctctctctttctgagcgcacatagctgcatttccgaagttacataataaaaacagctaacatttattgagctttcattatgtattaggcctgctcgcagccctttgctcacgcattaattcattaattcagataatcctcctaagaatgttatgaggtaggtatattattatctcttctctttacagatgaggaaactgaggcactgaatggttaagtaactagcccaaggtcaaatagtgtaccacccagcccgaaggcgttcaccttgttcccgggtaggatcgcagaactggttaagctaggttaccgatccgggtggtgtcagctgatccctcagctgctgtagtgcaagatctgcaaaatatctcaagcactgatcttaggttttgcaatagtgacactgtccccaggaacaacttggggaggttcagacccttgctgtcagaggctgcacagcccctaaaccttgatttctaatcttgtagctaatttgttagtcttacaaaggcagactggtccccgggcaagaagtggatcttttcaggaaagggctattgtcataatttcctcagttacaatttttgcaaaggtggtttcaatagccagtgagtggtacagcctgaatttgaaggcaggaagtccgggacgagaacccacactcttgactggcatacttgccacctgaatggaggctccatagagccacgcgtgcatgcttgtgtacctgttgtcagcccgcaagctccgttaggcaggctagaacctgatccaggttaactttgcatccttagtgctggttctttccatccagggccccactcagggtatatgctcagtgactgttgtacaaatgcataaagctcagtttgcataaagctcacttcagcttctgtatctgtaagacaagaatcagagccaggcacagtggttcatgcctataatcacagaactttgggaggctgaggcgggcggatcacgaggtcaggagttccaggccagcctgtccaatatggtgaaaccccgtctgtagtaaaaatacaaaaattagccaggtgtggtggcacgcatctgtaatcccagatactcgggaggctgaggcagaagaatcacttgaacctgggaggcagagtttgcagtgagccgagatcatgccactgcactccagcctgggcgacagagcgagactccatctcaaaaaaaaaaaaaaaaaaagaatcgaaatcagctcttcagattgctggaggctccgacaagcccattggtgggaaaattctctttaaagacactgatgtgggctgggcacaatgactcatcctgtaatcccaacactttgggaggccaaggtggatggatcactagaggtcaggagtttgagaccagcctagccaacatggtgcaaccttgtctctactaaaaatacaaaaaattagccaggtgtggtgacatgaacccataatcccagctactcgggaggctgagatgggagaatcgcttgaacccaggaggcggaggttgcagtgagccaagattgcacatctgcactccagcctgggcgacagagcaagactccatctgaaaacaaacaaacaaacaaaacactgatatagtttggatttgtttcccctcccaaatctcaggtggggttgtaatccccagtgttggaaaaggggcctggtgggaggtgattggatcttgggggcaaacatcccccttgctgttcttgtgatagtgaatggattcttacgagatctgcttgtttaaaagtgtgtggcacctcctcctaccccgctccagccatgtagaacgtgcctgcctccccttcgccttctgccatgattgtaagtttcctgaggcctccccagtcatgcttcctgtacagcctgcagaaccgtgagccaattaaacttctttttttaaatgaattacccagtctcagttcattataccaatgtgagaacaaacgaatacagacactaaattctcctttgcccacctcctgcttggtcccttcttgaattttcaagctgctcaaccaagtggcctgcaccagcttgggagagctaatcgtgtgtatctgtacccaactctacattcagtaacatcatgtttgtagctcgaaatcagcaatggtgagtatttacactatggcaattggcaaatgcttcaaacaggagttttcccctctagagatgttaaacgtttgccaggaggaaatcaatcctctaatggccaccttcaaggaggcaacacagtggagtgatcatgcttgttggctctggagccagaacacctgggttcaaagtccagctctatcacttaccagctgtgtgaccttgttcagttacttaacctctctgagcctcattagtctcattcatgattacgtatttcattggggactcaatgccatcttccatataagtgctctctcaattaatgttatatattaatattatcaatcagcttaagaggtggggaaactttcttgttttccatcctaggaaagggagtgctgaggacaggacttgcagtgtcaaaaaggaacctcaaaaacggcaatgtgtaactgcaggtctgggccatttttgagggtctcttgagcattggcagaccagatctttatgccaacacaggttgtgcgtgtgggggttagaggaggagaggccttctcagttctttgcaggaaaggctactgttagctctagagcccagaacagatttagggggagagatgatctaaccaaactttccctctgccctcggcttgccagtcttctcgctagtgaacactcccagtgtgaggtagagggttccctgttccacctccttcctccctctgtagaggaggtatgcattggggcaggtgtgtgtaaggccctcctggggtacccctccagggaatcttcccatcttctccagtactgccccatctgacatcctgcctgaagccacaggtttcccttgcaatcactaaagaagcaggagggaaccagcagaactccctgcccatgtgcacaggaggtgatccagaaacttcaaggggaaaaatcctgctctccaccccagcaggcattgatttttggctgcgaagattacagtctctctctctctctctctctctctctctctctctctctctctcacacacacacacacacacacacacacacactcctgtgtgccaggaggttcctagaaggtcctcactcctcgcactcaggtgctccagggctagcccactcctgggaggtgcccacaactgaccacgatgcccacaagactgtgggaagggttgccccatgtgccttcgtgcccctcccactggatcccaacgaaggctcttttcacaacaggaatcagagcatgtcactcccaacctgcctaaaccctccaatggctcccaccacttttgatcaagacctaaatcctttctgagtccaccccatccttacagggtctaaccttgcttccatccctgtcttcaccccttattcctccctctgggctcctcttcaggcccttgaggtgccaagctcactcctgccctgggcctttgctgctgctgtccccttggcctggagcactcttccctgtcctttttgcccatgtgaggctgagaggcagacggaatcatggttgctagtgtagagaggccacactactggagtttgtatttcagttctgtcaccttgaactgggtgacctcacccatctctgcctccctttcctccctctatacagtgggaaagataatagcacctacatcttagggtgttgtgagactgattgagataatctgtatggtttttggcagtttctgaaatgcactgtaaactgtctggttctcctcccatcggaaggtgagaatctgactgctccccttgactctgggtgagagggtagggcaacagcaatgctccatgatttcagaggctgggtcataaaaacggtctgcaggggattcacttccagaacagtggagtgaggaacactgcagactgctttctggtgaaaacaactgatgatgatttctaaaaaacaatcatttgaagtctctggaaattgtcctaagagcatacagcaagtgaagaaacacttattcaagaaaatctactaaatctaggtaagaacagtgagtttgtagaacttgagacacaatccactctctttctcccctccattccattttactgttatggaaactcaactgtgagcagccagggccaagaagatgggagtcatttccccccaagctcctagtcgatggggtacagcatctccccaggaagggaaggctgccagcatttgtcatcctcccaacagctatatcttacagaggctaaactccaggtaggtgtggctgggagactgggatcttccttcctctacccagtccccactcatagggtggtggccacgccaagtgcagcaggctaaaaatattgaagccccagttgcttttgtcttagcttacttgttaaagcagaggttccatgcctggagatgcaagctgagaagaccagagactaagaatactgccccaactcagccctgctcataaagcaagaaggttactctgggagaagtgaactgttgtccctgcctccagctccagagcagtgtcacagatgctttgcccaagagagaggcaggtcataacaacacagatctttaaagttgtccataaaggaactgactttctttagaacagagtatgcagaaatttaagcctaagagtgccctcagaagcagtggcgattttggtagtgatcagggacccaaagttgctatactatatcatcttaaatgttcattttccagcaaagaatttcaagacttgcaaagaaataaacacatgtgacccatacacagggaaagaccagtcaacagaaactacctgtgagagtgctcagaggtcagacttgcacggacttcaaagcaaccactgtaaatatgttcaaagaaataatggaagccatgcttaaagaataagggaaggtaggctgggtgcagtggctcatgcctgtaatccccgcactttgggaggccaagaggggtggatcacctgaggtcaggaatttgagaccagcctggccaacatggtgaaaccccatctctactaaaaatacaaaaattagctgggcatggtggcaggtgcctgtagtcccagctactcgggaggctgaggcatgagaatcacttgaacccaggaggcggaggttgcagtgagctgagattgtgccactgcccttcagcctgggtgacagagagagactccatctcaaaaagaaaaacaaaaacgaaaatcaagaataagggaagcggtgatgactgtgtctcatgaacagagaatgtaaacaagaagatactattttaaaaaacttaatggaaattctggagttgaaaagtgcaaaagaaaaattcactagaggggctcaacagtagacttgagccagcagaaggaagattcagtgaatctgaagacagatcaatagagatttcgcagtctgaagaacagagagaaaaatatgaagaaaaatgaacaaagccttggagaaatgtgggacacagctaggtgcaccaacatatgcacaataacatatataacagaaggagagcaaagagagaaaggaacagaaaaaaatgtgcaaaaataatcactgaagcctttgcaaatttgatgagaaacatgaattatgcattgaagaagcttaatgaactccgagtagaacaaatgcaaagtggtcaacaaccagatacataaaaggaaaatgttgaaacccaaagataaaaagaaaatcttgaaagcaacaagagaaacacagctcatcacatataagggaacaccaaataagaccgacagcagatttctcatgtgaaacgatggaggccctaaggcagtgggacaacatattcaaaatgcataaacaaaaactaccaagcaagaatcttacatccagcaaaattatctttcaaaagtgatgatgaaagagatatttccagataaacataaactgagaatttgttgccaggaaacttaccttacaataaatactaaaggaagttcttcagacagtaatttgaatccacacacacaaaagccaaagtgctctgggaaaggcaagtagatcgttatgaaaggcagtaagaatgcatatttattcaccttctcttaacagatttttaaaaataatttgtatataattgtattgtggggccaagacatatagaaatgtaatatattttgataataatagcacacaggaggtgagtgggagcagagctgtattggattaagaaagtgagaccagatgggaactggaatccacaggaacaaatgaagagaaccagaaattataagtaagaaagttaataaaacaaagtcttttaatatatacttgctctcctttcttctctcagcttcttcaaaagacataaaactatataaagtaataattataacaaagtactgttggttttgtaacatatgtagatgtaatacatataaaaagaatagtgcaaagaggaagaagagagaatagtgctatataggagtcaccgggcacggtggctcacaactttaatcccagcactttgggaggccgaggcaggccagtcacttggggccaggagttcaagaccagcctggccatgtatctctacatataatagattgaaaccatgtatctctacgtataatacaaaaattagccaggtgtggtgtcatgtgctggtaatcctagctactggggaggctgaggagaattgcttaaacccaggaggtggaggttgcagtgaaccaagatcacgccaccacactccagcctgggcaatagcacaaaaatctgccaaaaaaaaaaagatagaaatatataggagtaatatttctatatatcactggaattaagttactgtaaatctgaagtcaattctgataagttaaaacctatatagtaagcctaaactggtcattaagacaaacaaacagaacagtgaaaaagctattaaagaaatttaaggctgggcacggtggctcacacctgtaatctcaacactttgggaggctgaggtaggtggatcacctgaggtcaggagttcgagaccagcctggccaacatggtgaaaccccctccctactgaaaatacaaaaaattaggtgggtgtggtggcaggcacctataatcccagctacttgggaggctgaggcaggagaattgtttgaacctgggaggtggaggttgtagtgagccgagatcatgccattgcactccagcctgggtgacagaatgagattctgtctcaaaaacaaaaacaaaaacaaaacaaacaaaaaatccaaaaaacagaaatttaaataatacactagaaaatattcgtttagtgtaaaagatgtcaaggaagaaaagaggaacaaaaaagacatgagacatatagaaaataaaaagtcaaatgacagacataaatccaacttctctcaatgatagcattaaatgtgattggatcaagtcaaaagggagagatttcctgactaaataaaaagccaagatcaactatatactgtgtgcagaagatacactcaagattcaaaggttaaaagtaggttgggcgttaaaggctgaacaaaatatatcacgcaaacagcaaccataagaaaacttgatttgctatattaatatcaggaaaaagactttaaaatgaaatatgttacaaaagataaagaggaacattttataatggtaaaaggatcaatcgatccattgggaagacataaaaattatagacagatatgcccctaacaacaaagccccaacatgtgtgaagcaaaaacagaaagaattgaaggggcaaatagacaattcaaaaataatatttggagacttcaaaaccccacttttaataatgaatagaacaactaaacagaagactaaagaaggcaatagaggctgggcgtggtggctcatgcctgtaatcccagcactttgggaggcccaggcgggcagatcacctgaggtcaggagttcgagaccagcctgaccaacatggagaaaccccgtctctactgaaaatacaaaattagccaggtgtggtggcgcatgcctgtaatcccagctactcaggaggctgaggcaggagaatcacttgaacctgggaggcagaggtttccgtgagcccagatcacaccactgcagtccagcctgggcaacaagtgcaaaactccgtctcaaaaaaaaaaaaaaaaaaaagaaaaaaaaaagaaggcaatagaagacttgaacaacactaaaccaacaagacctaaaagacatctatagaacatttcacacaacaacaagataatacacattcttctcaagagtacgtgaaaaattatttaggacagactatatgttagaccacaaaacaaacatcaatgatttttttatcttttatttttttttttaatatggagtcttgctctgttgcccaggctgaagtgcagtggcatgatctcagctcactgcaacttcagcctcccgggttcaagcaattctcgtgcctcagcttccagagtagctgggattacaggcacccaccactatacccagctaatttttatatttttgtagagacagggtttcaccatgttcgctaggctggtcttgaactcctgacctcaagttatctgcctaagtcggcctcccagagtgctgggattacaggtgtgagcaaccgtacctggacaataaattttaaaagattgaaatcatacaaagtaccttctctgactaaaatggaatgaagctagaaatcaatagaagaaaaccaagataattcacgaatatgtgaaaattaaaaacacactcaaacaactaatgtgtcaaaatagaaatcacaagggaaattggaaaacaccatgagggaatgagaataaaaatataacataccaaaacttacgtgattcagtgaaagcagaaaaatttatagctgtaaagacctgcactaaaaagggagaaaggggccaggcgtggtagctcactcctgtaatcccagcattttgcgaggctgaggcaggcggatcacttgaggtcaggagtttgagaccagcctggccaacatggtgaaaccccatctctactaaaatataaaaattagctgggtatggtggcacatgcctgtaatcccagctacttaggaggctgaggcgggagaatcgcttgaacgcaggaggcagaggttgcagtgagccgagagcgtgccactgcactctaacctgggtgacagagtaacactccgtctcaaaaaaataaaaaataaataaaaaaatttttttaaaaaggagaaaagtctcaaaacaaccacctaactctacaccttaaagaactacagaaagaatacaaaaattagccgggcatggtgatgggcacctgtaatcccagctactctggaggctgaggcagagaatggcatgaacctgggaggcagagcttgcagtgagctgagatcgtgccactgcattccagcctgggcaacagagcgagactccgtctcaaaaaaataaataaataaataaaaaataaaaagaactagagaaagaagcacagactaaacccaaagctagcagaagaaagaaaataattaagattggagtggaagtaaacaaaatagagtatagaaaaacagtggtaaaaaaatcactgaagctgggcatggtgccacatgcctataatcccagcactttggaaggcagaggcaggtggatcacttgaggccagcagttcaagaccagcttggctaacatggtgaaaccccatctctactaaaaacacaaaaattagctgagcctggtggtggacacctgtaatcccagctatgcgggaggctgaggcaggagaatcacttgaacctgggaggcagaagttgcagtgaactgagatcatgccactgcactgcagcctgggcaacagagcaagaccctgtctcaaaaaaataaaaaataaaaaaataataaatcaaagaaacaaaaaattgatcaatcaaattgacaaacctttagctaaactggctaagaaaagaagattcaaattactaaaatcagaaatggaagttcggacagtactactgaacttacagaaataaaaataattataagaaaatactatgaacaattgtgtaccagcaaattggagaacctagatgaaacggacaaattctggccaggcgtggtggctcacgcctgtattcccagcactttgggaggcaaaggcaggcagatcacaaggtcaggagattgagaccatcctggctaacatggtgaaaccccgtctgtactaaaaatacaaaaaattagcctggcatggatggcacgtgcctgtagtcccagctactcaggaggctgagacaggagaattgcttgaacctgagagatggaggttgcagtgagccgagattgtgccactggactccagcctgggtgacagagcaagattctgtcaaaaaaaaaaaaaaagaaagaaaggaaagaaagaaagggacaagggacagattcctagatacacatgatataccaaaactgagtcatgaagaatggaaatctttatagacctgtaatgaagcagtgatcaaaagccatccaaaaaagaaaaacctttgacaagtccctggtgaattctaccagacatttaaagaagaactaacatcaatctttctcaaactcttccaaaaaatttaagaggagggtcggggggctgggagatccaacatgacctcatccacatgactggcaattggtgctgattgtcagcaggaatgtctgtgttctcctccttgcggtcactcttgctctgttaggtcagacatcatcccttacatagaggcccaagggtccaacggtccaagtccaagactgaagctgcaaggtctcttgaggcagaggctctgaaaaccacatgatgtcacttctgtcacacgctattggtcaaagcaagtcacatgcctcactcagcttcaagtcagtggagaaacagactccaccttggatgggaagaatagcagagtcacattgcaaaggggtgtggataagggttgggaggaatgtgtagccattaatttacaccagataatgtgagtgtttgcactttacaaggtccacaggtccactgatacagtttggctctgtgtccctacccacatctcaccttgaattgtaataatacccacgtgtcatgggagggaccccatgggaggtaattgaattatggggcgggtttttcttgtgctgttctcgtgataatgaagacatctcaagagatctgatgtttttatcggggggagttcccttgcctgccaccatggaagatgtcccttgactcttccttcatcttcagccatgattgtgaggcctctccagccatgtggaacagtgagtccactaaacttgtttcctttataaattacccagtctcaggtatgtctttattttattttattttattttattttattttattttattttattttatttttgagacagagtcttgctctgtcacccaggctgaagtgcaagggcaccatctcggctcactgcaacctccgcctcccacgttcaagagattcccctgcctcagcctcctgagtagctgggactacagtgcacgcctccacacccggctaatttttgtattttagtagagacagggtttcactatgttggccaggctagtgtcgaacttctgatctcatgatccacctgcctcggcctcccaaagtgctgggattacaggcatgagccaccatgcccggcctcaggtatgtctttattagagcgagagaatagactaatacatccaccaaccctaggaagtcagtggaagggtatttccgtatttcatatggaagtcatttccatatgaaaatttagccagaggatttcatgctggttgtctgaaagccaggagcttctaaaaaactttcagggtagctgtctaagcatgacctcatgtcatcctgttgtgagtactaaattagttaattcaggggaggcactcagaaaagtgaagaaagggaaatctttcttatataaatcttagaaatctcatagaaatcttaggaaagtgcctggcgtgcagtaaacacgtgatacatttcagttgttattatcttcacaataatttttttgggtcaggcttgttattttccctgttttacagattaaggggcagagactcagagatgcgcagtaagtcgcctgagggttacgcagcaaataagcagggaagccagatgagaacctacatgacagagtcacccatgtgtgagactccaaagcctcattcaggtgcacagagaggcggttgtgaggacgttcactgctgcgttgccttcagtagcttaacatcagaaacagcgcagatgtccaccaacaggggccacccagtaaaccccagcatgcccagccaaggagtgctttgtgctggttacaagaaatgaggtcacgctatacataggacatgggatcatctccaagacattctgttcagtaaaaagaacatctgaaaaaaaagttccataacccacagaaaatactgccaaatattccaaaaaatctaagtccaagtgtgtgtgtatgtgacctctggaggctgatctgaagcaaatgtaggtgaattaaacaataggatctatttataggactcttcttttcctacttttctttatttttgttggattttgaaacatgttcaaagaaaaattcagagtacaataaagtaccagtcgggcatggtggctcacgcctgtaatcccagcactttgggaggctgaggtgggtggaccacctgaggtcaggagttcgagatcagcctggccaatatggtgaaaccctgtctctgctaaaaatacaaaaattaggtgggtgtggtggcaggcacctgtaatcccagctactcgggaggctgaggcaggagaattgcttgaacccaggaggcaaaggttgcagtgagctgattgtgccactgcactccagcctgggcgacaagagtgagactgtgtctcaataaataaatgaaagaaagaaagaagaaagaaagaaagaaagaagaaagaaagaaaagaaagaaagaaagaaagaaagaaagaaagaaagaaagaaagaaagaaaaagaaaaagaaccaagaagaaaaaataatcaccggagattcctcccctcccctagagctaactaggctaacattttggtatatatctttccagtccggatcctgtgtgactgagtgtgtatatgcatatgtattattttcaactgttggctttctccttgtggtccaagacagctgctccagatttagccattacatctgtttcctgccagcaagaaagggaaaatgggaagtagagggccttttaagtatacaacctagaatttacacacattattctttatcacatctcatttctctaaatgtagtcgcatggccatcctggccagaaggaagcctgggaaatgtggtctttcctctgggctgccttgtgcccagtgaaaagtcaggggttctatgactatgaaagaaacaggagaatggatattgtggcaactagcagtgctattcacctttattctctcaatggtaatatttttccccatcaagaggggaaaatttgtgtcttacattctaaccactgaactccgagagaagacactggcctgtgccattctcttgcgatggagtttcgctctgtcgcccaggctggagtgcagtggggtgatctcagctcactgcaacctccacctcctggattcaagcaattctcaggcctcagcctcccgagtagctggaattacaggcacctgccagcacacccctttttagaccacatagggtagcttccgactgttgccatggcatttgtgaattgtcatgtgctggtgggagtgtctcttagcatgctaatatattataattagcatatatattataatgagcagtgaggaggaccagaggttgctttcatcaccatcttggttttggcgggatctggccagcttctttactgcatcctgtttgttttatcaataaggtctttgtgacatgtaccttgtgaaaccagtcctgcctaagggagcggggctggcggttgttcagagtgaacaattcaaagtcaggtcctccctcttggagctcagagacttgaagagcaaggaccactgtcaggacacaaccccatttgcaaggccggggacacacatacagacccacaggccattgtagagaaagtgttaaaagatggaagtcaagccacggccactggaagtggtgtgccctgagaggcagagggttctccctaagccagggaaggacaaggcagggcaagacagaaactgggcctggggccaggattcctgagctggggctagatttgcccaaatctagggcagggctgactgggtcaagcacagcagggagccagggtgggtcgatccccctgccacaggcttcactcttctggctctggtttccaggcagttctaaaagcctcccagtggcccagtgcagtggctaacgcctgtattcccaacgctttgagaggccttaggcgagcagatcacttaaggccaggagttcgagaccagcctgaccaacatgtcaaaaccccgtctctactaaaaatacaaaaattagccaagcgtggtggcagtgcctgtaatcccagctacttgggaggctgaggcaggagaacccaggaggtggaggttgcagtgagctgagattgtgccactgcactccagcctgggtgatagagcaagactgcatctcaaataaaataaaataaaaaaatcaaatcaaataaaatgtctcccagaatacaccaccccagcaaaatggcaggagggagtgtcacctggggacctccactttggaggtttgagtgggcagctttaagctggaacagtcactcttgctgtgggttctcagggcggagactgagcccccaccctgcctcctcaaatgcatttcctctcagctcccacctgccagcccaggagagagggagggccattctgtccttttcctgcagagtccctttgttcagttggtgaccaacatcctgaaaaacattctcaggagatcaaaaagaagaacattttggtctatgtggtaggttggcccagtgcaccacgcccagtgcaggtccctcttgaaaccacctttgggaaattatgactgagacaccacctttgcaaaattatgactgagacaatgagagatctttttttttttcctttgagacagagtttcgctcttgttgcccaggctggagtgcaatggtgtgttctcggctcactgcaacctccacctcctgggtttaagcgattctcctgcctcagcctcccgagtagctgggattacaggcacgcgccaccatgcctggctaatttttgtatttttagtagagacaggtttctccgtgttggtcaggctggcctcgaactcccaacctcacacctgaggttgcctcagcctcccaaagtgctgggattacaggcgtgagccaccacgcctggcccacagtaagaggtcgaacttaacctactctatcttgcttctaacctccaagctgtccttgttcattcctgggcataagctgaactaaccttgggagaaacttagtttatactttaaacagccctttcccaaagcagacctccttcttgcctggggactaagctgcctttgtaggactaacattagccacaaaattagaaattttggtttaggagtcatgcagctggaggctacaagatcctgaccctccctaaactactcctgacatcagggcttgagatatttttcagaccctgcacttgatggatcagctggcatcacccacgtcaataaactggctcatctgatcttgtggcccccacccaggaattgattcagctcaggaagacagcttggactccctgtgatttcaaccctgaccaatcagcactcctggtgcactggcttctccccacccaccaagttatccttaaaaactcttctccccaaatgctcggagagacagatttgagtcataaaactccagtctcccacgcagctggctctgtgtgaattactctttctctattgcatttctcctgtcttgatgaatcggctcttgatgaataggcagcctgcaaggtgaaccccttgggcggttccactctttgcccagggtgatgttatttctctccaggatggctgcagcggcttctgagcctgcttgcatctggtgtggtccctttcaatgtcacgcaggccaaagcagccctccatctctccatgatcttggcttccaaggtactctgtctctctctctgggtcgccatactggcttccatcaggccctggaatgcatcctgctggttctatcccttggccttcaaaagtgcggtttcctcctggaaggcaccttctgccttacctcacacttccttccctcctacctgccttgagataccagcttgcaggggcattcttgggaaagccgaccccttggactgagtctggagttttgatctctctctctcttttttttttttttggagatggagtttcactcttgatacccaagctggaattcaatggcgtggtctcggcttaccacaacctctgcctcccaggttcaagtgattctcctgcctcagcctcccaagtagctgggattacaggcatgtaccaccatgcctggctaattttgtatttttagtaaagatggagtttctccatgttgatcaggctggtctcgaactcccaacctcaggtgatctacctgccttggcctcccaaagtgctgggattacaggcatgagccaccgtgcctggccttttttttttttttttttttgagatggcatctcactttgtcacccaggctggagtgcagtggcaccatcatggctcactgcagcattgaactcctgggctccagcaatcctcccacctcagcctcttgagtagctgggatcacaggcatgtgccaccatgcctagctaatttttgtatttttttttgtagagacagggtctcattatgttgcccaggctggtctcaaactcctgggctcaagcaatcctcctgcctcaacctcccaaaatactgggattacacgtgtaaaccaccacatccagccctgatctcattcttcagagaatttacctagctggtcacttggtgtctgtaggagcatcgcctctcaggcctgcctcaaaactgcatttcagttgggagtggggcggggggagggagagtgtagtttggggacatcaagcgtctgtggtggatctcctcccaaagtgagactgctttttaatgatatttattgagcacttactgtttgccactgcggtgctaagcactttgcacatactagctcagtgcatccttacagcaatcctgggagggaggtgcttttctcatccgcatgtgctgacaaggctgagaagagctgggtcttgcacggtaccttaagggctaaagacctgcaaggatggtgcatgaaagcaaaaccagagaggcgccttttccaaatgccaatgcgccctccacccagtccttcacaaaccacatcagcatggatagcaccacactccacaggcttttctgcatctcctttgtgtgtgtgcacatgtgtaattaattctggggcaacttcctacatcagtacagagaaactccttgatcattatccactccaacatccttcctgggagggactgactggaaacccaaatgcccttgtaagggcaaatacaaaaactaaaataattctccctggtgcagaaaaaggaaagaaacctcccgtttcctgttcttaaacactctagagcaaacactttagaaaacttctcaattatttctctgttcctttaagatgtgtctttttaaaagccaggtgagcctcctgccagttttacaagccagggatgttttcccaaggacctaggagccatctctttggaaggtaaacatcaagattgcacccttctcatccagtctccatgggcagataggagcctaacttcagtgcttggctccaagttgcaaaacaatccatcgtctatcataaagatgtgagtttatattttctctggataaagacaattagctaacacagatggccactccaattaccaggtgaattcgggatgaaataagttgcaaattgtgttgtgcagtcatctgactcgagaactatttttttttttttgagacagagtctcgctctgttgtccagtctggagtacagtggtacgatctcagctcgctgcaacctctgcctctcaggttcaaacaattctcctgcctcagcttcccgagctgggattacaggcgtgcactaccacacctggctaatttttgtatttttagtagagatggggttttgccatgttggccaagctggtctcgaacttctgactttaagtgatctgcccaccttggcctcccaaagagttgggattacaagcatgagccaccaccccggccctagttattatttgaggacatgtatgcaataggttatacctgcttggttatataggaggacgaaatgtatttctctttgtaatctcttttgtggattgcctgtgatgcccactgcagtctggtttaacgcttatttaataataaaactgttttctcttctacttttgtggaaaggttttctggattagatctttaattttgtctccagcatcttcaaatgtctttctacagagggttggttaaataaatgtggcatctccacaaaagagaatactgcacagtcatggcaaaaaaacaaggagcctgttttcgttgttgaatgaaaagtgcaaggtgcacaacagtttactactttttctgtaaaaaaagaggtctgagaaggctgtatttgccatttgtataatctctggaagggtaaacagcgactgataaaagtgctcgtgtgtgtgtgtgtgtgtgtgtgtgtgtgtgtgttaagagaaactgggcagatgagggagaggaaagggatgaaaacctttctctgtacaccttatattttctgattttttgaaacacgtgactgtattacctattcacagtaagttaacagggatgggaagcatggtggtggcaagcaaacgaaacctctaaaaagaagtcccaggggccgggcgcagtggctaactcttatgatcttagcgctttgagaggccaaggtgggcagattgcctgaactcaggagttcgagaccagcctgggcaacatggtgagacctcgtctctactgaaaatacaaaaaatatgccaggtgtggtagtgcgcacctgtagtcccagctactccggagactgagaggcaggagagtcacttaaacctgggaggcagaggttgcagtgagccgggatcacaccactgcactccagcctgagcaacaggcaggactctgcttccaaaaaaaaaaaattagccaggtgtggtggtgggcacctgtaatcctagctactcaggaggctgaggcaggagaatcacttgaacctgggaggcagaggttgcagtgacctgagattgcgccacggcactccagcctgggtgacagagcaagactccatctcaaaacaaaaaaagccccagaaccagacatccttaagcacttgattctgttcatttctgagctcagccttgagcttagaaccaagtgaaaactaattacacattttcggagttcacattaaacttcttctttttaaaattattatttttgagacagaatcttgctctgtcacccaggctggagggcagtggcacgatctcagctcactgcagcctccacctctggggttcaagcaattctcagtctcctgagtagctgggactacaagcatgtgccaccatgaccagcaattttttgtatttttagtagagatgggtttttgccatgttggccaggctgatctcaaactcctggcctcaagtgatctgcccgccttggcctcccaaagtgctgggattacaggtgtgagccactgtgccatgcctgaacttctcctttgaaggaagatctgagtgtaaaagcagggaatgcctttatttaaaaaaatgaaaaacagaaactaaaacaaaataacaatcacctctgttgcctccatttgagagaatacttccaggggctctgcatgtctggtccccaacctggtcggggagttcactttcagaggctcagggatgggccttccccagccccaccagcaaatcatctctcccggcttccaggagggtacttactctccaactagtgggctttatgggccaggaaggatgacaggaaggggtgtgtggggtactacgtccctccacactgagaatccgaaagccaagatgcccaagattctatcgttatctgcttgtcttgtagaagcccctctgtgagactgaggggcaaaggagagagggcaggggcgtgtctcaacccttctggccacttctaggttgtgcagactgccactcttgttactacgatggactgtcagatcagcaggtggcccaggagggcttgcttgatgcgggctgctttttccttttgcctccgtgccatgcctgtgaggtagttggtacttactggaatccccactgcatgcatgaagaaacaggcacagagaagccaaatgactttcccaaggtcacacagcctgaagggacagccggctgtcccagctgtttcccttctaacacccttgggcctgcctccagctagatgctgcaaatcagtcctctcttgagagtcaaagcaaaggagatctgagctggtcgtcacaggtagtgtgacacagagttggggatagagccgcaccttgcatttccaggtgccatcttccccacagtccccagtgggcacttgcgttcatgattcaattactcaggctctgtctctctgttcctgccccttgctctgtgacctggcctctctggaccccagttccgtccgtgagcgatgggggcggggtcggcggcctgcctaggctggacagtgcagattgcagaagtccgcggacgagaagagccgcagcacgttgaccagagggaacatgagcagcgctccgagcagcgagcccagctgcaccgccgccccgcaccacaagagggcgctgcggctgaggtcgcgcaggaccacgcccagcatcaccttgacgtaactgaggcagccgctgaaaagcacccacgaggccacctgcggggccgggagggaagaggtgcagagtcacggggcttgcggggcgagcgccggagcaaagaactctcacagggctcaggggaacccacggaatactctctaggtgcgaggagcgccttctgggagtgagcctgcggggccgacgggtcccatgagttggccgcccgggggcgaaggagaatccagtggcttttctgggttcacgtgcccatgatcagggcaagggcccttgagagaaggcccctgctgaggtacacatggtgggaagaggcctaccagtcacctcgattccctaagcctccactcccaaatgaggaaggggcgcttcccccacctggggcttcccgggagggtcccacagaccccgctcgctggaaagggccgcgcccaagctctcccaggccttggctaggggtgaggggtacgcagcgggagcagccccaccggccggatactcacaatgaggacttccccaccccagtggccctgcaagagggggcaggggctcatcaccgccatggccatgttgtagcccccaaagcaggtcccaagcacggagaggacccccaggaacagcagagacctagaggaaagtaggggaggtgagtggaggtgagaagcctgacctctgacccccccgccccactgggcggcatgtggatggccagtgtctccatagttagtttagacccatgtggaaaattccaggttgcctggctcaagtgggtcagggaggctcctgagcaggcagggctggcctgagtcatccccagcattaacggcagggcctggcaccccggcaagaaaaacataatggactctggcaccggatggtcctggttcaaatcccagttctactgtttaagctgagactcgcctctgagcctccaaatcggagttttgcaaggctgcatgacctccaggagcagagcatgcaggcctggcgccgctgtgggcccacctggtgtttacctgctggcatttcctcctgcaacacaccctcagcctcagccaggaagctgagttgaagtgaagatggctggatcgggcattggcacagtagggtttgctgtgcctcctcaggagacccctccccttctggcctcagctacctgcctctgcaatgtggagtgtgctgatctccaggggtcctggcagctggcttgttgctgctaggagcatctctctacaggtggccttccatgcaaacctacatctgggaccactgtccttcctcacaggtccttgtccctggggtcccaatctctagaaccccaagactggtccacgccctgggtaagaacagacagaggtctgcctatacccttaaagactctttctgctccaagattcttggattccatgactcagattctgtaattctaacatttggggtttcttggatttgcaggtctgagcctttggtcctgcttccctcaaatcctccatcctctttccagtttctaggtcccaaggtagaaaatccagcttcctggcaagctttctgtcaagctcttctgtcctcactgtccttcttctgggctgggagagtgggtgtaagcaggccagtgaggacaggcaggccagcgtggatacgaggctgtaggacccacctcaaatgtcaagatcccaaggtggtagttctcctacaggggtctgaagcccctgcctcagaaccgtctggtttccttactaaaaattgaaatcccaggtcccagtctaggctggttcaatctgcattttatcaacttgcccagccattcttctagaactgtggctctaagggaaccagcaggaggttagaggcaggaaggcagggccgaaatcctgggaattagaccaggtcaagctctttctccaagcctcagggtttccccttataaacgggaacctcagtggctatctgctcctcctcatggactgatgacaatgatggtcaacgcttaggctggacctgccacgtgccaggcaccgctccaagagctttatagaatcagctcatatcatgcttccagcagtcctaggaggtggaatgttacactcccattttccgataaatatccctgaggcacagagaactgaagtgacttgtcttacacacagctgacaggtggcagagctgggatttggaccagggtgctccccaaacatgttcttaaccactacatgtacagcccagtaggtgcgtttggaattctgggttctgaaatgaagtgttcccccactaggattccctaggaccagatgagggcacacctgttaggcaggaacatggagaccaacgaggcaagagggttggccacaatgctgagggtggcagccaggtggtaggcaactggcccataggacaggcaggagtaggtctgcacagagggcagcatgccgttggtgagcgcgttgacgaaggccaccagggtatagatgaaggccaggtgcgccgggcagcagggggctgctttctcctctagatacccctggccctggctgctgtccaccgtgcctgcagggcccaagtcattctcttcccgcggccggatggagtggagggtgacctggtcattgaggaggtcttccacggaagcctcccagcacctgggttgacgctggaggacaaagaacgccacgaggcagcaggccatcatgatggataggaggaggaagaagaccaggggtgagaagtgggcgggaaggtagcggctctccaggtgggacaagggtgcttccattccggggagggcggacaccaaagctctgggaactccctgcaaaggacaagacagatccctggtcaggggaggggatcaggctgcagaacaacaatcatgacagtgataacagaatacagatcacctgttattattaatggataatgaataaataaacataactaacaaggtggcaataatgactgctcatactgactgcccactgagcacgggcactgtgcatggataagcccctatgcctcctaacagggctgcacagtgggcaccatcatcccccattttagagggaactgaggtatcagaatgcttcgtcccttacctgagggtcacagggagaatgtggcaaagccagactccacctggtgctttctgacttggaagctacaccttttatcaccccacagcagtggcaaccacaaacatgttcagaggaggagctagctggagactgagcagtggagccgcccacctaagaggagagcccccacctaaggggagaatcccccacctaaggggagagcccccacctaaggggagaatcccccacctaaggggagagcccccacctaaggaagaacactgctccacccatcgtctaggaaataagggccttcaggacatgccatcccaaaatatgactgtaggaggccagaatatgccaccccaaaattgacctattggcatattttttatttctagctggttattttgaaaaattgcaggctaaggagtagctctgaaaagttgccattttgtaagataaatttacatctaaaggaaatttttattagtaaagctatcttatctgtaccaagaaaaggtatctgtaccacgaaggggtatctgaaccaggaagagaaaggtgatggcctttatcacccgaggaacttttatctgcataacagtgcaatgtttattcaccataagtttcctcccttcactctcccataatttgtctccaccatcctgcagtagcctcaagcccctattcccttttgtagctcaggatgctatagaagctgaaatcatctggcccttttttgagtctcatattttttggggactcccatgcgtatgtatgtaagtaattaaaatgagtttcctgctgttgatctgccttatgtcagtttaactcataggccgaccaaagaacctagaaggatggaggtgagcagtttttccctcccctacatttgtgataaagccaagtgctgagatggctccgggtgatgctgggtacctgtgcgatgtcagtctccctcgtgggtacagggcttggtacgctgtctgatatctcagtgacattgacgcaggtagtgagaccggagccctgggcaagagccaccagggcgggcaagaggccgctgagtccttcacccacaaagaaggtggtgaggtagtaggtgggcagccggctcatgaacggcaggaaggtcactgaagaggtgcagtccaccagggccaggaagaaggtgaggaccaagaaggcgatgctgtggtggccgtccagcacccaggaggtcatattccagaggaaggcaaagatgatgcaggtgacggttcccacgcccagcagggtgaagatgatgggcacttcggaaaggcagctgggccggaagtgatggagcagggtgaccaggaggggcccgatgttggccagctggatgaccaccgtgaggtaggagggcaggtaccagccctcgggcagctccatcaccagcaggggcagctctacccagagcccattgatggtcacccaggagcccattccgaagacgcagaccagcaggtgcatcaggaaggccatggcggtatctgccctgggccagaggctttctcagatcagcctgcagcggggctggcagagaaggacaccaggtgagtaattccagcttcaccacctagcaagatgctgggacctggggcccagagttttctcttattactccccttcctgtgaacaagctggcttttttttttttcctttgagacatagtttcactcttttagtccaggctggagtgcaatgggatgatctcggctcagtgaccctctgcctcctgggctcaagtgattctcctgcctcagtttcccaaatagctgggattacaggtgcatgccaccatgccagctaattttgtatttttagtggaaacagggtttccccacgttggtcaggctggtctcgaactcctggcctcaggtgatccgcctgcctcggcctcccaaagtgctgggattacagtgtgagccaccacgcctggcccaagctgtctttttattagcagaaaacaagagaagcctttcctaaccgtgattcatgaaagaaaagttcaatccgacacacaaaagcaaacaaagcagcttctgcaaaagataccaacagcaaggtcaaaagttaaatgaaaacacggggaaaacatttgccacataaatcacagacaaagggctcatcttccttgtcaggcctctgagcccaagcctgcgcgtgtacatccagatggcctgaagtaactgaagaatcacaaaagaagtgaaaatggccggttcctgccttaactgatgatattaccttgtgaaattccttctcctggctcagaagctcccctactgagcaccttgtgacccccacccctgcccgccagggaacaaccccctttgactgtaattttccactacctacccaaatcctataaaactgccccacccctatctcccttcgctgactctcttttcggactcagcccgcctgcacccaggtgaaataaacagccttgttgctcacacaaagcctgtttgatggtctcttcacatggacgcgcgtgacattcctaatatataaagagtttttaaaaatcaagaacaaagagaccccatatagaagagggccaaggatatgaacaattcagagaaaaaggtacaaataagctttaaacacatgaaaatattatcaccttcattcacaataggaaaactactccaggtgccatttctcaccatgagattgtcccaaagcctgacaaaatgactcatgttcaaggttattatagattgcgatcttgttggtaatagcaagttatgggaaattttctcctgggtggctaccaacagagagggggctaattaaagggacctgctggaataccacatacctgtttaaaggaataagaaataaggaaagcagatcttggtgactgataaggaaaggtctccaggctataataataatcttgaaacaaaatcaaggcaggtaaatggaaccaggaaaaagtgtactgccttttggtcatagaagaggaggaaaaacatgttttctttgcttgtacttgcacaaagcaacccttgaaggacacacagggactgcagggatgttggtgatgcctctgtatatcttttttttttttcttgtgacagagtcttactctgtcaccaggctggagtgaagtggcacaatctcagctcactgcaacctctacctcccgggttcaagtgattctcctgcctcagcctcccaagtagctgggactacaggcgcccaccactacgcccagctaattttttgtatttttattagagatggggtttctccgtgttagccaggatggtctcaatctcctgatcttgtgatccaccctcctcagcctcccaaagtgctgggattacaggcatgagccaccgctcctggccctgcctctgtatatcttttaataagagttttgatttgtgaaccatgtaaacatattacctgatgcaaatatatggttacctgaaataagatttcaatctggctttttttcctcctgaaattatatcactctctacgtggcctttggagaccacttcctctagccctccagagccattctgccatctgtttacccctttgtcagctaccagtggcagcccacctgtgctgttactaacaactttcttctatctatccttagtctgagcagtaatatgggagatgccaggagtgaggctctggagccagctgtttgagtttgaccctggctctgctgcttacaatctgggtgaccctgggcaagtggctttgcctctctctgcctcatctcctcatctgtaagtaggggatagtgatagtatgaactccgtggtttgttgtgagatataaggatgctggtgagtttatgctgtttccaacagtcccagcatagggtaagcacctctaagggttactgatcattatcgtgaaatggcaggtttggtgacatcgttatttttgtctaattcacatgagaattaatacatgactatgaaaatttaaaaaaggaaaagattcccctactaggtatcaagtgaactcaccagtggtatatgcacctttttgtagagacacgctaactgggccaatcttcacgttttgtagatgggagacgaggtccgaaggggcagaggggctctcctgggatctggactggatcctctgcagcaagcggcctgtccgggactcctcagttcacgctgcagtctttaactccatacttcttccttctagtacaaagcaggagtgtccgttgtggccacgcctcacccaggaaactcctgaatcctggcagctcctccccacggttcccacacacggaattccctcacagggctgggacttccttcctcataccttcactgagcgaacccaatgctcagtggcctttctggtcacctccttttcctctctgggaggagccactcctggggtgtaacgcagtcagatcccctagcagtcccgctctgccccctcccttctgggggcctcagactccattccctcccttaggaagctgacttgactaatagcacaggtgaggcccactccaggcgtgccaagaggacccaaggagggaggggaagctcccagacagcagtggcacacctttgcctgtgctgtcctcccagcctggagcaccagccccctctgctgtccacatccaagctttctacaagactccgtcctccaggagacctctggctgcctcaccttctcaggcgtcctcaccagggcccatgaccccttcatttcaggttgttcttgtgtgggtgcatgcaggcacataccttgagactgaagctttttgagggcaggggctgcttgggaatctgacattttgaaggtggaagggcctttctcaatgacttagcttaggatttgtaaattgttaactcactggccactgccagacagcagatatattactttggtttgcccagtgtgtttaacaatttgttactgtaatcagcagtggaggggatggcaagcaaccttcagcatttctggcttctcaggaatattttggaagaagtggccccccactttggcctctttctctgttctagactcgggccatcttggagctctcccctgcggtaacatctggaaccagttgcctgggttcaaatcccagcttcaacccttacaagctgagcaagtgacctaacctcctgtgcttcagagtcttctcttgcaaaacagctataggctgtcagtaccaacatcagaactgttgctaggaacatgcactaaagtgctaaaactgtgcctgccacatagtgagggctcaatgaaccatcattataagattactatttcagcaaacgtatcagttgcattcaaaaacatgtagttattggccaggcgcggtggctcacgtctgtaatcctagcactttgggaggatgaggcgggcggatcccttgaggtcatgagtccgagactggcctggccaacatggcaaaaccccgtctctactaaaaatacaaaaattagcccagcatggtggcgcacacctgtaatcccagctactcaggaggctgaggccggagaacggctccaacctgggaggtggaggttgcagtgagccgagatcatgccactgcactccagcctgggcaacagagcgagactccatcttaaaaaagaaaaaataaaaaaaaggcgcagtttttgttagacaaatggccactcaactaaaggactacatttcccagccttctttgtagctgcacatggccatgtcatcaagcacaggccaatgaattcaaatgcgactttgagtagtctccttagcccgtttcctgtttagaaaaaaaagtgcagctcgttgccagcactcatttaattttatgtaaacgtgctatttgaggctgaagcaaatctgattctgactgctgttttttttttttttcttttgagacagagtcttactgtgtagcccaggctggactacagtggcttgatctcggctcacagcaacctccgcctcccgagttcaagcagttctcgtgcctcagtctccttagtagctgggattacaggcgtgcaccacaatgtccggctaattttttatatttcttagtagagacggggtttctccatgttgccaggctggtctcgaactcctgggttcaagtgatccccacgcctcagcctcccagagtgctgggattgcaggcgtgagccaccaagcccagccctaaatctgactgattttcaatgtgaaaataacatgtaaaaactgtttttgaagttatttctaaccagaactaacatcagactcatctatttcagaaaaactggattcatcaaacgaatctttggtcaacaactgttcaagaacaatgttaacatcacacataggaatgctaggatttgctattttcagcgatcgagaattactttgttttgtaaatggaaataccacgactaaaaccagaatgctacaaatagagtgatgtcttttgtttccaaagtcaatatactagagcaaggcaaaaataataataaaagcgaggtattttgtggcaaagttatcttggggtaaacactgcagtcacaagtgggtattccttctggcaaacagggaaagagttaacaataagggagtgtgcccttctgctcttcctccatttggctgtctggaatcagatgtgatggccagaactccagcaacgattttgtgctatgaggcatgtggtgggggttagatgcatactaggctcctttgggattttgtggcagagagcacccataccagccctgttttgcctgtgttgaactgttttgtttgtttgtttaatgttgttgttaaattgtaaaagaaacttctatgttgtttaagtcactcttattttatgtacaacaaaagtactcagaggctgggtgcagtggctcactcgtataattccagcactttgggaggctgatgttggcagatcacttgaggtcaggagttcaagaccagcctccaactggtcaacatggtaaaaccctgtctttaccaaaaacacaaaaaattagccaggtatggtggtgggcacctgtaattctagctactcgggaggctgaagcaggagaattgcttgaactcgggatgtggaggttgtagtgagccaagagcacgccagtgcactctagcctcggcgacaaagcaagactcttgtctcaaaaaactaaaagaaacaaacagacaaaaactactccatactaagtgcacagagatacacattccaggatatatattgaaagattatagtaaccaaaaactaatgaatacatttatctcctttaccacctactttctgactctgaaacttaggtcctgtcccaaccaggatttgatcaaaaatcaaaatttaacaaaagtagttgtttagacccttgggggcaaatgtcttgcagagatatgaaaaaaaaaaaaaaaaggagaagagagaaagagggaggaacagaggaacacagaaccctccatatagcatttggtaccaaaagtataaattgagaccaagagtcatttcatatatcaaaactctaattcataaaggagtcaaaattgtagtgactatctgtattctgaatatttcctgaaatagcctcagacattccaggagaaatggacagaagcacagtccagcagtacaggcctgactcacccttccaggtcaagacagcagacgaaggtgcaaaataaacaaggatatagcaaaagcaataaatgatatacctagtaaagagggctaagtcagtagttaaggggagtaggcgaatttgcagatgatggtgacctttgccatatgaaaagctattaaactaatgagagtgtccagttaaacatttacaaacatcagtagctttcccacagagggctggatggggagatgagggcagacagggcagaagtagcctcactttcttgtatgttcgacaactcctaagctctgaacgcctaaatccctgctccccacaaagacgaattctctggttttgacccaggtgctaccacggctgtgtcacttgagggatgggatttggctccgggggtctgtttccttgtctggaaaccaggcacagtgggggtgtgtccccacgtgacccatctgccctatggccctggcccactcccaaattatctccttcctcaaaagtgaggtgtgcttttggacctcggggacacagtgaggaacagtcattaatgtcaatgaaggggatgtcttaggcagagggaactacatgtgcaaaaaggccccagagaaaaggagagactcagaatggctggtgttcggaatgtgttgggatacttttaaaagatgcatatctgtattttctgttttttttttttttgttgttgttgtttgtttgtttattttacagtgaccttgcagttcttatttattcattttaaccagtatttcttgggcaccaactgtgtgctcaaccacaatccctgctctcaggaagttggaggaagcattcacgaagcagaataaaaaacagaaacatagagcaggtcagatggtggcaaggactccggaggaaagcaaagctcctgaatggggaatgtgccgctgtcaaggagaggacatgaagggagtgtgggagtgagctgtctgcagaaagcacggtccaggggagaaaacagcaagtgaaaaggccctggggtgcggccacacctgctctgtcccagaagtggattttgctgttcaaaggacagctaggaggccagtgtggccgcagcagcgggagccaggttggaggggaggagacagggcaggtcccctgtggccctgtggtgacagcttgggtgttttctctagagcaaaaagctccgtgagtgggcagaagagaccagctctaatctagtttttaacaggatcgtgctggctgttgtgaggagaaacatgaggcgccagggaggaagcaggagtaaaccttcggagggttaggaagctgtagcaaaagagctaacaatcaccatgacaacagtgacaaccatagctgccactcctcagctatttattgtgccagaccctgtgctaagctctttgaacacattacctgtcaaatcttgttccacaatcctgaggctggcattatgattatctccattttacagatgaggaaactgaggtttaaaagggaaataaatttgcctagggtcatacagctgggagctgagctttacatccaggcatgcttgactgtggacccagccctgagaaaggcctcagggtgaaggggttctgaaggggccatgggggtcaagctgagcaggatctctttctgctcacagatggcctcccaagacttgggccagagaaagagagaaatggggtacaggctcaggagaagctgagagaggctctgagacatatctgcttcccaaggatccaggaccccttatgtgatcaccagagaccagaaacctaaggcttcgcatgagacagttaagatgccccataatgcgtgggcgacagatagagaagctagaaggatcagttccaggcaaaggtttctcttttgcattcttgcatcaaaagctgtgagcccccagcccaagaaagtgaagagaattgggagtggggttctgaccagggccagtgcaccgtcattgtgtgggctgggccatctcctccagggagctcaggcagcttccatcccacccaatgtcccccgcccccctccacattctcctgccctctgttttcctccatcaaagtattactgacaccagctcagttacgggagtttatctgtgtctatctgttgagcgctggtctctcccattggagtgtaatctccatgtgagcgggggcttgtcctctcccccagtgcccaggtgaccatctggcttgccacgggctgggccacctgagctcctggcaccatggctgggttctcgctctgcagggataatctgccagctggtaggcacctagccctgtgggccagactggaggaaacccgcctcagctatgagggttgtgttggccagggtgacccctggggcagtgccaggtggcagcctgacactggatacatctcactcctgggcaagggtctgagccaattctttcctgggttccaggctcctggagaacttagtgaggcctgtaggcgtctacttagggcctggcctcaccctcatgagagtgggtaggaatggactgactttgagcccatgaagaagggaggctgagaggtcaaaccacaaaacccacagggagagatgggggagatgaaggggagtgagagagaagagactgagacaaagagacagaaagaaccgaaagctagaagcagaaatggggagaaaggacaacagaggcacagagacagggaaaaatgagaagctgcggctgagagggaggcagggaggtgccaggaggcaggaggcagctggggcgctgggagcctggcctcagccaccctcactgttcacagccacatgtagcagaaggccatctctacctcttgttgctgggacctcagagttcccctgaaactcatcccaactcaatgtccctattgcacaggtggggaaaccaaggcccagagaggagatagtgcttccccgaaccctgccccacccctgatctcaggctgtggcagacattcaggcctgtgctcaccggctgtgcaacctcaggtcagctgctcaccctctctaggccttggtttctccatctgtgaaagggtctgggaatgcccagcctttctgggctcagcagaccaggaaaaagggaatgagataacaggcgctcagcctggccagtagaagcggacagtgagttctcttcccccttctcctccctcccaaggccaggaagggcttcaggcctcccatggggctgaccttggtggagcagcctcccccaggccagttcccctcccctccacgtccatcccaactcccagcctccttcccaggctcctgcggcttcagcctggtcaagttgttccgagatagcatggagatggccctgggtaaagtcagtgggggcccagtcttttttttttttttttttttttttaagacaggatgtcgctctgtcacccaggctgaagtgctgtggcatgatctgagctcactgcagcctcaaccttcctggctcatgcgattctcccacctcagcctctgagtagctgggactattaacccatgccaccacgtccgacctgggtaatttttgtattttttgtatagatggagtttcgccacgttgcccaggctggtcttgaactccctgagctcaagcgattcacctgcctcagtctccagaagtgctgggattacaggcgtgagccatgacacccagcatgggcccagccttttggtctggaggcaccaggggtctggaattcacctggatggctcagcctgtcccgactccaacatgccagctgaggaggaaacctttcttccctcctgtccctttgatctttcacctggatggctcagcctgtcctgactccacatgccagctgaggaggaaacctttcttccctcctatctctttggactctcccgacatggcagcctgaaactaggggaaaggccacgggacacctgctggctccagataagtgcccctgccatatcctggtcagtgtcccatgctcctagctagcaggcagccttggtagctgcagctgcaccctcacaggcctgagccgccccgctttgcccacttacctgctggtccagttccccagccgctctgcatgggaggggccagaggcagctcgttttgtataaagctgtccccgcccagagctcggggaaaggcaggcggagggtgggtgtggctcccggcaagaccaggcgcctactatgtgtctctgatctgccctacagcccagctaggaggaggatccagatggtagaactgtataataaagggcttgctttattgaggctctctgccacccagatttcatgagggttgatccccagttgacaaaagctatgtgcaaacagttggttctggcatcaccctgagatctccataattcctttcacacaggaagagagttccctggagcaaaaacagttcaaatactggtgcttcagtaagtcatgtggaaagcggggataataatagtgccctcttcataggacagaaatcctaactgccagtgtgcactgagctgactcagtgtcaggcatgttcttggggcttgagagaaattaatgcatttaatcttcatggccttttggagagatgctattactatccctattttccagatgaagaaacaggcccagagaagtcgagagccttgtgtaggtcacacaccttgtatatggcagaactggtctctgatgcacactgagctaccctgacaaatactgtaaccacctgaggggttctttctgcccactgcataaagaaagaccatgaggctggccatgccacaggggaaatgagtttgttcccaaatcatcttcaaagcttgtaggtgaggggtttttcaaaggcagtataggggaagagttgggggtggccaggtaacaggtgcttgctgctgattggttggggtggagatgaaatcatagggggttgaagctgtgctcctacaggctgaatcgcttttggggggggggccacaggagcagggttggcggtcctggtggagacatcaggtttaggtggagccatgggtgtcaaatctgcaaaaaacctggaaagatggcggggcgtggtgggtcatgcctgtaatcccagcactttgggaggccgaggcgggtggattacctgaggtcaggaattcaggaccagcctgaccaaaatggcgaaaccctgtctccactaaaaatacaaaaattagccgggcatgatggcggacacctgtaatcccagctactggagagactgaggcaggagaattgcttgagcccgggaggcggaggttgcagtgagccgagatcgcgccgttgcactccagcctggacaatagagcaagactctgtctcaataaaacaaaaacaaacaaacaaacaaacaaaaaacaaaaaaaaaacaccaactggaaagatatctcaaaaggccaacctgcaacagtggtgttatttgcaggagtaattggggaagttgcatatcttataacctccagaataatggctggcaatcatttatgtctacaccttaggaggacccaggctcctcttctttccccagcctgatggcctctcattaactttacaaaagtggttgctcacagtgctacggcctgtaagtgcagggccaggatgtgaatgcagactcaaattggtgcctccatggatgtaaaacatattgcacagattctgacacctagtaaatgctcagtgcatattgacttctacaaataattctggcctgcctgttgtgttattttccaagacattcatttacttaacaagcaatcaatcactctccaggctaatgcttggggcgagaggtgagcaggcactagggaaggggccagacccctcgcttagcaggcaggtgttcaggaagtgttgccactgttggggctcaggacatacacacccccaaaatatgactctgggaaaccagaatgtgccacccccaaatacacctctttgacatactttgagctggttattcagagaaactgcagacacaggagtagctctggaaagctattctttggtaaaagaaatttacatctatcaaggaaatctacattagtaaaggtgcctgtatcaggaaaaaggctgctccagaagaattaccctagagactttcttttttttttttttttttaagatacaatttcacttttttttgcccaggctggagtgcaatgctgcaatctcggctcactgcagcctccgcctcccgggttcaagtgattctcctgccacagcctcccaagtaactgggattataggcgcacgccaccatgcccagctaattttgtatttgtagtagagacaaggtttcaccatgttggccaggctggtcccgaactcctgacctcaggtgatcttcttgcctctgcctcccaaagtgctgggattacaggcttgagccactacactggccaccagacagacttttatctgcacaggaagacaaccattatttaccatacaataattcttcccctcaccctcccataactgtgtctccgccaatcccccaaagccctaagaccctattccttaaacttcaatcatctgacccttctttgagtctcatattttgtgggatttccacgcacagatatgtaattaaatatggtttctctcctgttactcagtttcatgtcaatttaattcatagcccagccaaagaaccatgaaaggtggagggaagccatgtttcccttctctatagtaccaaatactttggatctgttaaaaaaaaattgcaggactctaaatttatgatgccaagggagaagttaagccttgcagagtgtgagttatgtggcttgcaggatggccactttcttcttctttttttttttttttgagacggagtctcactctgtcgcccaggctggagtgcagcggccaggctggtctcgaactcctgacctcaggtgatctgcctgccttggtctcccaaagtgctgggattacaggcatgagccactgtgcctggccacaatttcatacttatctctgccaaatactataaggtgtcaaaatttggcatagagggtacaaaactataactcaatccaaacagaataatctttgcttgtataattttttaataatgaaacatcaatattggtttaataaaggcagctatatcttgaactatttagttaaataccctaacttctaatcctgtggccttaggaagtctagtctacagacgtgaaggaagtttctttagggaaaggacttatcatctttgatattaaagaaaagagaatttatataaaaataatcttatatggtaaattcttgttctaaagtaaatgaattggttgtttaaaaagaaggatgtttacaacgagtcagaaagttgaggcatgtcagagattgtgtaaattgtaaaaattttataaaagggaatttatgcaagaaatgttgtacagtttaaaagtgatgagggggccgggcacggtggctcacgcctgtaatcccagcactttgggaggccaacgcgggtggatcacctcaggtcaggagttggagaccagcctggccaacaagatgaaaccctgtctctactaaaaatacaaaaaattggctgggcatggtggtgggtgcctgtaatcccagctactcgggaggctgaggcagaatagcttgaacccagaggcagaggttgcagtaagctgagattgcaccactgcactccaggctgggcgacaagagtgacattccatctaaagaaaacaaaaacaagagcgactaggcctcctgaatgctttataaaatgccaccataactcttaactgtacaacttgcctgctttgtagctgggtaagacctagcacacatggagttaaatgctggaataagtcagaccttatctgcacttctgtctaggtcctaggctctacatctagtacataattacaatctcaaactgactaacaaaagtaaaagttgctaaaagttaacagtgtaacatgtattgttccatagaaagaatctaagataagactgtaaagctgaggctagccgtggaattgtaccattaaatacctatgagtttcctcttgaggttgcaagataacctagggttcccggcctctcagaaagggcattctttgcttaccacagatcagaagccctatacagggactgtgtacacaaaatataaggccagtttccaagggctttcttggcttcgtaaatcaagtttgattccttaaaggaaagcataccattccagtcaaggccttggtaaaaaaaccagtttttccaattgtgtcctgttacaaaagaaaacagattcttattacacttgtgcaaataactatatcgccataacttaagaatactcacagatagtttccaaattctggagaaaatcagggagagagaaacaagtatgctacaaattttgttcatgggagtatactaaattgttaaaagctgttaatagctcaaaagaaaaatttcgaggccggatgcagtggctcatgcctgtaatcccagcactttgggaggccgaggcgggcggatcgcctgaggtcgggagttagagaccagcctgaccaacatggagaaaccccatctctactaaaaatgcaaaattggctgggtgtggtggtggcacatgcctgtaatcccagctactcaggaggctgaggcaggagaatcgcttgaacccaggaggaggaggttgtggtgagccgagactgcaccattgcactctggcctgggcaacaagagcgaaactccgtctaaaaataaaataaaataaagaaaagtttctttgactttgaaaagcaaaacaaagtattagcaatattttaagcaaaatatcaaaaagatcactccagtctcctattagttcagttcgtgcagttaattcctgtcctgcttgatattaatgaacattttagctaagagtcctaaccatttttcctgtattctgatgtcacaatctccaaatttatcagaaacctgcattcaagaacacctgttagagctttatagctgagtataaaacccttctaaagaggatcaaaacaagacaacaattgtttatggatgaccaaaagttttagggtagccatagttaaagacacaattgacaaggaaatctgttacttctgtggcacacaataattttaacataacaattataattactactgataacacacactaagacatatcagaattataggagtctcccataactttggaacacataccaataacatatttatacaaatatggcccaaagaaagccaaacattattttatatttgacaatgcttcctgtatgacttcataccaaataagccaaattttacctttatattagtgtgttattaatgttaaactcaattttaatgttttgatcataaggtcagattttcatggacccttttttttttttgagacagagtctcgctctgtcgtgggcgacagagtgcagtggagcaatcttggctcactgcaacctccacctcctgggttcaagctattcttctgcctcagcctcctgagtagctgggactacaggtgcccaccaccatgcctggctaattttttgtgtttttagtagagatggggtttcaccgtgttagccaggatggtcttcatctcctgacctcgtgatccgcctgcctcggcctcccaaagtgctgggattacaggcgtgagccattgcggctggcctatagaccatttttaaccctttataatttttgtcaaagagcaggttagtgctttaagaaaaacccattgtgcttttattttaatactcaatttacagaaaaactggatgatacacctttaactttagccaagatgtttacacacagtatttcctttacaattaaccttccaaaagttgcttaaaccttcatttttattttattcaacttaaaacaattctttaaccttttaatctaggtaaaaatccacattctcatgcctccttataatctttttaccaaaagtatatgtaaactgttttttcaatagtcttaaatacatgttacactgttaacttttttttttaaggcctacgtaacaaataattattcttggctgggtgtggtggctcacgcctgtagtcccagcactttgggaggccgaggcaggtagatcacctgaggtcaggagtttgagacaagccttgccaacatggcaaaaccctgtctctacaaaaatacaaaaattagctgggcgtggtggtgggtgcttgcaatcccacctactcgggaggctgaggcaggagaatcacttgaacccgggaggcagaggttgcggtgagcttagattgcaccactgcactccagcctgggtgacaagagcgagactccatcttgggggggaaaaaatgggaaactggagagagaaaattacatttcagaaactataacacacctgttattaaattccagtgttgcctaatgttgttcaatttttattactttaaattaaattctaatttttctgactacgagtttccaaaataagctttgttttcttaaagccctatgaactgaaaactagacgtttcagcaggcactgcctctaaacgccccccagccatcacaggaggaaacctcttcactgctggagctgacaactaataactgagcgtgcctggaatcctttgcccccacatctaataagtccatggaacccagggtaattgagatggcatctcttacaagaatcaacttctgggtcaggtgcggtggctcacgcctgtaatcccaacactttgggaggccaaggtgagtggatcacttgaggtcaggagtctgagaccagcctggccaacatggtgaaaccccatctctaccaaaaatataaaaaagttagctgggcatggtggtgcatgcctgtaatcccagttattcgggaggctgaggcatgataatcacttgaacccaggaggtggaagttgtggtgagccgagatcgcgccattgcactccagactggcgacagagcgagactccatcttaaaaaacgaaacaaaacaaaaaaacaggaatcaacatctggatacattacactcgagtcaaagcctggaaagctgaggaagcaacccctgatagccaaaggaacatcctaaatatcagtgtaaagaaataggaaattttaagctcataaaaggtaagtaactgagtgagaactacttatcttactcagtctcacccctacctcaccaaatacttttagatgttcctacctctccttttaagacaaatattaaaactttttaatggaaattattcactacaccaccattgtgggaactgctttacacactctattatttgcagtgggactatgtactacagcaccctcaggatggaatatcagacagagaatctcaattatggtaccattttgcttaattattatcctcatagcaggaataacagttactaacagcaaataacacatgggcctttccagacatgtgcctctgcctgtcattgggtgaggaatgttgtttctatatcaaccaattaggcctagtaagaggtgctgttgaaaaacttaaggaaagggctataccaaaacaaccaaatagattcttggtttaggaacaaaatcatagcatgggtcatcccattcctgggacctttcctaataatatgcctaggactaatgttcttaccctgcctaattaacctttttcaaagatttttaactgacaggatcatggccatttcacagacaactacccaaaaacatccacagacagcgttactgctacagttaatccaagaccagaaaactctgtcccctcatcagcaggaagtagccagaaagaacaccctgcctttcatcctttttataactataaggtctggattgacagagcaggagcattgccatcttggacaagcactgccattctaaagttccccttgatcaaaaaccacctaaatccaaagggcatcagcctaatggctaaggtcagcatgaccataaaccacaaatgacatctctgaccagaaacattccaaccataagttaaagccctccccgaccagagacgtgccagccccaagataacctcccctccaggtggagagatgtcagccccaagataccgtcccttccaaccagagacattccaaccctcaatagacttctcccctacacaggaacattccaagcctgtgataagctctcttacccagaaaccagtaaatacccttagtatgtaagagagagcattcctgactgaaattggacagaggcccctctcaggtttattcttcaaaataaacctgtctttgactgttgagcctcttttcatgtttctttcctctttcttgaactcttacaacacctttgttaggcgcaaattttcagtgctgcaaaagaaatagcactcgaacataaatttaattttctcagcaaggcaattttacttctatagaagggtgtgacttgtggatggaacaatggtgagagcacacctgaacaagggaggggaaggggtttttattcctgatgcaggtagcccctactgctgtgtggttcccctgttgactaggattggaccacacagtctaagctaattccgattggctgttttaaagagagcaggggtacgagtcggagtagcggagtgagtagtttggcgggaaggacagttaggaacaggtgactaaaggtgactcaggtcagtgcaggtgaccaggggtgactcaagaaggagcaggtgatcaggggaatagatgtgaactactgattagaactggtggaaaaggttgtttactgaaactaggggcaaggaggcaaagagaatgagaaagttaaactttaaaatggagaacaaagaacaggggacctgaatatactcatacattggttccttggagaggatctcagaactcattgtacttaacaatttacaggctgaaacatttgaaaaggaatttgttatatcctacaatttccccctttcaattttcatagtacttcctcttcaaactttttaaacatgtcttggcttagctgctcgacttaatcctctaaaagaaaaagcttatctgaataaggtggaggtgagttaaggaagattttagtaagtgctgcttttataagtctttgcactagcccacagatgcatggtatgacataacacctaacaagaatgagtacagctattacggctgcaagagaagtaagaattgaggctgtgatttctttccatttactgaaccccctttctagccaccctgagaaagggttatcgactccagaattttagctagttcattggatagagtggtaagtctttataaggcccttgttatgttcccagtgtgggcagtgttatttgggataaaggtacaacactgagttttaatcataatacaaacaccactttttctgctaatatcatatctggtgccattctgttttcccaggccatctggctagtgggccccaattgttctgctatccctttgacagcatccctggtgtaattaataaactgctgctgattataatagatgtaatttatccagtctacatttttattaatcgtcacccatgaaaatattgacttaaatcctgcagctatttgatctcgggctttaaattcatctggtactcctagtggaactccagtaatgtttatataaacatgggggtcaaacgactcatgtaaggcacttcttttacaattttcttttttatcatgttgacggaatgctagagtgaaagggatggccaattggactagagcacgagtgctgctctaattgcttggcagagtatccagcaatagtgcccctcaatgccaccacacacctgctcagggatgaacaagggcagactgatgggtaagctcttgaaaaggcttggtttcaccgcaccctgttaagtctccaaggaatgctaacttttccccctgccgtgaaagggacaggtgaacttaacatcaggggctggaggctggatggccctccgggctgacccacagggctcttgacctcggggaagagcagtgaaagcgaacagcagtgaaagagttttgcctgactcattgccccggctgtggggttctggaagagagctaccatacagctcatgccctgtccatgagaggaccactcgaggggaaaggggacaatttgggtctctggcctgcctgtcgcacaagcagtcacttttgtttagcatgcgaacagaatatttaatccatttcagccaagcatttacatcctggtactctgtttcaattgctatagtttgttttaaatctataacttctacaacagctactttggttttatcattgggtatataacgaaagaagatctggttagtggagaacttaggagtgggagaagggggtgcaggagttgaggaggcaatgaagcacatttcaaaggatcctctggggtccttccctgagacttctgctcctataccatagaaacggtactctggggagcagaggtggtaatctgtactggattacattggttcatctgacaatggggtggtccatccttgctccttggtagtccataagccattagaccagctaaaagttctgttctaggagggcaagattcctagttcatactgggaccatcatcaatatcttcccagactaactgatcccagttaacagattttcagtctgaggagagccaggaaggacaaagatacttttctgaaggggagagttgcctctggtttggcagatctccacaggtcatcccaaggcaagcatcaaaagtaatagtttggggcgaacttgttacataaagaacgagaagactagcaatagaaggggaaaagaaagagatggaatgtaagaggatcaaacccgttttagctttagcttggttggagttggccctggaatagctgtccatgattctggagggggtggtgctcttttgacctaggtgtgatgagtccatcctctttctgctgtttgaactgtggtctcggtggttagaagcaacaggtagggtccttcccaagccagttcgagtttcccttccctccaacttttgacaaggacacagtccttaagctgatgttggtgtactggaaactgtaggggtggtacctgttctaaaagacctttagttctgagggaagagaaagtggaaaataaaccaagtatataatttctgagaaactcatcttttgttttgaacataggaatgtcagcagtggagtgtaaacagggcaacctacacaacatttcataaggggataagccaacatctctctgaggagcagttcagactctcaagagggcaatgggagagcatctatccatggcaaccgagtctctaagactaatttggttaggtggccttttttttttttttttttttttttttgagagggagtctcgctctgtcgcccaggctggagtgcaatggtgccatctgagctcactgcaacctccacctcccgggttcaagtgattcttctgcctcagcctccctagtagctgggactacaggcacgcgccaccatgcctggctaatttttgtatttttagtagagatggggtttcaccatattggccaggctggtctcgaactcctgacctcgtgatccacccgccttggcctcccaaagggctttttttttttttttttgacagggtctctctccgtagcccaggctggagcgcagtggcgcgatctcggctcactgcaagcaccgcctcccgggttcacgccattctcctgccaaagggcttttttaaaaaatagtttggttcattctttccactcttcttgatgaaggtaggtgccagggagtatgatattcccatgttatatccagtatctgggctaatttcttaatgacatgtacagtgaaatgagtcttattatctgaatcaatgttttctattaatctaaacttgagtataagattttcaactaatgccctgtctatgttattatcagttgtacttgaaaaggaaatagcttctatccaatgagtaaggtgatctactatactaataaatacttcagatgatcagttggaggcatctctgtgtagtcagtctggatactttggaatggccttaagcctggactccttcccccaaggggtaatgttttactaaacaactgtctgtaacctgtttggccagggtataaatcctatgcacccataaactctgatgaatgtgtcacacgaggcttggggcctccaatgggtcctttaatgcagttggaataagacttccctcataaggggtttggataacatttctctctggtctagcaatatccattttccttctgaattctctttagcacctatttttattagtttttaaaccaaagaaagccaaacaccattttatatttgataatgcttcctgtgtgattttataccagataagctaaatttcacctttatattagtgtgctattaatgttaaactcaattttaataaaatcttgtagacatatttattcaattttaatgtctgaccataaggtaaaattgttatagactctttctaacgcttcataatttttgttaaagagcaggttagtactttaagaaaaacctgttgtgcttttattttaatgtccagttcacagaaaaactggatgacacccctttaactttagccaatatgtttacacacagaaattcctttacaattaacatttcaaaacttgcttaaaccttcaaaacaattttttaaccttttaatgtaggtaaaaatccacattcttatgccttcttataatccttttaccaaaagtatattttactttccttacacgccttgaacataaactgtttcttcaatagttttacattcaggaggcctaattacttttaaattatacaacatttcttgcataaattcccttttataacattttccacgactttcacagaccatctttgacatgacttaaatttctgacttgtgaacattcctttctttaaacaaccagttaatttattttaggatgagaatttaccgtataagattctttttacataaattctccttttttcttaatgtcaaagatgataattgttttttcccaaagcaaacttccctcatgtctgtggactagactgcctaaggccacaagattagaagttaggataatacatgttacactgttaacttttagcaaattttacttctgttgaaaaccttgtaagtttggaattttaattaaaggaaggcttttttggtgtccggggacatggacaatagttatttttttggcaactgaaggttatttaatacttgggtgattaattcctcgtggaccgggtcttgacctttgctattaataagacctggttcagtccaaatttttccacatgcatgagccactccaaaggcacactgaaaattggtatagatggttccttcctggttctgtaagtactttaaggcttggctgagtgcaaacagctcacacgtttgagcagaccaattattaggcaattttcctaactctatctctacacctttaaccattgttccctatttctcattcaaacttggacataacggtatgtgaaaaagagcctcttgtgactgttacctctttacaatggaatgttaagcaacccctcagaaagtagggagtagcaaatcaaatctttgtaactacatttcagcctttgccggttgaaatgtcagagccccggcatcagaaagtggtcaactcaagggctgataagaagaatttaccaacaacagtataggtttgaaaagtaaagttttattagaaagaaagaacattgcagaagagtgcagcgaggtgcctcagcaagaggggactgagagggctgtggtggatattccttaggcgcatatatgaaccttaaggcaaaagcttgagggtaatttggagcatactagccacgtaggttatgataaatggttacatttgtagttattttggtgccttaatgtcagcaaggattgcacagtgagtttcgcatagaaattctggttactacaaaatttttgaaagacccctggaaccagatgccaactttagatatgtcgatgaagagtcaaactctgtaaaatatttgaagagatttattttgggcgaaatacgagtgaccatggcccatgacacagcacttaggagatcctgagaacatgtgcccaaggtggttcgggcgcagcttggttttatacattttagagaggcacgaggcatcaatcaaatacatttaagaaacacattggtttggtccagaaaggtgggacaactcaaagtgggaacttccagactataggtaaatttaaacattttctggttgacaattggttgaatttgtctaaagacctgggatcaataggagggaaatgtttaggttaagataaaacattgtggagaccaaggttcttttgaagtcttatagtggctgtccttagagacaatagatgacaaatgtttcctattcagacttttaaaagctgctagactcaaaaaaaaaaaaaaaaaaaaaaaaaaaaaggctgccagactcttagttaatctcagagggcctggaagaaaaagatctagctatattaatagagattatttacagatgcagatttccccccacaaaggacagctttgcagggccatttcaagatatggcaaagaaacatgtttttgggtaaaatatttttgctttcttctttgtcacataatgttatgccagagtcagattggaaagcaagtcagatatataggtttaaataaaacccatctgatgagaatttatggtttgtagggcatgactccccagaccccttagataggaatttcagcaaaataaaaagatcagagcttagtcctcataatcaagaaataaccataaaaatgggcaaccctatggagtagccattcttttattcctttactttactaataaattttcttttgctttgcactgtgaacttgccctggattctttcttgtgtgagatccaagaaccctcttgtggggtctggattgggacccctttccggtaacgattatacttctaaattcctcagataaggagtttttgtctcgggctgcttcagggtcaccaggtgatttttgctctcctcacccctttgttcagcttctctgtttttgcctatgtacacaactctcagatttggccactggggagagcaaagttatacctggtgaccatcaagcagaccattcagagacaaaactccttatcagaactccttattcagaagcaattagacttccctattatctaaagcaggcatctcattccaggcttctttcccccaaatttataagtaactagaatttctatgcatctctggaatgcatgcatatcaaaactcacggtgctgaaaatttgcatctgtaaagaatctctattaacatagctggatctttttcttccaggccctcccaatcctgaagagattaactaagagtctaacaccttttgatggtctgaataggaaacatttgccatctgttgtctctaagggcagcgaacataagacttcaaaagaaccttggtctccacaatcttttatcataacctgaacatgagtctcttgctgatattaaggcattgaaaccacctttgcaaaattattacagacagcatcattgcaggaatccaggacactggagtagaggatgttccatacctttgggttacaagccacccccaggaccttgtcctcattgcaaacaagagggtcattgtgatatggaaggggggcaggggagtgctgggtacagaaatgcagggttcctggtgagggctccacccttgggcctgtgcccacagacctaagtaagaacaggcactcctgttttcatgcctgaatgttgtattttccaagaccactctggcccaccacatccccttcctgtgtccatattgttaaatatgaattctaaatttctcttcaaagaattaatatgtcagtatgttcaattctttgacttctgcttttaaatttaacttcctcgtaaagcaacctttttcgattacctgctccaccctgactcattccgattacctgctccaccctgactcttgcaggttacttgctacctgctccaccctgactaattattctccaccctgcataaccatttttttttcccgccaaagcactcatcctgtcacactctttaaatctgccaattggaattagtttagcctgtgcagtctaaccctagccaataggggaacgacacagcagcaggagccttgtgcattagggataagaacccctttccctcccttgtccaggtgtacactcaccattgctctacctgtgagggtgcacccttctatagaagtaccttgccttgctgagaattaaaaagaaaattttatattcgagtgctatttcttttgcggcactgaaactttatatgtaacaatttgggggctcgccctgattacatttccctctggggcagtctctggttctctcttgtgaggagcgctccgccccctgtggcggcctcagccgggagaaatcagaacccacccagtgcgaggaacaacccgagctgtcagcaacaggggggaagaaaactggccggcaacctagcttaaagaatcctcacatactgcagcgacgactctgcgcacagagcaaggaaggagaagccgcgggagctggtaaagtatttccttggtggtcgggaccaaggtaagaaagccacgggggtggtgggcggtgaagtactccttggtcagggtggcttagaggttaaaaagaggtgagacatccccattggcggagattgaacctcacacaaacctccagtagtagaaaaggcaagaaatttccagtggggaaattgagcctcaccccaaaaggtaagaaatttccagtaagggaaagtgaaccttgaaccttatcccaaaaccatcaagatgggaaatatcccaagcaagacagggagcaagggggataaacatggtaacaaagatatccctccagatggccccctaggtctcatgctaaaacactggaaggataatgaaaggatacacataggaaaaagcaacaaatggtaaaatattgctgttttatttggagtcagggacccatcctcagtccctcaatcttctggtcaaagtttgggtcaaatgagaatgtaatgtgtcagcttctaatccgatacgttaatgataaaagtccagtgtctcaagaagaactaggctatgccctttgttggaggcaaggacctgccctcctatttctcttaaaaataaatagggaagaacccaatctggcacctcaaaatgaaaagtcagaggagccagctctcatgcctaaagactccagtgctgcatggtatcccctagaccatcttcccccactcagtgtccccaaactttcccctcagacagccactgccacctcagatcaccactgccacctcagatcctgttccaaattccccctctactcacgctatccctcctccttataaccctgactgttgggaattaccatcccaccagcctgttctctcccaacctaaagacccctctctaaaaagactccagcgtgaggtagaacaatgtaaaaaagatattcagaatttcctatttccctccgtacctaagaggtcagcccctaccctcttccctttgaaagaggtaccacaagttgggggcgggggggggggcattgactttgtaaatgctcccttaatcagttcagaagtccagaattttacaaaggagcttaaactgctgctggacgacccttacagagtggcagaccaaattgaccaattcttagaacctcagttatacacttgggtcaagttaatgtccatcttgggcatcctcttttcagggtaagaaaggagtatgattcttaggtctgctatggtagtttgggaatgtgagcaccctcccaatgaaaacgttcctaccacggaccagaaattccccgcccaggaccccccatgggaaaataacaatgcagatcaccgggaaaatatgcaggacctaagggagataataaaaggaattcaggaatcagtaccctgaacccaaaatctttctaaagcatttgatatacaacaggaaaaagatgaagggcctatgagattcctagacagactgagggagcaaatgaggcaatatgcaggcctcaatttggatgatccccttgggcaaggaatgttgaaactccaatttttcactaaaagttggccagacatttgaaaaaaaaagttacaaaagatagacaattgggaagaccatcccttaagtgagcttctcagggaagctcagaaagtgtatgtgaaaagggacaaagtaaaacgaaacaaaagacaaaacttatgtttttcaccttccaacagatggctccaaacccaggtacttctagatagagtttccagggagccagaaactataaagggtccgaatcctcttttaaagaaccccagcctccatctggaggaccagggtccttgtctaccaagccccctaaagagtatgggggagaagggttaaagaatcccagaactaaggggaggaaggacaaaataggtgctatagatgtggaagagcagaccacttcaggagaggatgttctgaactaagaaaggagaaagaagccctttcactcatgactttcaaggaagaatagcggggtcaggggctctgtctcttttatcttgagtcccaccaggagcccttgataaatttgggggtgggacctaaacatgagcttatcacctttttagttgattcgggggctgctcgctcctctgtttccccccatctaatgttgtctccttcttagaggaacttttagtctccagggtaaaaggtgtaggattaagagcaaaaattttagaaagcactgaagttagataccaggatcgctcagcttatattcagttcttgtttatccctgaagcaggaactaatttactggggaggaatttaatgttaaagttgggcataggtctacaagtcagcccaagaggattcctcacctcattaaacctactcaccaccgcagatgaaaaatatattaatcctcatgtcttgaccaaagaaggaaaccaagggaaactctaagtccctccgatccacatcaagctaaaaaacccaggggaagtagtaagaaggaagcaataccctattcccctagaaggtaggatagtgttgaaacctataattgaaggccttatttaggatgggcttcttgagccctgtatgtctccttataacatcccaatcaagaatcaagaaatcaagactgctaccagccagtcaagaaattagatgggtcataccagctagtacaggaccttagagctatcaaccaaatagtccagagtacccaccctgttgtcaccaatccttacaccattcttagcaagattccatataatcatcaatggtttactataataaatttgaaggatgctttttgggcatgtcccctggctgaagatagctgagatatatttgcttttgagtgggaggatccatactcagggtggaaacaacaatatcgatggaccgtcttgccccaagggttcacagactcccctaaactttttggccaaattttagaagaagtactagaaaaagttgtcatcccagaacaaatatgccttcttcagtacctggatgacattcttatatctggtgaagatctagagaaggtaactgacttctctacacatattcttaaccatctgcagtttgaggggctatgagtctcaaaaagaaagcttcagtatgtagagcctgaagttaaatatttaggccacttaataagtgtaggcaagcgaataatagggcctgaatgaattgagggaatcgtgtccctacccttgcctcaaactaaacaagaactcaggaaatttttagggtcagtcagacactgtcgctaatggattgactcatatacactgccccgtaaactgttctatcaaaaacttgcccaggagaagcctaaccgtctcctgtggacttctgaggaagttgatcaaatcgagaggttggaggaaaggctcataactgcccctgttttaggcttaccctccctagaaaagccattccacctttttgctaatgtggacagtagggtaccttcgggagtgctgactcaagaacacagaggccgccagcagcccgtagccttcccatcaaaggtcttagacccagtcacttgtggatggcctcaacgcatccagtccatcgctgctatggcaatactaggtgaggaaagcagaaaattaaccttcggaggaaaattgacattaaacacgcctcaccaagttagaactatcttaaaccagagagcagtgagatggcttactgacttgagaatcttaaagtgtgaggccattctgttagaaaaggatgatttaacattgaccactgataattcactcaacccagcaggtttcctaacagggaatccacatctaaggagggaacacacatgtttagatttaattgattaccatacaaaggtttgaccagacctgggagaaacccccttctggactggacggcacttactcatagatggttcctcccaggtgattgagggaaaaagacacaatgggtattcagtgattgttggagaaactcttgtagaaataaagtcaggaaaattgcccaacagttgatctgctcaaacgtgtgagctgtttgcactcagccaagccttaaagtacttacagaaccacatctatacagattccaggtatgcctttggagtggcccatacatttgggaaaatttggactgaacgaggtctcattaatagtaaaggtcaagaccttgttcacaaggagctgttcacccaagcattgaataatcttcagttgccggaagaaatagctattgtccatgttcccggacaccagaaaagcctttcttttgaaagttgaggaaataacctagcagatcaggtagccaagcaggctgctgtgtcttctgaaatgcgtgtttttcacttaactccctacctccctcctcctaccataatccccattttctcttccaccgaaaaagagaaactaataaaaataggtgctaaagagaattcagaaggaaagtagatactgccagaccagagagaaatgttgtctaaaccctttatgagggaagtcgtatcccaactacatcaggggacccattttgggccccaggccatgtgtgacgcagttctcagagtttatggttgtataggaatttataccctggcaaaacaggttacagatagttgcttagtatgtaagaaaactaatagacatactataaaatgattacctctcaggggaaggaatccaggctaaaggccattccaaagtatctaagttgattacacagaaatgcctctgatagatcatctaaaatatttactagtgatagtaggccacctcactccctgggtcgaagctatccccttttcaaatgcaacagccagtaatgtagttgaggccctaattgaaaatatagtacccaggtttcgactaacggaaaatactgactcagacaatggaactcatttcaccacacacattattaaaaagctattccaaaatattagacattagatgggaacaccatactccctggcacccaccctcatcagggagagtagaaagaatgaattagactctaaagaaccacttaaccaaattagtcttacagacttggttgccatggaccaagtatcttcctatcaccctgctgagaatttgaactgcaccatggaaagacattggtctttctccttatgagatgctctatggattaccttatttgcactccactgttgatattcctacctttgaaacaaatgatcaattccttaaaaattatatacttggtctatgttctactttctcctctcttaaaactaaaggtctattagcacaggcaccacccttggagttcctggtgcatcaacattagcctggggatcacgtcctcatcaagagctggaaagaggagaagcttgagccagcctgggaaggtccttacttggtgctcctaactactgaaaccgcagtccgcacagcagagagaggatggactcaccacacccaagtcaagaaagcaccgccccctccagagtcgtgggccatagtcccaggggaaaaccctactaaactaaagctaagaagaatttaactccctttcatctattctattactcttttttctttcctcactctattgctgaccatatagttattaacataaccaagtcaatttcacctcaactattgcatttgatgcttgccttgttatatcctgtggggatttgtcaagccaaagaaagctctctacttcagatacctctgtccctcctggctctcctcagactaggcattagtgaatcgggaccatttaatctggggagatttctataaagatcccagtggcaaccaggagtcttcccccagtgatgtagagcttttaagccatagttggtccaaagttctgtggaccattaaagagcaaggatggattgccccaaccagtttttgtaatttcctaaattcatacattcgttttactaaagggacagtgcccactaactctcagctaaaccagtgcaaccctatacaggttattattttgagcccacaaaattcttcctcttttctaagctggttcccttctttaagccagttttatggtatgggggctgaagtttcagggacagaccctattggattctttgaaatgcacttctttgatcccctgctgtctgcacctgcctctgagcctttttccaaaacctctcacaacggaaccattgttcctcctctatctaacgacaaggccaagatagcgatggtagaagttaaagacttaaaacaaactggcaattgagacaggataccaagatgtaaatgtttggttggaatggatcaaatatttcatccacacgttaaacaaaagcaattgttatgcttgtgcgcacagcaggccagaggcccagattgtcccctttccactagggtggtcctccagttgaccgggcatgggctgcatggtagctcttttccaggattctatagcctggggtaagaagttgtgccaagctctctctctgctatatcccgaagtttgacaccttgtgggtcagcccccaagggccatccagcttccatctcccaacactaagtttacttcgtgtctctcatgacagggaggaaacttagtgttccttggagacctgaagggatgcagtgagcttaagaacttttggccaggcgcggtggctcatgcctgtaatcccagcactttgggaggccgaggcaggcggatcacaaggtcaggaaatcgagaccatcctggctaacacgatgaaaccccatctctactaaaaatacaaaaaaaaaaaaaaaaattagccaggcgtggcgtcatgcgcctgtagtctcagctacttgggaggctgaggcaggaggatggcgtgaacccaggaggtggagcttgcagtgagccgagatcgtgccactgcactccagcctgggcgacagagcgagactctctctcgaaaaaaaagaaaaagaactttcaaaagcttaccaatcagccagcccttgttcatcccctagcagaagtgtggtggtattgtggtggacctttactggacactctgccgaataactggattggcacttgtgctttagtccaactagctatccctttcaccctggcatttcatcaaccagaggaaggaaaaataagacatcgtaaagtgagagaagccccttatgggtctttagactctcacttctgtttagacgcaattggggtcccatggagaatacaagatcaatttaaagtctggaatcaaatagctgcaggatttgagtcaatatcttggtgggtgacaattaataaacatgtagattggataaactacatctattacaaccaacagtgatttagtaactacactagagatactgttagaggaatagctgagcaagtaggggctacaggccagatggcttgggaaaataggacagccttagacatgatattagcagaaagaggaggggtttgcatcgtgactaaaactcaatgttacaccttcatcccaaacaacattgcccctaatggaagtataacaaaggcattgcaaggtctcactgctctatccagtgagttagccagcagctcaggggtaaatgatccctttacaggatggctagaaaaatggttcggtaaatggaaaggaataatagcctcaattcttacctccctcgtagctgtaataggtgtacttattcttgtcgggtgctgtgtcataccatgcatccgtgggttggtgcagaggctcgtagaaacggcacttgctaaaacctcccttaactatcctccaccttatccagagaagcttcttcttttggaaaatcaagcagaacaactaagtcaagacatgttaaataagtttgaagagaaagccgtaagaaaaatgcaagaggaggaagttgttaaatatgaattctaaatttctcttcaaagaattagtatgtctgtatgttcaattctttgccttctacttttaaacttaatttcctcataaagcaacctttttcgattacctgctccaccctgactcactccgattacctgctccaccctgactcactccgattacctgctccaccctgactcactccgattacctgctccaccctgactcattccgattacctgctccaccctgactcattattctctgccctgcataaccattattttcccgccaaagcactcaccccatcactctctttaaattagccaatcggaattagtttagcctgtgtggtctaaccctagccaataggggaatgacatagcagcaggggccacatccttcagggataagaacccctttccttcccttgtccagatgtgtgctcaccattgctccatctgtgaggttgcacccttttatagaagtaccttgccttgctgagaattgaacagaaaattttatattcgagtgctatttattttgaggcacagaaactttatatataacaatataaacccgagaccttggcgggcacacacacaagcagctgaatgtcaagaggagtggaggaacggagtggcagagaatggcagagagcgctggagagtggcagagcagcatggcagagagggagggaagaggcgtctgaactttggaagacacctccactcctcaataaagtctccgcatgtatcacttttcaaacagttcatgtgacctgattaatccaggatgccagacaagaatctggggaagttaacattcaggcatccctggatggcaaggctaaaggagcacactgtaacatatgcccacttgggctccagcacctgtccatctgtgtgttcccccttccctcaggggtttgagcagtggggtgaccaaacagacgagccacaccccctgttgcatgtcctgcaaggagaatcagggaactctcctgtttcagttggaagagcaagtgtccctctctctctcgtggtggggagacatctcttccttctgggctgtcacagccccaacctcaccaacctacctgacaagggagtctggcagaacaagggcaagggcagggagaagcacctctaactctattcctggataataatcaagtctctaaaagtcatcctggagccgggcacagtggctcatgcctgtaatcccagcactttgggaggctgaggcgggtggatcacctgatgtcaggagttcgagaccagcctggccaacatggtgaaaacctaactctactaaaatacaaaaaaaattagctaggcatggtggcaggtgcctgtaatcccacctacttgggtggctgaggcaggagaatcacttgaacctgggaggcggaggtcgcaatgagctgagactgtgccactatgctccagcctgggtgacagagagagactctgcctcaaataaataaataaataaataaataaataaataaataaataaataaataaagtcatcctctagggctttgaggccgttcaagcccctattttttccatctctgtggatgagcctctgttaaatctgattgtggctgaacaagagataatgttcctaatagatacagggaccagttattcagctttaagtgtttattacagcccaatgtgctagtcctccatttcattacgggtattgataaacttcagtgaggctgtttcacactgccactcccttataaaatgaaaggctattcctttacccactcttcagtcctgccaagctgccctgtttctttattaggtcacaatttgctcacaaaattacaagcgaatttacagttaagacctcacattctagctgtaattaactcacacttcaccaaaaaagttgctgcagtctatagaacatcacattttaaaacaagtgccggccaggcgcagtggctcacgcctgtaatcccagcactttgggaggccaaggcgggtggatcacttgaggtcaggagtttgagaccagcctggtcaatatggcgaaaccccatccctactaaaaatacaaaaattagctgggcatggtggcacacacctgtaatcccagctactcaggaggctgaggcaggggaatcacttgaacctcggaggtggagattgcagtgagccaagatagtgccattgcactccagccctggcaacaagagtgaaacgctgtctcaaaaaaaaaaaaattgttcttttgtttgcttttctttcaccctgattcctccttccccctttgccgtcttcagtaccaagctacaaagctaggggtggctgaggacagtaaacagagtgtggtcttagctggctttttccctcctgggaagttgttgtttaggatcctaattctagttcagaggtgcattctaaatagtcttctccattgcctttccccccaaaattaatctcacacgttggcttgtgtgtgcattcacgtgaggaactgaactgtcattttcatagataaataagagactgagtttccttagctccaaagagaaagggcattttgctcctcccagcagaaaggtacccgagtgactggggggccttgcgggagtgttggggggttgagcccccagcgacatgaagtgattctgcagggaactcacaacaaaattagttttaaaaaggctcgtccaggaagcacatataggaactggtcactctgagttttgagccctcttggaggtgctagacctccggagaaaacactgagacacctaagagggtggtggcaaggattcagtggtgacacactgtggagtctcatctgcaaccattacacttcgacctactccacaaaaaccctaggccacagctcagttactccttaaaagaaagtgggaaacaaataatctaagaataaggaaaaacaaggtgttgacgaaaagagttaaactgtgtaaaatagttgaagatatttattcagagcccaatatgagtgactatggcccgtgacatagcccttaggaggtcctgagaacacgtgcctaaggtggtcggggctcagcttggttttgtatattttaggaaggcatgagacatcaatcaaatacatttaagaaacacattggtttgattcagaaaggcgggacaattcaaagcaggggtcagggtgagggtggcttccaggctataggctataggtaaatcggtaaatttaaactttttgttttgttttgtttttttgttttgagacagagactcactcttccacccaggctggagtgaagtggcacaatctcaactcactgcaacctccgcccccatgggtttcaagtaattctcctgcctcagcctcctgagtagctgggattacaggcacccaccaccacgcctggctaatttttgtatttttagtagaggcagggtttccccatgttggccagagtgatcttgaactcctgacttcaggtgatccaccggcctcggcctcccaaagtgctaggattatgggtgtgagccaccttgcctggtctaaatttaaacattttctgattgacaattggttgagtttgtctaaagacccgggatcaatagaaagtaaatgtttaggttaagataaaagactgtggagtccaaggttcttttgaggtcttatattggctgcccttagagacaataggtgacaaatgtttcttattcagacctttgaaaatgtgctagactattagttaatctcttcaggattgggagggcctaaaataaaaagatctagctatgctaatagagattctttacagttgcaaattttcccccacaaagtacagtttggcaggaccatttcaaaatatggcaaagaaacatgttttggggtaaaacaattgactttcttcttggtcatgtaatgttatgccagagtcagattggaaagtagtcatcatatataatgttaaataaaatccatctgatgagaatttatgatttgtagggcatgactccccagaccccttagataggaatttaggcaagatagaaaaaatcagagcttagtcttctcacaagagaatgaccctcttttaggtaccccattgattttacggcatctctactttgcaagtgtttgtgtaaatggacatattatggtctctttgtgcacaattatgtcaaagacaatttagagcttgaaggttgacctccagctgtaaagttcctaagttctctatctctctgctttcttttctgcctgttttaagtctgctattatttttctttctttttttgagacagagtcttgctctgtgcccaggttggagtgcagtggtgcaatctcagctcactacaacctctgcctcccaggttcaagcagtcctcccacctcagcctcctgaatagctgggactacaggcatgtgccaccactcttggctaatttttttttttttttgagacagagtcttgctctgttgcccaggctggagtgcaatggcatgatctcagcaaaccaacgagtttctattaatatctcatggctagagttctgagataatagctataggatctttggttgtatgagtatgtatgtgtgtgtttatgcatacatacacttatttcattgtgttttctagccacaggtactgaattggcttaaagttaaagaatattcataaattaataagcctaaatgcttttcaagttcatgtgacttaagtaaaatctttaataagctagctttaaaattattggtaaagtaatattagaaatgtcttaaaaattgttagcataaatttttgtttgcatttattgatcaagggacttcatatactgccaaatactgtaaggtgtcaaaatttggcatagggtttgtaaaactacaaaaccgttcaaaacagaatgatttttgcttttgtaatttttgataaataagacattgatattggtttaatgaaaacagctaaatcatgaattatttagtgaaataacaatatatttaatcttaaggtttttacttagcaaacacctgaaattcacaggctatcaaatgtttgacagggaaataactttaaatgatgactatcacagttttcataactaacctgggtaaactattaaaataaaatatttaggtaaatgtaatgggataaatacttgtagacaaagttgtcataatttaggatctaaagttatgttaaattaaacaatagatatttcattaactgggtttttttaattaaaaaagatattgcaggaaatcattttttttctaaaaaatgtgttcttgttaaaaggaggataatttttgtctaattcaaagcttatttaaaggttatatataaaataaggtaaaaagaaacaagaaaatatataaagaagttatagaaataaaaaagaatttttggtaagaaagcttaaagaaaaataattttacatgagaaagaaccttgtatggtacatttttgtcctagaataaaatgactggttgtttaagaaagaggaatgttcatacaaaccagaaagtccaagcatgtcgtgaatggtctgtttaagttataataagagcatttatggaaaaagacccacaaactttcatataatcaagttgtctataattaaagggaaattatttataatgatcttttgagagattgggttttgatattaaaaaacatttatacactaaagaattcattagaacaacattttcttaaggtattgatttacttttaataaattacaagactatatatataatatattttttcctgcaaagttcaacttttattgcatctcactgttttcagctttctctccccttttaaagtacctgaaataataactctatctttcaactcatttttagctcctgtaagtttttttattttctcctttgtgttctaactgttgtggcctgacgctaataaatgttttatctttgtggtctaaaggaaacattccttccaacataatatttcctgtagggaacagcggttgaaatgcagaaggtgttttgttttccctttgggaaattggcctaataaacagagtttatgctttattgaaataattcctatgtcattattactaagttttggtttgtttagaaaaaaacccgagattaaattttttttaattaagattattacatacatgtaaccctctgtatgtgcttttaaagtccttgtgccattaagttacagagctttgagtccttggtctaaaaagaacaccaagtcctgctaaatattaaacactgacagcagttaaaacctcattttctgacctggtagaagatgccaatcaaaataaactgtgttcatgagacagaaggccggaaattaaaacgattcaactcctcaaggtctggagactatcaaagaagaggtgggtgcatgagattgtaagggccgattttgagagatcaaatgattataaggccaattttgagagataaaataattgagtttctctataaattaaccattaatctcaaaggcacactgatgcaagactagcatatgggctgctgtgtcacgttaacaaggttttcttggagaattaacccactccttaataaaaggttataaaagaggttataaaggttataaaaaaggcttgtggaatttttatcttgtggtcaggatgattaaaattttatagattgtttatacattttgaaaaacaaatttaattggcctcgtttttattagggcttattgtttaggcaattaagtcttctctctcaaagaatcaaggtttttgccttttttttgaaatctttgagttatcaagttgagtaaatgaaagacttattttacaatgacttgatctgtgatcctattttgtgatatcaagcattttatttatttatttatttatttttgagatggagtcttactctgttgcccaggctggagtgcagtgctatgatcttggctcactgcaacctccacctcctgggttcaagcgattctcctgcctcagcctcccgagtagctgagattacaggtgcctgccaccacacccggctaatttttgtatttttcatagagacagcatttaccatgttggccaggctggtctagaactcctgacctcaggcgatccacccaccttggcctcccaaagttttgggattacaggtatgaaccactgtgcccagccaaatcaagcattttaaactttttatttttatttttaaaattttaatattttgagatggagtctctctctgtcactcaggctggagtgcagtggtgcaatcttggctcactgcaacctctgcctcccaggttcaagcaattctcatgcctcagcctcatgaatagctgggattacaggcacttgccaccacacccagctaatttttctatttttagtagtgacagggtttcaccatgttggccaggctggtcttgaactcctaacctcaggtgatccacttgccttggcctcccaaagtgctgagattacaggtgtgaaaggtgtttaaaggccactgtgcctggcctttaaactttttatatttgacaaactttccaaagtcaaattctaacttggttcctcaatgattttttgatattagtcccctgaagtccaaaagagacacagtcagcttatttggcataaaaatcatacaggaagcattgtcaaatatgtaatagtgtttggctttctttgggctgtatttgtataaatatgttattggcatatgttccaaaattatgggaaaatcctataattatgaatgacttagtatatgttattaatcattatcattattatgtaaaattattgtatgctacagaagtaaccaagtttctttgtcaattgtgtctttaagtatgacttttctaaaacttttgtcatccacagttgttttacttttatccttttcaaaaggatgattttacaatcagcataggactctgacagttgctgttgaatacaggttttggagatagtgacactaaaatagagaaaaaaaatccaacactcccatagagagctgaaatatacatgaatagcaagcagaagaggagttaactgcatggactgaactaatagaagactgaaataatccttctatgactttttgcttaaaacattgctaatcctttctttgtttttcagagccaagaaaacatttattttgagcttttaaaaaatttattattattattattattaacaaataaataatcttctttctttttttcttttatctttctctgcagggcaagttctgtatttatagcttttaacaattgaggaaattatactcctataaacaaaatttggagcatatttctctctatctggtttctctaaaatttggaaactagttgggagtattcttaacttatagcaatatagttatctgcacaagtacaataagaatctgttttcttttgtaagaggacataattggggacagtggtgattttaccaaggttttgactggaacaacatgctatcagatgcagactcctttaaggaatcaaagttgacttacagagctaataaaagcatcttgggaaagctggcctcctatcttgtctacacagtccctgtacaggttcctgacctgtggtaagtaaagagtgtcactttctaacaggcccaggagcccaaagtcttcctgaggtgaggaattcatccaattaatacaggtatttgcaggcacaggccgggcttaagacattaaagtcgaatgtgagattacttatggaataaagttccagcaaagccaattaaaaaaaaaacaaggagcctatatggcaaataattattcttgatgattttatgcaaatactccagccaaatataataagacagaaacttattttgcaaatgaattttgttctataatttgtcctcagtgaaaggggactggagagagaaaaaattatgtttcaaaatcacctatagtacacctgttgttagattttagtctcacttagtgtttttaaatttttattattttctatagtttggactaaactctaaaatttttcctggtcacaagtccccaaaataatttttttcattttttttcttttttcctttccttttccccccacattttttcctgattagaaatcaccaaacattaaactgtgctttcctaaagccctgtgaactaaagctagacaatctatttacatacataagctactttcatacctgcctactggtgtatgaacttcagagtaatatggcctatattgatttcccaggattattgttgttgttgttgtttttctcctttcctcccccattttctcttaggacgtgagacttcacaacctgctaaagcgagctttcctaataatgtggaacctacctgtctatgaataaactgtcctagtcatgagagatcagacaaaacctgagaccagaggctaattttcttctaaaatgcttttaaaaagaaaaggggggaaatgtgaaaggaaaataaacttgggaccctcaaatcactaagccaaaacgaaaagtcaagctgggaacggcatcgggcaaacctgcctcccattctaatgggatagctaaataagatagctacaaagattttaaaaagctacatacctccctcacaattttcccacaaggaaattccttgtgtacctagaacagacagaactcaaagtcatccctctgctcatgggagacaaatgcacatctgatggcttcctttgccctattgcttcgctaagccagactaaggcataagtgactattcctgcaagttgcatattcagtggagggctaatcagaaactcaaaagaatgtaacaatttgtcctttatctacctatgacctggaaaacccctccccacttcaggttgtctcacctttctggatggaattgatgtacatcttacgtatttgctgactgatgtctcatgtctccctaaaatgtataaaacctagctgtgccccaactaccttgggcacatgttatcaggacctcctatggctgtgtcactggtgtgtccttgaccttggtagaataaattttctaaattgattgagacttgtctcagataactcttgatttgcagtaagtagcatttctaaacatctctggaatgcatgcatattgaaactcattatgcaacccttgctgacatcaaggcaggaaaatgtctacaaatgtaatcatttagcgtgacctatgtggctaatgtggaccaaattatccttaagctcctgctttaaggtgcataaatgcccctgaggaaaaatccaccttggcactctccatcctatcttgctgagattcttgcctgcactcttctacagagttctttctttctaataaaactttccttttttcaaaccaatactattatccataaattcttcttctttttttgtttttttgaaacggaatctcactttgttgcccaggctggagtgcagtagcatgatcttggctcactgcaacctccacctcctgggctcaagtgagtctcctgcctcagcctccagagtagctgggattacagacgtccaccaccacgtccagctaatttttgtatttttagtagagatgaggtttcaccatgttggccaggctggttttgaactcctgacctcaaatgatccacctgccttggcctcccaaagtgctgggattataggtatgagccaccatgcccagcagtaaattctccttactaatccacgagtggaccactttccaatgctgaggctctgacacctcgctgggcagccacttttgattattttgggttgtcagggctcagggacacaagaacttgctccttaggggagctggaggtctagtagggattgcttgttctccatcaggcccctagtagggaggcctctcctgtccccaatccctgactcccagggatgctcccctccaaaccacagcaggaagttcctccttaggtcagacccacagccctgatgctgtggtctcactgcaggtcatagtctcacaggggcctcttatattattttaattttaattttaattaaattaaattaattttttttttttagatggagtctcgctcttatcgcccaggctggagtgcggtggtgtgatcttggctcactgcaacttctgcctcccaggttcaagtgattctcctgcctcagccacctgagtagctgggattacaggcatccgccaccatgcctggctaatttttgtatttttagtagagacagggttttgccatgttgaccaggctggtctcgaaatcctggcctcaagtgttctgcctgcctcagcctcccaaagtgctgggattacaggtgtgagccaccgtgcctggtcttatattattttaattttaaatttaagaatacattcttaatatcaaccttcaaagactccctgttgcttaccaagttaagaaaactacttaaacctcacatataattcctttctcaactgggaccaataaaccgtgacagctttattgaagggggccagccccttcacacctgtgggtatttctcgtcaggtgggatgagagactgagaaaagaaatagacacagggacaaagtacagagaaagaacagtgggcccagggcactggcgctcagcatacgaaggacccgcaccggcgccagcctctgagttccctcagtatttattgatcatgatctttactatcttagcaaggggagtgtagcagggcaacaggtggggagaaggtcagcagggaaacatgtgagcaaaggaatctgtatcatgagtaagttcaaggaaagatactgtgcccggatgtgcacgaaggctagatttatgtttctctttacccaagtatctcagtgtagcaaagagcaacagagcagtattgctgccagcatatctcgcctccagccacagggcggttttctcctatctcagaatagaatgaatgggaatggtcggctttacacagagacattccattcccagggatgagcagagaagccttcctcttatctcaactgcaaagaggcctccctctttcactcctcctcctcagcacagaccctttatgggtgtcgggctgggggatggtaaggtctttcctttcccatgaggccatatctcaggctgtctcagttgggggaaacgttggacaatacccaggctttcttgggcagaggtccctgtggctttccacagtgcattgtgtccttggttaacagagaatggagaatggcgatgacttttaccaagcatactgcctgcaaacatattaacaaggcacatcctgcacagtcctaaatccattaaactttgatccaatacagcacatgtttctgtgagcacagggttggggataaagttacaagttaacagcatctcaaagcagaaacaatttttcttaatacagatcaaaatggagtttcttatgtttccttttctacatagacacagtaacaatctgatttctctttcttttccccacactttctcacgtgttctttctttctttctttcttttcttttttgagatggagtctcgctttgttgcccaggctggagtgcagtggcgtaatctcagctcactgcaaactctgcctcccaggttcaagtgattctcgtgcctcagcctcccgagcagctgggattacaggcatgcaccatgacgcccagctaatttttgtattttcagtagagacgggtttcaccatcttggccaggctggtctcgaactcctgacctcaagtgatccacctacctcagcctcccaaattactgggatcatatgaatgagccaccatgcctggcccatgtttttcttgtactttaggctttgctacttacaaccagaactgcttaccattctgtcagaagccttccaaccagggcaactccatcttgaataggggctgggtaaaataaggctgagacccactgaactgctttcccagaaggtcagacattcttagtcacaggatgggataggagtttggcaggactggtatcacaagtacaggtcacaaagaccctgctgataaaacaggatgcagtaaaagaagccggccaaaatccaccaaaactacgatggggatgaaagtgacctcgattcgtcctcactgctcattatataggaattataatgcattcgcatgctaaaagacactcccaccagcaccatgagaatttaccaatgccatggcaacgtcaggaagttaccctacatggtctaaaaaggggacgaaccctcagttctgggaattgcccatccctttcctggtaaaacaatgaataatccaccccttgtttagcatacgatcaaggagtaactataagtatgttcagctgagcagcccatgccactgccctgcctatggagtagccattattttattcctttactttcttaaataaacttgctttcactttactctatggattcaccccaaattccttcttgtgtgaggtccagaaaccctgtcttggggtctggtttggtacccctttctggtaataattctgtaagtatttgtagtacgtctgagccaccaaaatttccatactgatccttccattagaatatcctttctgcctgtctctttctggcaggatctgatccatatttcaaagccagtctcaaatgccaccttttccaaagaaacctatccttatatctttatctaatacaaacagtatatattgggagcctaagaaatgcttgttgcatacatcaatgaatgaaccccaaaccaatgtatttctcccttccttgtaatctccagaaatgtttataaactttgttgttgtttatttgtttgttttatttttatttttattttgagatggagttttgttcttgtcacccaggcgggagtgtaatggcgcgatctcggctcaccacaacctctgcctcctgggttcaagtgattctcctgtctcagcctcccgagtagctgggattacaggtgtgcactaccatgcccagctaatttttgtggttttagtagaaatggggtttcaccatgttggtcaggctggtctcaaactcctgacctcaggtgatccacccgccttggcctcccaaagtgctgggattacaggcgtgagccaccgtgcccggcctgttgctatttatttaatatactttatttttttgagcgattataagtttatttttatttatttatttatttatttatttatttttgagacagggtctcattgtcacctcttgcccaggctggagtgcagtggcacgatgttagctcactgcaacctctgcctcccagagtcaagtgatcctgccacctcagcctcctgagtagttgggaccacagatgtgcaccaccacgctgggctactatttttatatttttagtgcagatggggttttgccatgttgctcaggctgatcctgaactcctgagctcaagcaatctgcctgccttggcctcccaaagttctggaattacatgcgtgagctactgagcccggccttaggtttacagaacagcattccacccatgttatttatgcaggggagcacaccacacacatcactttgcagcttcctttctcctcttatatgtcttacagatctttctgtgttctgtacattgagacactcattcattggcttcactcattcatttgaattcattcctttgttcaacagatatttatcgtcagctctatgtcaggcactatgagaagtgcttgggatataaaactgaacaaaataaacaaagtcctttccattggagagatgacattctagtgtaaggagatagacaatagataataaatacaacaaataaataaatacatggtttagtatgttataagatgctttctgtaggaaaaaagtgagagggacctggagtggagggaggaccgagtggggacaggtgcagggtgggggcagccagtagagcccctctgaggaggagtggatcacaggaggatgactggcaagacctaaaggtggcaagctgtctctggtgctggctctgagagcaggatagctggagtagagtgagggaaaggcgaggtcagaggtgaacctgcagggcaggtggggctccttccgctagcgcatggtgttccattatccagatgcaccaggacaaatgtcgcccactgccattactaggtgcttaccatgtgccatcaagaacaataccgcaggccgggtgcggtggctcacgcctgtaatcccagcattttgggaggccaagatgggtggatcacttgaggtcaggagttcgagaccagcctggctaacatggtgaaacctggtctcgactagaaatctaaaattagcctagcgtggaggcgcactcctgtaaacccagctacttgggaggctgaggcaggagaatctattgaacccaggaggcagaggttgcagtgagcctagatttcgccattgcactccaactgggcaagagcaaaaatctgtctcaaaaaacaaacaaaaacaatactgcaataaacattctgtcagtctgtcattttgcccatggacagaatatctgcagaattaattcccggcagtgaacttgagagagatcacccaattgccttccaaaggagctgtgcctggaccatgggtttcagcacaaagtgctgctccctccaacttgtagactcttctggcaggtcacggtggagctcacattctagcgggagagtgtccagggcagagatattccattccgtgtcttttctcccagggctcgcacagagagggttcacgcggtagtcagtaggtgggcagtgcttggtgaaggcattgatgggtggagggattgaaggatgaatgaatggattaggggctgacagtgccgctgcagttactcaaaggagccaccaggaggcgcagggagcccacattctggagacaaaccttttaaaaaaagcatctggtgacttaacgaccttttcaccaatggcttgtgtggggccttaatgctagggtgagaaaaaggtgggagatggaagaaaggggagtgggtaaaaggacatgtgggagaagaaggcagagagagggccttctgagggggcctccacgccaggtaaggaccgtttagctcccctaagagcctgcagcattgatgcagatcccagcaaagccaaaacccccttatgcccacagttgagcccaaaagcccagaacagaggggaaaaataaatttcaggataggccaggtgaagtggcttacgcctgtaatcccaaaacttggcgaggtcaagtaatcccaagtactttgggaggctgacaggggaaactctatctaaaaaaaaaaaataagaaaaggaatttccaggataaatatgtacagtataatcccatttatgtgaaaaaaaaaatctccacaaataaattcctttgtgcgtgtgtgtgtgtgtgtgtgtgtgtgtgtttgtgtgtgacggagtctcagtctgtcgcccaggctgaagtgcagtggcacgttctcggctcactgcaacctccggctcccaggttcaagcaattctcctgcctcagcctcctgagtatctgggattacaggcgtgtgacaccacacccagctaatttttgtatttgtggtagagacggggtttcaccatgttggtcaggctggtctcgaactcctgacctcgtgatctgcccgcctcagcctcccataaattctacatattagtttggggagtgtgtatttaccacatacacatctacagggaaaatctggaaaggtaaatgtcgaattgacaacagtggttacttttgttattgtgtgtgtagagaggggcaggggacaaaaaggaaaatgaggagtgatcaaaggggactttaattttcttttttttttttgagacagagtctcagctcactgcaacctctgtctcccaggttcaagtgattctcctgcctcagcctcccaggtagctgggattacaggcacccgccaccacgcctagctaatttttgtattttattttagtagagacagggtttcggtttcaccatgttggccaggctggtctcaaactcctgacctcaggtgatctgcctgctgcggcctcccaaagtgctgggattacaggcgtgagtcactgcaccgggcccccaaaggggactttagactaaactgaaacattttaactttccaggaatctgtaaccctgctattatataaccacaaattaaaaattactttaaaaaatgaaaaaaaaaaaaaaaaaaaaaaggctgggagcggtggctcacacctgtaatcccagcactttgggaggctgaggcaggaggatcacgaggtcaggggtttgagaccagcctggccaaaacggtgaaaccctgcctctactaaaaagacaaaaattagcagagtgtggtggcacgtgcctgcagttccaactactcaggaggctgaggcaggagaatcgcttgaacttgggaggcagaggttgcagtgagcctagactgcgccattgcactccagcctgggcaacagagcaagactccggctcaaagaaaaaaaaaaaaggaaaagagaaaaaaaaaggaacaataacaacaacaaaaattaaatgctatcttgtgttgcatcaatagaagtcttacgtgcagctcaagggaggtgacagccccctctgctctgctcagaccacacctgggacctcctttcctcttcttggccctgtcccgtgagaagaataatgacagcctaaggcatgctgggggttggagatggggggaggctggggccatctgcacatgatacagatccaggaatagtccctttacccaagcgggagaaactgggcaggtgagcagcttccaggtgtgtggatggcaaatggatgccagactttaggataggaatccaggggtgcagcggatggaaagtccagcccaggatggggcatagttttcccacccagctagggagggagggtaggggctactctggggtgtcaggagtgccgaagcctgaggtaggcgcaagccaggcagcatggcagcatccttccagagggtgttgtgcagctgtggaaaacaattgctgggaggccggcaggggcagtggtggaggagaccagagcttaattctaggtgagtcacaatagcctcatctgtagaatgagtgaggggtggggcgtagtttcagattttttttttttttttgacacgtagtttcgctcctgttgcccaggctggagcgcaatggcgcaatctcggctcaccgcaacctccgcctcccgggttcaagcgactctcctgcctcagcctcctgagtagctgggattacagccatgtgccaccatgcccggctaattttgtatttttagtagagacggggtttctccatgttggtcaggctggtcttgaactcttgatccgcccgccttggcctcccaaagtgctgggattacaggcgtcagccaccgtgccccaccagtttctgactgattttcttttttttttttttttgagacggagtcccgctctgtcgcccgggcgaagtgcagtggcgcgatctcggctccctgcaagctccgcctcccgggttcacgccattcccgggcctgggaccacaggcgccgccaccacgcccggctagtatctttttttatttttattttcaatagagacggggtttcaccgtgttagccaggacggtctcgatctcccgacctcgtgatccgcccgcctcggcctcccaaagtgccgggatcacaggcgtgagccaccgcgccgggcccagcttctgattttatgcagctggcgggatcttgttcttggtcctttaaggcgaccggagggattgcagttttaaaaactcgccagcagaggtcgccttctgacggatttgaccaaaaaatccattccggtgggaaaggggaacctgcgcctgcgattctctctctctccccctctctccctctctctttctctccccccctctctctctctccctccctccctctctcctcctactcctccctccctccctctctctgtctctccctccctccctcccgctctctcccccctccccctctccccctccctccctcccttcctccctctctgtctctttctttgagacaaagtttcactctgtcacccaggctggagtgcagtggcacgatctccactcactgcaacctctgcctcccggggttcgtgattctcatgcctcagcctcccgagtagctgggattacaggcgcccgccaccacgcccggctaatttttgtatttttagtagagacggggttttgccatgttggccaggctggtctcaaactcctgacctcaagtgatctgcctgcctcggcctcccaaactaagattcatttgttgactaagtgaataaaaggggagacattgaagagggggacccgactggatttgggggtgaaggtggagttgagagtgactttgaggcttctgcttgagcaatgagtggagggtgcctctcctgagctggggaaactggggcagcactgacggaggggacacagctacagaggggagaaccctctcctgccggggctgcgggttacagcctgcactgcgattctctgatctcagggacctcagacttctggggccctgtcccctacctctgtgtatgaccctagctggctgagggctgaaggcttgctgttggctctttctgcaccctcagccttctccttcctcttccctctgcaggactctgtcctgggtccttaggaagagtccaggccccaggacagggaagttgggtcaggcctggacctcacattccctgcctgtcccatgaggtggacagtgagaggacaaatgcctggacccctggccccaaacccaagagcagatgtaccggagaagagcttcttagagcaccaggtgccagggctgcggtggagaatcaggggggcccaggggaaggggctgcagatgagggaggagatagatacggagggcctgtgtgcctcccagatacagggctggctttcccagcccagaaggttctttctgcctttcccagtcttcttccattctcatttcatgttcacacttttggccatacccagggtcagccatgaagattgttctcagaatgttttctttcttccttcctttctctttcttttctttctttcttcctttctttctttcctttctttttctttcttctctttctttttttcttttcttctttctctctctttctttctctctctctctctccttccttccttccttcttttctttctttcttctttctttttttgaaacagagtctcactatgtcacccaggctgtagtgcattggcacgatcactgctcactgcagccttgacctcctgggctcaagtgatcctcccgcctcagcctcctgagtagctgggaccacaggtatgcaccaccatgcccagctgattttttaattttttgtagagatgggggtctcactgtgttgctctggttggtcttaaactgctgggctcaagtgatcctcccgccttggccttccagagtgttgggattacaagcaggagcagcacacctggccaatgttttatttaaatcaactcacttaggttgaattagaataattttagacacacagaagagtgtgtctatataattttgaattatatacccaacactcagatataacattagcattttgccatatttgcttcatctatttctttctgaaatattttaatgtaaattacagatatcatgaattttcatccccaaatactttagtctgcatcagtcaaagatatctaatatttaatccacaatggatttccccagtggcaattcccctaaattgtgttttacagttgacagtggatttattgtaaaaggaaactcgatataccaagtgacaagcaagttatcttctgttataaatagaaaggatccctggaaatggacacagtgtcaggcccagagctgtgggtggagacctgctctctgtttgacataaataggagatcagtggctactaaatctgaagacagggcagcagcaaagaacattttctcacggatgtgatgagacttgaaagggactcagaaagggggtcactttctccaggttggggtaactgttatttaagccagggttcatctgcagcgtggggagccagagggtgaccccttccctaggtgatggaggtggctgaggctccagaagtttccagagaaagatctggtgttcctacaaggccagtggcagggggaagggcactagacagtggggctggagggtgtgggcctgtccctgctctgattttgggcactgcacttttgcctgtaagaaggggatatgtgaggccaggacagggtctcctactctgtccccactcccacgccaaacagggccttgaggactctcgcgacctccatgacccagcttccctcctaccccagccccaagcctgtttttgttcccctccctccctcctgcttgatctttgagcctcagccaggatgttacctcctcctagaagcctgccttggtccctggaatggattaagggactctctcctgggccccacagctgcccaggatcactcagcactgtagtgccctgttggcctttgcctccctccagctgtggacgtacaaagcagacagcgaatctgtcttgctcaccactgtacccccatcccctactgcagcacctggcacatagcagtagtgcggcacacttgttgaatgaataagggatcattactactacgcttcccactcataaatgtctgcctcttcggggggctcagaatgcacatttggtccttcattaactcatttactcacaattttttttttttttttttttttgagacggagtttcactcttgtcgcccaggctggagtgcaatggtgtgatctcggctcactgcaacctctgcctctcaggttcaagcgattctcctgcctcagcctcccgagtagctgggattacaggcgctagccaccatgcctggctaatttttgtatttttagtagagatggggtttcaccatgttggccaggctggtctcgaactcctgacctctcaggtgattcacccacctcagcctcccaaagtgctgggattacaggcatgagccaccgtgcctggctcatttactcacaaatatttactgagcacctactatgtcccaagcagtattctaggcactggaaatggggcaaggctgctgcctctgtggaacttatactggggtgtgggaggcaaagaaaaacaagcaaacatacatatgaaataatttaagatgccactcgtggtgggagggactgacaggagctgctgtggaagagagcattaggagggccttgctgaggggtgactttatttcagctgagaggtggatgagaaggcacctgcaggggaagaagaaccaggggaagggtgttcctgatggagcaacagcctgtgctaaggccccaaagtgagcaccagctgggcgctgagggacagaaccaggcacaggctcggttagaggaggtctgaggtcccagaggagacaagagaggggaaggatgggagggcaggcctgagccgcagaaggccagtggaaggttctgagtgggaagaggatgggataggagttatattctgaaaggtccgcctgtgctgggtggaggatgggtggggacaggcaggagcagcccaggctctgatgcagcctccaggcagagatggaccaggggagcccatttcatatccggcccctgtggagggtctgagggtgttgagcagacaggccctggctttggaagtcctgggtgtctggacccgcctgcctgtggggccccagcagagaggaagggaggcggggctcccagtgcctgttgactcatttgcatctgatttgcatgtgaagcagagagtcaggttgaaagctgggaaggcctgtgccagccctgggtagagggtcttgggtgttagttcccacaaagactctgtcccaggccatgaccttcctgttcaggaggggctctgccttcccttgcctccaacgcccctctggcctggccctgccatctggggctgggcagtgcccacggggacaaggtcgtttccttttaggagaggtctgcatgctatgaggacaaaggccaaatccccaccctcgggaacctccttccccagcaaaatcccatctgtcaggctcagcctctgaccttcgacctctctgtcagcacaggctgcagtgttggggaggggagggtccccacccccaaccctaggggagacccaaacctctccccccagccttctccatctgtccccttcggcttctgccacctgctccgtgtgatccaggccaggtcacctccgctttctgggccttggttcccccacgtgtccaatgtgggtttcccaaataccagtgacttgtgtcagtccacttttgtaattgtagccaactccacttactatttcttaagtgaacttactctccttcacttaaatagatttaatttaaaaagaaatgttataccagctctgtaaatggaaaaccagtttcatctgccacaagtagaaacataataggaaaaaataatgaaatggaaataaaacaatgttactctagtctagcctcaagtgaaaaaagtcagacacaaaaggttacatttatatgattgtctagaaaatgcaaaactagagagaaagaaaacagaccactggttgccagggttggggagagggagctgacaatatcaaggggtgcagaaactttttagggtgatccaaactgttttttgatgatgatggtggttacagattgtatacatttgccaaaaatcaccaaagtgtacattcaaagttggtgagttttattttatgtataaaccacctcaaaaagacaaattttagagaagaaaacaaagaaaaatgccggtttagccccaagtctgaggcttcctctctgttaaacaaattagcaaatagaaggccaggcatggtggctcatgcctgtaatcccagcactttgggaggctgaggcaggaggatcacttgaggtcaggagttcaagaccagccatggccaacatggtgaaatcctgtctctacaaaaaatacaaaaattagctgggcgtggtggcgcatgcttgtaattccagctactcaggaggctgaggcaggagaattgcttgaacctgggaggcggttgcagtgagccgagattgcaccaccgcactccaccctgagtaacagagcaagagactccatctcaaaaaacaaacaaacaaacaaggaagagaaagagggatttctctctctgtctctcaccaactctctaaccctccctagttccatgcaccaaggaaaagctatgtgaggacataggagaaggtggccagccacaggccaagaagagagccttcaccagggactgaatcagctggcacctccatctggtacctctaggctccagagctgtgagaaatagatgtgtgctgtttgagccacatagtctctgatattttgttttggcagccggagcagactcatgccctctgatctcatcattagcataatgcctgtttatagaaccatgctgtgggcaggctctgtgctaaaagctttgccagcatcatttcagagacttgatgtgacatcttacatcgtaggggaaattattgttcccattaaagatgggcccacagtgtggctaagccagtggggcatgtcctcagacctggagtgctcccataggaagctgggcccgattctttctgaaggtgtgagctggaggcagtgatggtggtttgagaggcacgggctgtggggaactggatactgagggcagtccctgtgtcccaggggaagcactctgtgctttcaaggggggcactggcagagaaggaagtgtccctcatcacatcctggagacccaccctctggagacagtgttttcacgatttcttttctttcttttttttttcagacagggtctcactctgtcacccaggctagagtgcagtggcacgatctcagctcactgcaacctctgccttctaggttcaagtaattctcctacctcagcctcctgagtagctgggattacaggcacccgccaccacgcccagctcatttttatttttttatttttcgtagagacagggtttcaccacgttggccaggctggtgtcaaactcctgacctcaaatgatctgcttgctttggcctcccaaagtgctgggattacaggcatgagccatcatgcctggccatgttttcactatttctatggaccgtttcataagtgttgtgtggacatagggctccagggttaaatgtgtttgggaaatgtggtgtaagcaaagagaaagaagtttccactctaatacttctcagagactttaatgtggagataggcatggcgaatctctcactgcgggacaagtgggcaagagaagtgtggatgctgccttctgggcactcacagttggtggaggagacagccaacatgcaagcaggggccacaccacatgtctggaggttggaacgctatgcagagagaccacaggaaccatgggggaagtggggagggatttcccagaggagatgacatttgaacaaagatgcaaaggaagtgtggaaggaggtaagggagagctgtatgactgtctgggggaagagaaacccaagcagagggaacagcaagcacaaaggttctgaggctcaaggttgcttggtgcatttgacaagcagaccagcgccattggctggagctagctgggccgagtgggagggtgataatggatgaggttgaccacggtccgctcccaaaggccatggaattcagagcatactggagagcccttagtgggtttggacagacagtgataccttgggacacacagcctcatgagctcatactgaccaaacaaaccacccaaaatagcagcagaaacaacagccacagggtgcagagggtcattcagggtgcctctcacaagcctgggaagtaggcatgtgatatggtttggctgtgtccccacccaaatctcatcttgttttgtaactgcttcaattcccatgtgtcgtgggaggaacccggtagggggtgattgaactgtgggggcaggtctttcctgcgctgttcttgtgatagtgaaaatgggtctcacgagatctgatggttataaaaatcggagtttccctgcacaggctctcttttttgcctgccgccatccacgtaagatgtgacttactcctccttgccttcggtcatgattgtgaggcctccacagccttgtggaagtccattaaacttctttcatttgtaaattgcccagtctcgggtatgtttttatcaacagcgtgaaaacgaactaatacagcacggttaactcccattttacaggcgaggaagctgaagcttagaaagatgaaagaatttgcttgtgaccccgaacgttccctctggctgatgcattgttcctacctgctctgtttccttgtttatgaagcttgcaggctccatggtcctcaaccctggctgctacacactggaataacctggggtggcagactgtgtctccccaggatggccacaccaatacatctcacatcccacatgcttggccaatagcatatgacagatgtgactgtgggttacttctaaagctaggccataatagccatcgcaaccccaccgtgatctctgggattgctagttctgagggaagccagctgccatgtcctgaggttactcaagaagccctgtggagtaggccatttggggagggactgaggcccccaggcaacatctgtcccaacttgccagtcatgttagtgaactacccttgtccagccttcagatgacacctcatgagaggccctgagagagtcttattgtcccgttcaccattcctgttgccctgtggccagctaatcagcttgtggtggttttcatttcttttttctttttgccattaatagcaatgccaggctgggctcagtggctcatgcctgtaatcccagcactttgggaggccgaggtgggtggatcacctgaggtcagaagtttgagacaagcctggctaacatggtgaaaccctgtctctattaaaaatacaaaaattagccaggtgtgatggtgtgcgcctgtaatcctagctacttctcccaagtagaagggcgtgattcttctcatgcctcatgctgaggcatgagaatcacttgaacccgggaggctgaggctgcagtgagcggtgtttgtgccactgcacttcagcctgggcgacagagtgagactatctcaaaaaaaaaaaaaaaagtagcaatgccatagtaagtattcttctaattaagcccttctgaatcagcttaattatttgcttagggtcaatttctaaatgcacagttgctggatcagagtacaagtccactgatacagcatttaattttttcaaagaattgtgactgggccgggcacggtggctcatgcctataatcccagcactttgggaggccaaggcgggcggatcacctgaggttgggagttggagaccagtctgaccaacatggagaaaccccgtctctactaaaaatacaaaattagctgggcatggtggtgcatgcgtgtaatcccagctacacgggaggctgaggcaggagaattgcttgaacccgggaggcagaggttgcggtgagctgagagggtgccagcttgggcaacaagagtgaaactccgtctcaaaaagaaaaaaaaaaaaaaaagaatgtgactatagctggccgtggtggctcatgcctgtaatcccagcactgtgggaggcaagatggtcagattgcttgagtcaaggagtttcagaccagcctgggaaacatggcaaaaccctgtctctacagaaaaattagctgcgcatgggggcagacacctgtagtcccagctacgtgggaggctgaggtgggagcatcacctgagcctgggaagtcgaggctgtagtgagctgtgtttgcaccaccgcactccagcctgggcaacagagtgaggccttgtctcaaaaaaatttaaaaaataaataaatgtaactatattctccttcagtagcaacatctcaatttaccttctcatgcacagtgtttggaaggacatattttgggatgagttttcttttacttcactaccttattttgttctttcatagaatgcctttaaaatgttactttaaaaaaatagataatacctttacaaggtacaaaatccaaaaggtataaaaatgttttctttttttttttggagacagagtttcgctcttgtcgcccaggctggagtgcaatggtgcgatcttggctcgctgaaacctccgcctcccgggtttaggtgattctcctgcctcagcctcctgagtagctggaattacaggtgcccaccaccatgccctgctaatttttgtattattagtagagatggggtttcaccatgttggccaggctggttttgacctcctgacttcaggtgatccacccaccttggcctcccaaagtactgggatcacaggcataagccaccacgcccggccaaaaatattttataaaagtctttcccccacccctttcccctcagtcagcacaagtagccaccactgggaccagtttctggtggataaatccagaaaagttcaggtgcaagtaaacacacatagagagaacaccctttaaattaaatgaaactaaagaaaacagagccataggtgcacaggagacagagagctgacatctggggctgattgcatcttggtttcgagctgagtggcaaaaatactgctaaggtcaacgttctgaaggaggcaaaacccacacgcagaaccagccataggcctgtcaacaaggcgagatgttatcattgctcatgtgctgggtcaggataaggccatacagaccgcccagttctctctgatctgggtgtagttaatgacagtttatccgcctttttcttctctctcaccactccccatggtgggggaggagaaggactgggaggacttgaatactctgaattggcaccaggtgcttaatatagtcctgaaaatagaagaccaatatgctgttggcacataaagatgcccacaattctagaatctgagtgcgcccagatgatctctctttacatggcctaatttgggatcctgacaagttccttctgccctctgcctcactttctcaatctaggaatgggcctctcggtttttgttttgtctaattttaagctctcggctgtgcatggcagaggcaaacttgaagacgcaagggtcagtgagcagggcctttatccaggtatctcaaatatctcccaaccctgattaaagttacatatctcagagaagaatttggtcaacaccattgttgtcattcctggttaataacagggaagttgaggtctgggaagcaccctagtgatgtgttcacatggccatgtgcttctgtaaaatttaccaatgtaaggcatcttaacctcattctgttaaaaccactatctcctttcattccaacttccctttgcatcagatgatgttggggttggtgtgagcagtttgggcatcttgctaaaaggaccttaacatttactttgggtttagtgggatatatttatattgtttccagtcacttttgtgaaaaattattactaactgacctggtattgaaatggcttccaggaatatatccataccgagcatactgagctgactcaacttgtcgtggcatcaagattcaggatcagaggttatatctcaagatatatgaatggtcctacagcactcagttccacaagactgtgaaggagaggtttgaatgtatacacggagccagcagctagtttatggaaagtattacagatgtgtttgagacaggcagctaataaaaagaatgttatttttctgcgttttgtaacgtttgtgcaatttctcttttttttttttttttttttggagacaaggtcttgctctgtcatctaggctggaatgcagtggtgaaatcatggcttactgcagcctcaacctcctggtctcaagcaatcctccctctcagcctcctgagtagctgggactataggcacgtgccaccatgcctgactaatttcttttttccttttttttttttttttttgagacggagtctcactgtcgtccagcttggagtgcagtggcacaatcttgactcactgcaacctctgcctcccagattcaagtgattctcctggctgagcctcccaagtagctgggattacaggtgcccactaccacgtccagctaattttttgtatttttagtagagatgaggttctgccatgttgtctagattggtctcaaactcctgagctcaggtgatccaccagcctcggcctcccaaagtgctaggattacaggtatgagccaccatgcctggccagctaatttctttttaaaatttttttgtagagctggggatctcgctttgttgcccaggctggtctgaagcccctgggctcaggcactccttccacctcgacctcccaaagtggtgggattacaggcatgagccaccttattgtggtttcttgtctctttctaaccaaatcttcactttattacttaatttcatatctgtaattttttcttaaagaggtctccctagggctggacgtggtggctcacgcctgtaatcccagcactttgggaggccgaggtgggtggatcgcctgaggtcaggagttcaagaccagcctgaccaacatactgaaaccctgtctctactaaaaatacaaaaaattagcgggtatggtggcgggcacctgtaatcccagctactcaggaggctaagacaggaaaatcacttgaacttgggaggcagaggttgcagggagctgagatcgtgccattgcattccagcctgggcgataagagtgaaactctgtctcaaaaaaaaaaaaaaaaaaaaaaaaagaagtctccctaggctgaagctacctgctcaatcttctcttgtgtcttataggatcacaggatcccccttgccttacctcactgttactcccaaacagttctcacatgtttacaagggaatgtaacagagtggatcagagaattcattctggatccagaccgaccttagttttctcatctatataatgggaataatagcaggatctctcgccttagatagtcatgaagtccaatgagatgatgtgtataaagccctaacacaatgtagcagagggcacagggccaggattgatatttagctggtcctcacggatacagcagactccctgtttatgacagtggttggctctgatttggttggtgtccatgccagagtgtacaatcattattagctattgatatattattagctccctcccctgcccacccaggggtttacgcagtaagttctcaattattggcaatccaaacaaagaataaaagacaccagctggaatgaaacagagaagctggttccaaattgagcaattcagactgactgctataaaatttcctcaccttaaaggcccttagagttaattcattctaatccccctaaaaatatacttttttgacatgttcaagtattggaaatttggaaaattcacaaaaacacaaagaagaaattaactgctgtgattatagatgattatacacatatacatatgtatttaatacatatttatgctgtacatagtgttttgaagcatactgtacttcaaaaaaatttgggaggggtgcattggcttatgcctgtaatcctagaaattcaggaggccaaagcaggaggatcacttgaggccaggagttctagactggcctggggcaacatagcgagacccgtagcttgacatggtgatgcgggcctgtagtcttagttactctggaggctgaggtgtgaggattgcttcaacctaggttacagtgagctatgattgcaccactgcactccaccctgggcaacagagctagaccctgtctctaaaaaacataaataaaccaatgtttaatacttagcatttccccctatctttaaatatcttctagctacttcacttttatttttatctttttgagatgatctcttgcccaggttggggtgcagtggcatgatctcagcttactgcatcccccacatcccaggttcaatctattctcctgcctcagcctcctgagtagctgggattacaggcatgtggcaccacgcctggctaatttttgtatttttagtagagacgaggtttcaccacgttggccaggctggtcttgaactcctgacttcaggtgatctggtcgcctcagcctcccaaagtgctgggattacaggtgtgagccactgctcctggtagctacttcacttttaatggctgcataatattcctcatcagaaagtgggaaaaattaggctaggtggcgtggctcatgcctgtaatcctagtactttgggaggctgagttggtagaattgctagagctcaggagtttaagatcagtctgggcaacatggcaaaaccccatccctacaaaaaatacagaaaataccgggtgtggtggtgcacacctgtagtcccagctacttgggaggctgaggtgggaagattgcttgaccccaggagattgaggctgctgtgagctgagatcctgccactgcactccagcctgggcgacagagtgagactccatctcaaaaaaaaaaaaaaaaaaagaaaagaaaaagataaagaaataaataaagtgttaataattaaaagtacttttagagggttatgtcataagccttgacaagacttgttctgtaaagctacccggcatgcaaaaagctcaattaagttagctcctccacaggatggaattatataaccaatccctttcaagaggcattgaagttgtttccattattttgctatgatgaataaggctgagcaatattaatctttgctcatatctttggtcatttcctttgtaaatttcgggactgctgggtatgcacattttaaaattaactcactcatcatcatgcagttaggagaacagagaaaggaaggggcttgcaccgggtcacatagggagttagcgtcaaagtcaggactaggaaccagccagggccctctaactggagctcttccagctggggtcctagaggaagtcccagctggccgcgggagggaggaggaggaagggaaagaaccaggcgccggggctgaagcggcggcaggaagaaggtggggccggctgggaggagcgggcggagctgctgagcagcgcctctccttcgggcgggggaagctaagcggtcgcctggcaaccctggcggcgcgccgttcgaacggaagcgaggaaccaatcaggaagtccggggcgaaccattctggtgtgaaggggggcggcgtgctcacttccccttccacggcgccccagggactttccctgcggtgggggccttcgacagtgagggccacccgctcagctcgaccgcggagggcagctccaaaggggaccccaaaggtgcccacgcggggctggggcctcctgggcgtcgttgggagcggccactaccggcccgggtccgagctgtcagcctctccaaagcctgcgcgagaggagccgggacacgcctagcgcgggctccaggtgagggcgcgggtgggtccgggtgcgaccccgggtctgggggccccgttccccgagcgtctgctgtctgctttctccccgcgtcgtacctgcgtgtcatttcacagatgaggactctgaggctcagagaggcaagtgtcccggcccggcgagctctggcggagaatccagttcaagtctttctgccccacctcgcagccccctagtctagtcacatctggacttgccttgagaggcccagacgggcaactggtagtcattttcccagcgttttatcggcagggacctgtagacccctggctggatcacatatccccgcgccccacactgtcctcgggataccccctttgggcgtctgtctttccttctccgcagtccggggttggactcggctcatttggcgcctttctgtctacggggacagaggaccactctttggggatcggacgggactgacatttctgggctggatgcaggggcagcagattctccagcccccagagccgctgctggcctcttgggaatcatccccagtttggggaagggaatagagccagtccctaaaccaaagccactagtcaccagagactttggaattgggagtggggccggaatccccccaggtggagcagctgacctaggccagaccctgctgtgtctcctggggacaccccctgccccctaggttgctattgtcagtctccttttgtaggtggggaaacggaggttctaagaagttaagccccttttcgaagtcacagtcagacaatgcagtggttagctcctagtccctctggcttcaatcttagaatccttgacacacagaatcatgcattttgagagtcttcaatctcttcataagggagttacatatcctctctcctctggagcctgcccctggctttgggggacaggatctccgaggactcagaaagaaaacaaggctttcttttattctttcaacaaatattatttattgacttcataagccctgctctggttcttgcatgttttggtttttttacttattagcaaatgtatcatcttctcccactgtgatgcaaggcaggggctgaggcaattgagccagtgcaaaatttagggatgcccaaaacctcagtaatcaagactgaaactaacgttcatggaccatttgtgtgttctgcaggcaggaggttaactcacacagccttcatgaagtgcagtcctcccatctctctctctctctctctctctctctctctctctctatatatatatatacacacacacatatatacacacacacatatatgtatatatatgtatgtgtgtatatatgtatatatgtgtatatatatgcatatttataaatcatgaaaccactgccctgtccctgagttgctctgtgacattgagtaagtttcttcagtctctgggctgagctaagaagtcatgatggtgcactcaggcctgggcagagggcagtctaggataggaagtgggcttggctgtggatctgcctccccctcccctttctaatcctgcgtgccaggcccttccccaagaccttgcatgtgttatcttccattctgtcctcactgcaaaatccttcatccccattttgcaacctcaagtgcagacctaggcctagaagatcaacttggtatcagtgggcctagatgtccacatccacacccattccacagcctactcccttctcccttcctaatgttagtgcaaggccaccctgagcaaggctgactcctgggcaggccagggcaccagcgtctgggaggcctccagaaatagctcagggcctggtgtggctctggaggtggcccagctgggtgtccctgacctggacagctgggctgaaattgagctggggctgccctgctggctggccccttgccactgcctggagccttcccaatctcctctggggcaggcaagggcctccccaaatctaggccaggcttctgctgaagggaaagaaagaagcaggtgggaggaagggggcgggttgggtgtagaatgtcatgaaaattataacctttggaaaccacacctcccaccccctcaccaaagaataaaaatcactaacacctcttgagcatttactatgttctaagtactttacaagtatgaactcatttaattccctcaactctgtgatataaggtaattactgctgttcttatttccatcttgcagaggggaaactgagcacaagagaggtttaataatttgcataagataacctagaggtggagtttgaacccagagagtctggctctaaattttacattttttgggggggggggtggggtggggcagtgaatgaattaaaatgtatataaaataaaatttaccattgtaaccacttttaagtatacagttcagtggcattaagtacattccccattgcctctccccccagtgcctggcaatcaccattctactttctgtttgagtgaatttgactactttgggtacctctaggtattataaatggaatcataacagtatttgtcttgttgtgtctggcttatttcacttagcataatgcctttaagtttcacccatgttgttgtatgtgttagaattttcttttttatggcggaataatctattctaatattctatgtatatgccacattctgtttatccattcattccttgatggacacttggattgcttttggctgttgtgactaatgctgctttgagcatgaatgtacaaatatctgtttgagttcctgtttttaattgttttgggtatacactcagaagtggaattgctgggtgatcctatggcaattctgtttaattttttgaggaactactttactgtgtttcacagtgactgcaccattttatgtgtccatcagcagtgcacaaagtgctaatttctcaacatcttcaccaacacttgttattttctgtttgtattttttttttggtaatggccatcttcaggggtgtgatgtggtgtctcattgtggttttaatttacatttccctaatgactaatggtgttgagcatcttttcctgtgcctgttggccatttgttatctttggagaaatgtctgttcaagtgactctgcattgttttttttttttttttttttttttgagacaagagtttcgctctgtcgcccaggctggagtgcagtggcgccatctcggctcactgcaacctctgtgtcccgggttcaaatgattctcctgcttcagcctcctgagtagctgggattataggcccccgccaccatgctgggctaatttttatatttttagtagagacggggtttcatcatcttggccagtctggtcttgaactcctgaccttgtgaaccacctgcctcagcctccaaagtgctgggattacaggcttgagccactgcacccagtcatgactctgcattcttaaccattacctgtgcttctcttagatttgtaacctctgagaatagtggatcagctttctgggctgatgaagccctccctcaggagctgggcactggatgatctatttggttgaatagttatcatagcctgcactttggtgacatttgtcatgcatggacctcatgcagagagggaggcactgttgtgagtcctgttttgcagttagggaaactgagatatggagaagttgagtattttatccaaggtctcatagctaatcattggtggagctaggatttgaatgggttctggagtccatgctataccttacagatatggccagggggatggagtagtgaagaccactgcaggcagcagaaccagtgtgtgcagaggtttgtatatggtggctttggagaaagaacaggacttgggtagaagtggtcagagcccagcttgaatgggggtgacttgaagttggaggaagagtaggacaggtctggaaaggccaggagcacggtgagggtttggggaggaggcttggtgcttagggaccctgtccttttttttttttctcttctcacaagatatttattaattacaaagggaaaataataactgtacagtggagaaatttggcagatactgccttaaccaaggaattggctgatcactaagattaagacaaactgttgttatgagtgggtgtggtaatgtacctatagtcccagccactcaggaggctgaggtggcaggattgcttcagcccatctatttgaggctgcagtgagctatggagtgcactccaacctgggcaacacagtgagacctcatttctaaaaaaagaaaaaagaagccttctgataccatgtactaagaaggacacaacatcacttttgtgttattcttgacagatatgtttaactttctctcctttctttcttcctctctttctttcttctctctttcttactgatataagaaaaagctttatacatttaatatatacctcttgatgagtggccttggcctttgaggtgggctgggtccagaacagccggttgttcaacggtatttcctcgtgtttggtccctgaaggaagaaaattggaagggtgtgatggagctcatggtccagtgggagagacaggaaacgagttatatttcctatcctagataagagtatctaaaatgacaggatgtaatgagtgctcggaagggaataaaatgggtgaaattgctgagggggtctcttggaggagatgacatttgaaatgagatctgaagggggtgagggaagaggttccagacagagaacagctggtgcaaaagccctgaggcaggaaagaccttatgttcaggaacagcagggagggctttgtggccagagcaggaaagaggttggagataagatgggagatttggacaaggactgagtcctggaaggcctgagggccaagtggggagcttggattttttttttttttttttttgagacagagtcttgctctgttgtccaggctggagtgcagtggctcaatctcagctcactgcagggagcttggattttattgtaagggagccacaggagggtttaaacacagcagtaatgagactttatttctgctgggaaaacattgccgttattgcccccattttacagcagaggaaaccgagactcagaaccatgaccagggagtgcttcctaaggtggtttctccctctggggtccagccgacgaggcagtagattccttgggacttccttggggggcacatctggtgagtggccaaagcccaacactgaaaacaccgtctcttccacctcccctccccagatgtgagcctgggttccaatcctggctctaccattaatcagctgtgtaattttgggcacgtggccttacctcttggagcctcagttttctcatctgaaaatgggcataataatagtagccctcacagggtaggtgtgaggattaaattagttaacattttgtagagcttagaacagtgtctggtacaaagaaagtgctcagatgagatttgttcttttcttttttggctgtaagtttattcaatgtgaaataatcctctccaattttattgaggtggctgaccacgtccacgaccacatctgcctctaaactggaattcggttgctgacccagccccagcctcggctttcttgtcagcaccagggggcacagaacaccgtctgtaggtatctctgtcagcttcccgtcttgtgagtcttgcaggtcgcttaccctccagacctttaggccgaggcctgccagtctctggacggctgcggtgtagggtggcaggaacaatctccgggggcagatgtagggtggcaggaacaatctctgggggcagatgaaggtaatcacggagatactggctaccctcattggtaaggtaccagtagaaatgtctccaggcaaactgttccttcacgcagccccgggacttgagagactgcatggccttcatgacgtgaaggttgggcacattcttgtctgccagctccgggtgcttaggcatgtggacatccttcttggccaccatgactccctccttaaaaaggagttcatgaatggcaatccggttcttcttaggcatcagcatcttggcagctgtagggtccggggctggggctggaaaggaaggactgttcttttctttgctattacgaaaatcattattgttgctttgctgttactactattagcgcctgaaggagccttccctccccatcccccatttctgcctccgtggagggctaggcagggctcagcaggccatttggaggatgaaggacttgttgccccgtcccctgtaaagtcagggactggaggaggctgcagtgctgagggggaaggaaagctgatgtgcatcactgccggtctcctcatgccctgtaccctagtcctggcccagctcccacaggcacagacatggaacaggagcctcttcagcctgagtgtggcagagggctggggctgaggcctgggggacagctccttctctgggcctcaggattcccatgaaaaaatggcctatcaaatgttcctacctgcagtgagttataggacttggggtggaagaggtgacagtcacctccctctgggaattccttcctgcagggctgcagtctcatgggattaaatgagggggctctggggatttaaatgagtatggtgcctggcaccccaaaattctagttattgttgttactatgacggctgttgttgccgatgttaaccgttttcacaaggcagctgaggcatgctcaggctcagcctgttccagagggatggactctacacgtgacagcatggagcaccaggagggtcccgcagcctggtcagggacacacagctagaaagtggtggcgttaagccttggtctggagggaaagtgcgcaggctggactccccagagtgattttgggctagtgactcagcctctctcagcctcagtttaccattagtcaaatggggtaacaatagaactcaccagatagtgattgttgggaagattaaaatgggttacccgataccaagaaaaacactttcccgtgcctggcacagtgaacatcacctggcggtcgttctgagtgtcagggagcggggctcagtttgtccatctctaaggtgggtgcgcttgcctgccagagccacggggaccccgcgcgccaggtgtgcggtgggcgggtctcggctcccggaagaacttccctgggtggtcctggagcgggtcggacccagttcctgagccaggccagctgccggcggccggggctcgggttctggcccctgcctggctttccttacccttttcgggtagtacctggaccagcgggttcacttgcccgcggccgccggaagttgcgcaaactcagcttgccggagccccaggtgggccgggccggaggagcgcaggccagcggcgcgggcgcagccgggtacgtgcggaccgcggcggggggcgcccagccggggtagggggcggcccgagcacccctccaccccaggacggcgggaacggggcagggatctacctttcggcttcaagaggaccgcggggatggtgccgctctctccctcatttgagagccaggaggggcggcgaggggcaagggtcacacagcgccctgctagccgaccccccatcccccgccaccgggagtcctcaagcttttccggaattgagggagagcaaaagccagcctggggatctgagttccccccagccctgccccgcggcctctggaggctgacgctggggagctagtggggagggggccaggtggggatgcgcgcccccgggatgcaagccagaagggccggcggttgggggcatccgtgggaggcatttgaatccgtgggtggggcattgggcggtgagaggaggcctcagaggggacattgagtcgcgcttggggacttgggaccctggcttcacctggcgggagccgctgcacctccgtttgcccacccgtgacgtggggctgttgaggtcagctcaccgatcagcctctgtcttgggcctgctttgtccgcggtgtgggctgggacagaccctcgtggggcttgcttagagacccctgcgtgggggtggtctgtggacttggttagtcgaaatcttcttgaagaccaggagcctggttcgtggctccgcctttttgccagatgccgaggaaagccctcgacctgtttgatctctccatccttatcgtgacctggaggctcaggaaggtctatttttaacctcgtttcacggataaggtaaccgagtctgtaaagaggcgaagctgcttgcgcaaggcgcacagcgggcgggtgggcgagccgaaggccggcgggcccgcggcgccaaacccggggttggctctcgcatctgtcccggccccgccagaggggacctcagggccagcagatggggccagaggggctgggggcccgatcggggtcgtgcacggggtttctgccccggccccgcccgtctgacctccttctccctctttatccggatggtgcccgcaagggaactgccactgcggacgggttggactggtttgggaggtggcggcctgggggtggggcagagtttggctggctctgctgtgctcctttcctgtcaggtccttcccacctgaggtctcctgggggtcggccctggtggagcgaggcttcctttcccatccactccatctctcctgccttgggagcagcacccaaggatctattcccaactcatggctgctgcagaggtctccagctggtggttgggggccagatggaggaggaggggacagatatgttcgcagacatattttgtttgctgtatatgcaatgttttaatcattattatcgaatatgctgacagttaagaatctagagtttttatgtactcctggatttccagcttcctggaacaatacacctaccaccttggacccatatgcctgcagcaggcagggtacctagatgtctagttcatccctgatcacccagttcacatctggctcccataaatatttcagttcaataaatttttattgaatattctgccctagtatgtgtctagggcagtatcttgaaactggggtatagtgaacaaaatagccaacccccgcccctacacacacacgcctgccctcatggagctgatattttagggggatagagacaacaaagagtaaaacaaccatacacaaatagagtacttgtgcaggggataaggagaaaaggaatagtgccgggagggggtcaggagtgccggggagaaacaggacgtggtattgagatcagtgccttatttatctattctgggacctgggaaagccacttctctgagtctcagtttctccatctgcacaacgacccacaggcttgtgggaggttatagggaggatggcacccagcagagatccctgcctccccaccccaatccagactcactcccttctggatttttggatgtctaggtggggctgtccaatgtagcttcctaccatggatggaaatgctgtactctgtgctgccaaacacagtggcaactggccacatgtggctattgagaacttgaaatgccactagtgtagctcaggaactgaattttatgtttttatttcatttaaatttaaagttaaggttgaatagccacatgtggctgctggctattgagctggacagcacgggtctagatggcttgaactgtaagccttcttggggaacacccagattaagtacccgccccctccattttacagatgagaatgtttgggacttggtatgtgggttttcttctgtcccatctccaaggggccttgtggggtgactctgtgggcttggcccttccttggaaacagggtcagggttggcttgatgtctggggcatcaggtcctgacacttgggtgaccacgtagacacttgtgcatccaggtgtatgccctcctcccaggtgagtacccattccatggctgcaggcagatcgagggtctgccggatgcctccatgcagggctgtgtgattttggacatttccagcttctctcagcacagcatagctcagggctgatgtttccacgtgacaggcatttgtggatcaccgtgggccatccagttccatgcaggaagctgacggatgtctggactccactggggcgcgggtggagattttctttgctccttccctataagctctgccctttgcctggggcctggcatgtctaggcgggtggatggcacagggcagcttcctgcctggatgggtgaggggtagaggtggtaccaggctccctgtggggagtccaggtggggtgtggggctggagccctttttcttggtcatttaaccctacgccccggtgccagcaccttcctttttggtggtcaggggcagagccacctactcgctgggttaacttaagcaagttgtttgcctctctgggcttcagtttctccatccaaaaaacggggctgttgagaggacctgaggttgagttgactggtgcgtagcacagagcctggagcctcccttgctccctttagcgcgtgccttgccctgtcttttctgctcaggttgcccaggtcgcccaggtcttttttctctagcaccttttttcctctcttggtctcagctgggcctggttctcccggggcaggagggagggggtgtgggtggggcctgaggccccgcagctgctgccttgtgcctgctgattggctccttgtggaggggcgtggtctctaccttataatagggagggcgtcttatcctctcagccgcggctgagcctctttgtctgagcgcgctcggcttttttttttttttctctctccttccctgcagcagtggccggtgtccagctgcctactttctgcccggatctctggctcctcatctctccggtctccgcagactaaagccctcgggatatgcagcagccatgcctgtgcacacgctgagccccggagccccgtccgcccccgccctaccttgccgcctgcggaccagggtccctggctacctgctacgggggccggcagatggtggagcccggaaaccgagcgctgtggagcgcctggaggccgacaaggccaagtacgtcaagagcctgcacgtggccaacacccgccaggagcctgtgcagcccctgctgtccaaacagccgctctttagccctgagactcgccgcacagtgctcacgcccagccgccgagccctgcctggcccctgccgacggccccagctggacctggacatcctcagcagcctcatcgacttgtgtgacagccccgtgtcccctgccgaggccagccgcactcctggacgggccgagggagccggccgtcctcccccagccacccctccgcgaccgccgcccagtacctctgcggtccgccgggtggacgtccgccccctgcccgcctcgcctgcccggccctgcccatcacccggccctgccgccgcctccagcccagcccggccgccgggtttgcaacgctccaagtcggacttgagcgagcgcttttctagggcagccgctgatctcgagcgcttttttaacttctgcggcctggacccggaggaggcgagagggttgggtgtggcccacctggcacgggccagctcggatatcgtgtccctggcagggcccagtgctgggccgggcagctctgaagggggctgctcccgccgcagctcggtgactgttgaggagcgggcccgggagcgcgttccctatggcgtgtcggtggtggagcgcaatgcccgcgtgatcaagtggttgtatgggctaaggcaggctcgggagagcccagcagctgaaggctaggcgccactgggcctggaattcgccacaggacggatcttacagaggcaagtggtccctggacctctcttgcatccattctctagacggccgtgtcagaggctccaccctgttgtgaacttggtatggaggcaaaggcttagaggctggaccagcattgttgggcaaggactgactctccaagggttttgttcttggctttggacacctgagaaccccctcctcccctcccccaatacaaggtttttgacatgagtgtactcctgcttagttcctcttgtggggctgcatttgcggtgctttgccctccccactgtgagtgaggggccaagggatctcctcaatcctgtctccccagcggctctgtttcctccttccttccttggcctctgtcctttgctgacttcctcttccttacccagcagaactcaccctggggtcggggcagtggggaggggcctatccactgctcttcctagtccttggcagctggcctaggtgggcagactataggagggactggttaggagtctgcattgctttgacttccctctccttggttaataaacacaaatgcttgtttctcaagggctgggccttcagactcttctgtgttcacaagagaaagggtgagagaagtcttggggtggggccatcaaaacagtaattgttcaccccgaggtctagtggtggggcatgatgatagcggctggcctggctggagacatgtccccgtggtgggttctcataactctcctggaaggctagcaggcctgcctcatcgaggaggaaactgagatccagccatgagtgagctggaatagagctgggagtaggaatggggtctttcccctgcaccagaaagggagcctgcaggggaaaggccgatggggtgcatagactctccccaaccaggagtgttccatccaagccctgcccagttcccaagggggcaggaagctcggagagggcaaatcctgaacttgaggtcacacagaccatagagtgaggatgagaagtgggagttttggaggaagagagacttggggtggacggcacaaaatgagtggcctccctggcgatcttggacaagccagtttccctctgggcctcagtgggagagttaggcagcacagtcctccttgggttggggcactggtgcattctgggcccttcatgctatattccaatacctggggagaggggaaggaaggggctggcactgggcttcgaggcctcagcttcttccagtctccctccaggtcagttacctactaggacaccccaccttggctagtggagcagctagggctagagctgggcctacaaagggcgaaagcgggggtggcctctctggtgccccacggtgggcgtggagagggggtgggtggcgcttcctttcacaggctgccttggctgcagcactcagaaacaggaagctctaatgggggccctggtgacaggtttgatgtaggttttattttaagcataaagaggagatttccgttggactgttgacaaacatccacatcagcccagctgtccatctctctgtctgtctgcctgtctacaactagcccccaggggcctgggatgggcctgggcagtttggggaaggaagggaaaattgggttctagaagaagatggtgttccagctcatgagactggagctcatgatactggtggggagacaagcatgaggagggtggtgacctacccacaaccccccatggtgcccagcagttttgacaatgcaggagctgggcctccagggtccccatgctgaaggagtgatggtgtcaggagagagaatccaggcaggatctgcagacgtggtgccctttgaggtgtcaaagactagatttcctaggcaaccctgctagaattcagggctagtcattgccccttgctgtgacctggcagcctccgagtaacccaagaaggtggatgggctggctgcattttacatgtgaagaaattgaggttcaggtcacaggactggtgggtgacaccttgtttctgaaggagggtacagtgcttgaatcctcaaggtagccttttgaggaccagatatattgtcagagcaggaggttgagctcagggaaggatagcgacttgtatactgtcacatagcaggtctgcaggacagcctggggtcacactcttgcctgccagacacatcgcagtctggattcctggttctcccagcatgtaccccaccactcttcctcatcttggcagccttttcttctggtcactttattactgagcatctactgggtgcccagcagtggataagacagacatggcccctgtcctagtctggagaagagaatgggcaactaaacattcagcacataaataatcatagaatgtaaagcaggtatacttagggacttctgccctaaaaccagagctgttcccaggagctggaccaggggatagctgaaaagagaacgcctttccataaatccactgggagggtctgttggggagagagcagggagggattcttggaagtggggaaggtgccagattgagtcttctccaatggttatggcttggtcttgggagggctccccctgttccaggattctggagcctcccgccttccctgcaggcctctgtggagggagcagggcggggggcttttgcactcctccctcccccaaccctgcagccttggggatctgtggaaacagcccctctattgttctgcctccagttggagtgtgagccctcggagggcctgcagctgctgccctgtctcctggggctgcccagccctccgaagcagctcccccaggccagcctggccccagctgcctagcccctaattaggcagagatgggatctgctctctgatccatttcccaccagctaattatatacacgtggatttgggaaccaggcaacctggctgctcacttctatcatgaaggtggatgggccctgggaaaggcagccccccccccacagacctcagtttacccttttggcagaggatggagtgtagctgcagaggcctgttccctgtccttggttaaatagttctgttcctgctactgaaacatttaaggagaccccccacccccatcttacctgatatcctgtgtacaggggaccaggaaagggttgaggaatttggctataggtccttgactctaggaccccagggtagggtcataggatatagatgagagcatggctgcagctggctgccaattagatgtgcatataggagggcttacagttgtgctggtccatctgggtggcctgaacacccggccgggtgcggtggctcacgtctgtaatcccagcactttgggaggccaaggcaggcggatcacttgaaaccaggagtttgagaccagcctggacaacgtggtgaaatcccgtctctactaaaaatacaaaaattagctaggcatagtggcggacacctataatcccagctacttgggaggctgaggcatgagattcgcttgaaccctggaggtggaggttgcagtgagccaatatcatagcactgccctccagcctgggtgacaaagaaagactccctctcaaaaaaaaaaaaaaaggagtgaacaccccatccaggtttttaaaaaggtaatattggttgatgggtacagcaaaccaccgtggcacatacatatctatgtaacaaacctgcacattctgcacatgtatctcagaacttaaagtagaataaaaataaaataaaaggtaatattatttttcagataattcactcatatatttcttccaacattttattaagaaaaatttcaaacatagagttgaaagaattagacagtgaacattcatatacccacctactaatgcacacttgttaatatttcactatatttgctctatcaggaatctacccatctctccatccattaatacaacttatttttttaatacaacttattttttaataaagcttttcaaattaagttgcatatatcagtacacttcccttaaagtcactttagtgtgcatgccattagctagaattcaatatttgtttgtcttgttcctctctaggtaacatttacatggaatgaaatgcacagatcttaaaggtgccatttgctgaatttagacaaatgcatactgtaccccaaacccctatcagggtatcaagcattatcacctcagaaagtttccttgcatcgctctcctgccgattgctgcctgcccaccatggacatatttttatatccatatatatcagtactaacaagcagcatcccttgtcctttcctctacatcagcctcgctccccaaaagcaaccacttacaacttcttaaactatttcttctggtactttcctccatatttttaaataacttgcttttcctgctgttttcttgatcaattttaggcatacacacacacacacacacacacacacacacacacacacacatatatatttattttttttttgagacagaatcttgctctgttgccccggctggagtgcagtggtgtgatcttggctcactgtaacccctgcctcccaggttcaagcgattctcctgcctcagccacctaagtagctgggactacaggtgtgtgccaccacgcctggctaatttttgtattttttgtagagatggggtttcaccatgttgaccaggctggtcttgaattcctgacctcaagtgatccacccaccttggcttcccacagtgctgggattacaggcgtgagccagtgtgtctgaccaattttaggcacatattgactgactttctggtctgatgttttcatagtgtggcctccactgcctggctgcctggctttggatcccagcccttcctctttctggctgtatgaccttgggcagtaacttaacctccttgggcctcagttttctcatttgtaaaatgagggtgataataatagtgctgaggttattggattgttatacggattcaagatgtaaaaggctgagaataatgaacatcacccagtgagtagtcaaactttttcttctcataatcattattatcaagaaagatttagcttttggttcccccctttcaattggcatttatcacaattttttgtgaagtggattttagtgttatttatattatgactatgtaaatactgtttcctttcaagccaagtcatatattttggttacatttcctttcttgtacaactctttgttcttcctggagttactactcgctttgctttttttcatttgctgtttcctcttaacccatccttaattctcttaattctttgacaccctcagtctccccatagttaacattacacatcctgaaactcttcaagtgcttttaaagaagcatccccatccatttaaaaaaaactggagccaatttttaaaatagaatctcaaatacaatctgtaaaataaagatttgtgagcatccactatgtgccaggagctgtgctaggcagagtgggaaggtagccaaataggggatatccctgcccatgtgggtttccaagagggatgaaaactgaagctccacacccccagcctctgcatttaccggggaacacctcagcacctctaggaatctcaggacctcagggagcccagatttacttatttgtaaaatgaggatcattttgtcattctgcaatcactccttaaccatgttgtctggggctgtgttgtggctgctgggtatagagcaatgatctccccatcccttgaggggctcacaagagctgtgggatagagcggaggctgtggattgcagcggagcaatgggagctggggagcgggtttcccagaggaagtaccataggacgaagagggtcttggtgggtaagggcagtaaacggctgttatgttccaagggctgtgcgaagaacttccatgtattgtcccatcaaatcctcccaaagacccattgaaaggggtcatatttttatcacaatttcatagatggggaaactaaggccaggagagtccaaggccagggtcacacagctaataagcggcagaggcagtatttgaacctatgcagttgggttcttaaccacacactgcactgtctctcacatccagatgcccagctcctgtccccacctcatcctgtatctgcctcgtcctctcctgtctacccactggtgctaacctctggctcattccatgcccttcgctttattcatccattcattcaacacaaatctactgggcgccttttccacgcccaaccctgggctgggcagtgccagggacatagagcttgggcagtattgactcacccattcccagataggcattgacattgacatgcaagcggccaggaaagttgtctaaataaaggggtgtttggggttgagtgatggctgtgtgtatgtgtgtgtgtgtgtggcctgcaaggggtgtgtgtcagtgtggcagcaacagactttctgtggaggccatttatgaaggcatatctgtgtacccttgagagtgtgttgtctgcagagggtgtgtccaccaggtatgtggatcagtgaggctctgctgcataacaaaccactctaagcccagaagcctaaaaccacttattagcctgtgtgaagtggcagtctggcctgggcttagctgggcagttctggttttacctgggttcacttgccttgctgcagtcagctgagggtgggggctctgggagggcttcactcacatgcttagcagttggcaggctgtttgctggggtgcctccatttgctttgatgaggctggcttgggctcatgcttatggtgacctcagggttccacattcagcaagagaagataagctccaacgcacagtgcattttgagcctctacttgtgtcaagattataaatgtcctaatagcccaagtgacatgtcaagtcagattcaaaggatggagaaatagactctctctctctctctctcggttgtgtttttgttctttgaaaacaagcccggcttgcctggctccatcgcccaggctggagtgcagtggcgcgatcttggctcggtgcaacctccgcttcctggttcaagcaattctcctgcctcagcctcctgagtagttgggactacaggtgcgtgtcaccacgcccagctaatttttgtatttttagtagagatggggtttcaccatattggccagactggtctcgatctcttgacctcatgatctgcccgccttggcctcccagagtgctgggattataggcatgaggcaccgcgcctggcttagaatccatctcttagtcacattacacagggcatgagtacagatatggaggaattattgtagctgattttcaaacaacttacctgtgtgtgcaggtaaagaactagggacagttctcagttttggaaataaaaaaaactctgggctgcagtcctggctcttccgtccttgctgtctgaccttagtcaagttgtctcattctctgagcttccgtaaattggataaaattgaatgaaacgagatgatctttataaagtgcttgtgctactcatttgtttacaaacgcagcacatatttattgaggcctcctatataccaactactggtcccaccccgaggatattgcagtgaacaaaatggaccaaaacacctgctcttgtgaagctcacagcctaggttgtagacagatgttaattgatcatcctaataattgtatgaccattgagagtagattccggaaggagagattgctgacctggccaggttgatctgagaagccaaagatatttaagctgagatgtgaagggtaggtaggagacaacgaggagaagaaagataggagtggaaaatgattctagatggagggcatgtgcaaaggccctgtggtgggaggagtagattccaggaacacagagaaggtgggtggggctgggcctgaagcaccagggccagatggtgtggggctgctggagcctttgaacaatgtgagggtctgtcttgccaggcagcctaaaataaaaccgaaaggcctaactgctccacaaggccctcatgatcggggaccttgttactcctccagtctcccctttacctactctgctgcagccatgctgcctccttcctgttccaggaacaccctggacacattcccacctcagggcctttgcacttgccattgcctttactagtatcgaccctacccagatattctgatgactcattctgtcacttcatttccatctctgcctcttcaaaggggccttccctaccaacccaccacaacccccctgcccctccagctaagcagtcagcatccagcagtctctacttccctggcctggtttatttctcttcctagcacatatcacctcctggcttatattaaccagaggccacattgtctgtttctcttctggatctctcaccagagtgcagctcagcaggcagggacttggccttgctctaggctgtgtcctcagcctcaggggaagagtaggcattccataaacatttgtgaataaagaaatgagtgaaaatgagtgagtgaatgctggaaagaactagctcctggaaattaggaggtctgggttcaagttctagctgggcgatcctttctgttccttggtttctccagttgagctgtgaggcatttgtggtctctagggaggttctaggacaggaaaggagtactccaggctgtggagggggcctatgtaggaagaagggagctggggccttccctttggccttctggcgtttgaaaatagcctagctcagcccctagcttgggcccctaccctccctggggtgccaagctggagccagggggctctgtctggagcctgccagcctggtgccgggctgggatcaaggccacctgacagctgggccaggcagtcctggaaggttcttaagggcaaacagggcatgctggatgtcccagacctccctccccacctattgtccctcctccctcagtgtccaccggcaggataaatcccttcatcctctacaggcctgcagcccttgcagcttgcaaatctttttcttggtttgtttctaatttcacccctgctcagtagctactttactggtgaggacactgaggctcagagatgacaactgcctcactgaggttacgttgcagttatgattcaggcccaagtcttgcccagccctgtcctgtcaccgcgtgcacgtgtgtgtgtttgtgtttgtgtgtgtgtgtgtgtgtgtgtgtggtctcactatcaaacagtgccctcccttaaccaccagtgccccgggtctctgataagatgtgatgactatgagcacctggagccaggtggcctgggttcaaatcccacctttgctacttctatactgtgtggattgctgggccacccccacctcagtgtctgctaataggacaaatcccttaatcctgggcactggggcactatcaggactagcattgtatacattgcacaggttttaaaaaatgtaatctgtaggctgggcacagtggcttacacctgtaatcccagcattttgggaggcccaggtgggtggatcatgaggtcaggagctcaagaccagcctggccaacatggtgaaaccccgtcactactaaaaatccaaaaattcaccaggcatggtggcgggcacctgtagtcccagctactcgggaggctgaggcaggagaatcgcttgagcccagaagctgaggttgcactgagccgagattgtgccactgctctccagcctgggcaatagagcaagactccgtctcaaaaaaaaggtaatttgttgtcaatatttacacatctaaaccattggaagaataatgtatatataaactagctaatgaacacctaccaagccccaagcaccaactgtatgtccagtacagagccagctgctccaggggagttcgttcctgggagggggcatcatgatgaagtgggcgtggttcccatttcctccagcgtagtctcagaagcgggaagccatgtgactgaggttacagccagggagggcagaggcccccggcactcacccctctggggtccaagccccgctggcatgtgttgtgtccctgggtaggtgtgtcactccctgtctgtgtctccagtgttcctgttggcaaatcaggggtgggacggaggtaaatggagaggccctgcccagtctgctgtaatccaggatctcggacttagtggggccaaagcttccaagttctcctgattagtgaggctgcaaaaaatgtttggcatgttattctctcaccgtttaaatgtgggcaagtaacaacttacatgtaaaattacccccatataccaagcatttaagttatttattatatcattgcttacaatagcaaataattggaaattatttgagaaatggctaaagaaactcaggcccaggtacgcaagggaatcctaggcagccctcaaaagatgtcctgcaaacacctgatgtggaatcacaagatacacaacacaggtcagtgaacaaaacaagttgtggcatgatacccacagtgtgctgctgcttgtggaagcaggaacacatgtccatgtactcttgtactggcacagaaccctggagaattatcctgggaaccctgcatgctggctgcccctggggaggggaacccgagggttgggctcaagggtgggaggcaagactcactactttgcacaccttttgaattttgaatcatgtgaatgtgttatctgtgcagaaaaaataaaaatacatttaaagtaaagtgaaagtagacaagaaacctgaaacagagacggacaagcaagcctgcaggcccagccagctaccgcccccgggcaacctcatgccacactgtgggctctgcccagcttggttttgtggctccaccctctacggtcatatttgggtttccacacacacagcacccaaaggaaatcccagctaacgcacatcaggttctgggctgggccacccgccaaggtggttggtgggcatgacaccgccccgggaatggcgtcgtccaaatgcctgagcaatgacacggcctcagatggaatgatgccactgcccacagtctcacaggccctcccatctcgcctttgttctgcagcctccaggtgggtgtatggacactccaaaacagccatccctgtcaatgaatcagcctgcagggactgaattc

SEQ ID NO: 61159 - DNA, 576 bp, Homo Sapiens
  misc_feature (9)..(9): n is a, c, g, or t
  misc_feature (27)..(27): n is a, c, g, or t
  misc_feature (165)..(165): n is a, c, g, or t
  misc_feature (313)..(313): n is a, c, g, or t
  misc_feature (320)..(320): n is a, c, g, or t
  misc_feature (508)..(508): n is a, c, g, or t
  misc_feature (517)..(517): n is a, c, g, or t
  misc_feature (525)..(525): n is a, c, g, or t
  misc_feature (553)..(553): n is a, c, g, or t
  misc_feature (562)..(562): n is a, c, g, or t
gagatggantctcactctatcacccangctggggtgtaatggtgtgatcttggctcactgcaacctctgcctcctgggttcaagcaattctccttgcctcagcctcctgaatagctggggttacaggcgcctgctaccatgcctaatttttgtattttagtaaanatggggtttcaccatgttgatcaggctggttttgaaatcctgacctcaaatgatctgcctgcctcggcctcccaaagtgctaggattacaggcatgagccaccgtgcccagccccatttgtttttttttcaagccaggcttcatccanaaaaaanaatctgtatcatccttgcttcatctatagaaatataatataaataaatttagcaagtgatatttcctcaaacttgtttcctctttcctcctattatctctactccgatttccttctactgtgctttttctattttcttaaatatttatgaatctcattgtttctttctctcaactgtatgttttaaanttcatctanttttaaanattcaccattgttacccccattcatttnctaattggnccaattaacattga

SEQ ID NO: 61160 - DNA, 548 bp, Homo Sapiens
  misc_feature (442)..(442): n is a, c, g, or t
  misc_feature (529)..(529): n is a, c, g, or t
  misc_feature (544)..(544): n is a, c, g, or t
agtagagacggggtttcaccgtgttagctaggatggtctggatctcccgacctcgtgatccacccgcctcagtctcccaaagtgttgggattacaggtgtgagccaccacacccagccagaataatctcttaattaaaaggctgggtctggcacagatcaactgaatattgcttaccacttcctggaatataggttaaatcaggttaaaattaacactaaaggcagacttgaaattgtataaaagtaactgaagggcactaagtagctgtagaaagatttgagtggaggggatttatggactgctgctttaatatattcaggccaaattcttttttccctgctcctgcatcccttaatcactgtccaagcccaacgaaacaaagttttagcctcctgggaaactaataactgctatactccagggaaggttttgtccattgnactacagtttctacatctgcttctccagatccattcttcaccctcactttttcctgaattctgggaagctgactttatagacctggnttctaggtaagtcangaat

SEQ ID NO: 61161 - DNA, 532 bp, Homo Sapiens
tgcttaaaatatatatttttaatgagtgaaacaatggaagagagtgagcagaaggatgagggtctcataagtgtggcatctgatgataggttgcaggaaacagccaaaattcccagaagacagagcactcagcggacacctcttcaacctcggcatgcaggaaggctctgttggaaggcagtgaagcttttccaggacaggacgaatttttggctgtgggctctctgggacagagtggagcgcctgtggatttagccggggacacaccatcctgctcgcagtgcctggacaggacaggggacgagggaggaacactctctgaggaagcccaactcctatgagctcctctctggcaggtgagagaatggttttggtattttttaaaaaaataaaatgagataaaacaagagaaggaacagaggctaccgctaggacaggtaggaaaggagattaccacccatccattcactgaggaggagcccccaagagaaacagcagccctggattccacccgagggatcctgtctggtct

SEQ ID NO: 61162 - DNA, 1491 bp, Homo Sapiens
atccaacagttctgatttattccactcacacaacaagtcagttcttaacacaaaccacataggttcttccttaaataaaaagctgtggctatgaagaagtgagagttttttttttttttcctctccaaaccaccacgtgctcttgtgtgttattgtagtggcttcgcagagtatttatttggccagaaagtctatagtcaaattgctcttcattctcaagtgtagtatttatttctccagctcatgcagaattctgttttatatggaggttttaaatttgtgcagaaaagtattacgtgggtttcaaaggtactcttttttcttttttgagacagggtctcgctgtgttgcccatgctggagtgcagtggtgcgatcacagctttctgcagcattgaccttgtgggctcgagcagtcctcctgcctcggcctcccaggtggcttggaaccgcaggcatataccaccatacctggacatgtttttaactttaatttttatttttgtggagatgaggtctccctatgttgcccaggttgctctcgaactcctaggctcaagcagtcttcccgccctggcctcccaaagtgcaggcattttaggcatgacccatcgtgtccagcctaaatggcattcttggaagtaaaaccacaggggatctgttggaagtggcatgatggaggaattttaaaagaattgaacaaataaaatagtcagagctcaaaaattgagtactgcttcgtttctcccaaataaccatcaccagacaaacaggtgtgtgtgtgggtgggggaggtggcctggtggtacttcatgatcttggaagaaggaaggcgcccctccttcttagctgattgatgatgagatagaaagatagaaacagccccatcactatgagatggaaacccttctttccttcagctgacttccctctccttcattcccaaccaagtttgaccccgccgcagtggagattgtggcagatgggtcagatagcatgtgtcctgtcgctgtcacaactttttaataagggctgggggtcctcttgaagagcccaggaactgcagtccctcctctatgccttcccctgaacgcagtgcgccctcactaataaattctgagggctgacactgcctgagccggctggtctttgccctcaatttcattgagatgggccgtgagtgactaaagtaatgcattaatggttgaatggctggccaccgtgcctcatgcctgtaatcccagcactttgagaggccagggcgggcagattgcttgaggtcaggagttcgggatcagcctgggcaatatggtgaagccccgtctctactaaaaatagagaagttagccaggtgtggtggtgggcgcctgtggtcccggctacgtgggaggccggggcaggagagttgcttgaacccaggagggagaggttgcagtgagacaagatgatgccattgcactccagcctgggtcacagagcgagacttcatctg

SEQ ID NO: 61163 - DNA, 529 bp, Homo Sapiens
  misc_feature (433)..(433): n is a, c, g, or t
  misc_feature (441)..(441): n is a, c, g, or t
  misc_feature (454)..(454): n is a, c, g, or t
  misc_feature (483)..(483): n is a, c, g, or t
  misc_feature (521)..(521): n is a, c, g, or t
  misc_feature (525)..(525): n is a, c, g, or t
gagatgaagtttccctctgtcaccaggctggagtgcagtggtgcgatctcggcttactgcaacctctgcctccctggttcaagcgactctcctgcctcagcctcccgagtagctgggactacagatgtgtgccaccacgcccagctaatttttgtagttttagtagagacggggtttcgccatgttggctaggatggtctcaatcttttgacctcgtgatccacccgcctcggcctcccaaagtgctggcattacaagcgtgagccactgtgcccagccagctctttatagtttaagaggaaggataaaccttaagagatcacaacactatatttgtgtcagggatccacaagactgcctccatgtttggagatttgctagaaggactcatgggatcagcttagggttgtaatgggctaagatttattactgnaacatagnatggatatatagnagaaagatctcaatggcaaaagacactgnccgagtctggaaaaattcctggacccggtttcttatgnggcngggc

SEQ ID NO: 61164 - DNA, 1003 bp, Homo Sapiens
gccaagaattcggcacgagcggcacgagctttattattatagtcatttgaaattgaaagagtaacatttatctttttgtagcattcttggtccctgctgttctgattaatattttatcagtgataaaaaataccaaaatatagtgtgtttgctcatcagatttgcaaattacaaaaactaggaggatatttcagtaatggtggaggctaagcttctgtaacaaaccgctgacacagtggctcaaagagcgcagatgttcatttcacttttgtaaccaccctgtggggtaggcaggctctgtaccggtaagtcgtcaagggcctggtctggtggagcacctctgctttcctcaacatgtgccttccaaggaggctccatggcttctgcttccagctggtgtggaagaaagaaggggcatgcaggaggagggattgcctttccccaggtgccttcaaggttgcagatgtcactcctgctcccaaaccattggcaagaacttggtcacgtggccacacctaatcacagggaggctgggagatgtaatcttacctgggcagttgtgtccctggagataagggaacagtgggttttcggggagctgctagcagtcttctcagaagaacaatagctctaacacattagctgcctcagcaagctggagttttgggctttatagtcaaaatatgaaacatagaaggaggccaggcatgatggctctcacctgtaatctcggcattttgggaggccaaggcaggcagatcgtttgagtcctggagaccatcctgggcaacatagcaaaaccttgtgtttacataaaatacaaaaaattagccaggcgtggtggcatgtgcctgtagtctcagctacctaggaggctgaggtgggaggatcacctgagcctggagggccgaggctgcagtgagccatgatcctgtcactgcactccattcagcctgggctacagagtgagactctgtctcaaaaaaaaaaaaaaaaaaaaaaa

SEQ ID NO: 61165 - DNA, 1974 bp, Homo Sapiens
agccgtagccagatccgttgaaaggagtgcagagaggtctcattgcgctcccgaacagacctgacgtagatccgaagtggcccgcgccatctcaactatgaggggacacccgtaggcggcgggagagggacgccgcgaggagccaataaagctccgcaaccggaagtgtcttctgggaggggtcgtacccggaagtgtggcacctcccgggccgcacccggaagtgtgatgccaccgccgctacggggaagtaatggtatccggccaattgagattcggagttaaaacagggatgtgcagatggaggtcggaggagacactgctgccccggcccccgggggcgcggaggacttggaggacacgcagttccccagtgaggaagctagagaaggtggaggggttcacgcggtcccgccggatcccgaagacgagggcctggaggaaacaggatccaaggacaaggaccagccacccagcccatcaccaccgccccagtcagaggccctgtcaagcacctctcggctctggagtcctgcagcccctgagaatagtcccacatgtagccctgagagtagctctggaggccagggcggggaccccagtgatgaggagtggcgcagccagcggcgcggctgtcggacctgtaccaccgcctgcatgctcgtctccacagcacctcccgacccctgcgcctcatttaccacgtggctgagaaggagacactactggcctgggtgacctccaaattcgagctctatacctgcctcagccctctggtgaccaaggcaggtgcaatcttggtagtgaccaaactcctgcgctgggtgaagaaagaggaggaccggctcttcattcgttacccacccaagtactccacaccaccagccacctctacggaccaagctgcccataatggcttgttcactggactctgatagttggagctcccagaccaggcagtgctgggagcaaccacctttgttttttaccttctgtctaccctggaaatgtgtgtgggggtgtgtctgtggccagtcattgtctccctaagcaatggggcaaggtctgagggcccaccgatgagagagatggtggcagccgccaggcgagcaggctgctttccctgcccagtcatgcacctccccctctggggaaatccttaggcctccctctcccttccctctgtctcatctcctccacttggatgatgctctagcctctgtcagggactgtcccctccaaacttgcttccgtggtctgcctcctagttgaatctcagccctgagtgtccagatctggccaaggtgtctagggtggcccacgggggtgctggaattggcacttcagggccaggctatgcttgggactggcctgagggtattttaaagaaaaaaactacataaaaggcctaaaagtaagacccacaaggatattcctttgcccttcttgtacttttttcatctttaccctgccagaaatgacccgccctcaatgctggctgctgctaacattaatgagaaggtggcctccagtgtccacctgcggaacccaggacacagcacctgactgcacacagtggctgaaatccagcatttttacataggagatgcacttagcctctaagcctcgttttactcatctgtgaaacagagataagtaaccctctctcatgaactctttgatgaggatttgtaaacgaaaacagactcgaactattgtgtaccaccacatagcacatgcacgtctgtcccagactttgacaacctgcacaagacaagcagcctaaagcaggagagacctccctagggttttgtgtgtgtgcacactaccctcactccccaactggccattaccctagttctgcactcctttctctccaaccagggcagaaaggagggaggattcgtcccattacaataatgaaataatgatattctaatttttttaaataaaatgttaagccttttgttattg

SEQ ID NO: 61166 - DNA, 2005 bp, Homo Sapiens
aataatttggtatttgctaattcagtatttgccacactttatagaacacaactacctcaaatacaagaattgactataaatcaaaaacttttttttttaatggtttccagtggatagaggaataaaaacagggtggaggggacaggaatggatttttgacaaatttaactttggtatcatataaatgtataattataaataaatgaataagaagtaatctctaaaaatcaaaagcacagtgaagtaaatgaacctaactatatattaaataggtaaatttctagtgggatgtatatgaaggacaaaaagaattgtaaaattttcctaaactgtaatagtaattatattatttgtaataaaagtattattctgaaagtattaatgtatattacaggatgaaacaaataagtaactgttaatgtcattggaaaccaagattttcagcaaaagaaagataaaaatattaaattgtagggttttgcataacttatttaaaactaaatttgaattggaaatatctgtagcagtttatggtatatttgcaaacagaaaatctgttacagaaaatctgttacagaaaatgttttacctaccactgttttctgaaaagacctggaaaccctgtacaacccagaatcaatgagtacccttggcatctagggtatagtctctaggtttcatttcccactgaaagaattggggttccttggaaaaacgactagttacagttcttgggaaagaaatgaatgagaagtttggaatgtcttgtcattttggaaagcaaggaggcagtctaagactactgaggtcatggtaaagaaactcaagagccaacttacggaggtttctactggtcatagattgaacagctttgagcatcggtaataactgcagtggactgtgaatcacatcaaagatgtttaaatccatgagttcataatacctaaaaagaaatttttttttagtttacttgcaacttttggagtatattaggaaatcaaatcattatttttgaaactgataaataatggaaaacagtatcaagcatttattctacttgcaagtatacttcatggcaaccaaatggtgattgaggggaagtttgtgttcttatatgtattcaagctaattaatgagcaaggacaattggaattagaatatcactgttttggaatcccagatgaaatgatggatctaggcagttgtcaccactgacagaaaaccttacaaaaagactaacccttcattgtgtgccttctacaagatactgttaattaaaaagtcaaacctagatctcatcaagtctggatctgactaccagtttatagaaaatgcagggacagagaaacatgttaagacagcaccataaggatacaatcagcaaagtgtaaatgtgagagaaactacaggacaaatgaccttcaacagataaattgcaaacacaaagctggtggggaaaccaatagattaaaatatttaagagacttttcaactaattatggcaaaaggctttatttgaatcctgattcaaacaagttaattttaaaaatctttttggaaacttcaggaaatgtgtacgctggatattgtatgacagtgcggaattattcatttaggcatgaataatggtaccgtggttgtttttgaaacctatctgttaaagatactatgatttatggattaaatgataaaatgcctggaatttgcttcagaataattcatattgagtggatgggggttcaaatgaaacaagactggctctgattttggtaaatttgaagctgactgatggaatacttgtactattctgttttttaatatagctgaaatttttataagttataaaagaaatatgcaatctaggtgtagtggcttgtgcctgaatcctggttacatagaaggatcccctgagcctagtaattcaaggctgcagtgagctgcgatcacatcactgcattcccgcctgggcaacagaagtagactccatctctaaaaagaaggaaag

SEQ ID NO: 61167 - DNA, 569 bp, Homo Sapiens
  misc_feature (430)..(430): n is a, c, g, or t
  misc_feature (478)..(478): n is a, c, g, or t
  misc_feature (509)..(509): n is a, c, g, or t
  misc_feature (538)..(538): n is a, c, g, or t
  misc_feature (557)..(557): n is a, c, g, or t
  misc_feature (563)..(563): n is a, c, g, or t
  misc_feature (569)..(569): n is a, c, g, or t
caatttgccctctacacttcccaatttagaagaaactatcactagtttcttgggtatttatatttgtcactaagtcactttaatgcatcttcaaatatgtgtaaaaaatagaactcttataccaccatcaaccagacagcatatattaccaattaaataagtgcccactatttataaatagtgcatgtttagggatcaataaaaacatatccttacacgtaaggacatatcctaatcttatcataatatctccaaactgcaaaagcatgtgctgggctgttctctaccgaataccataaaactgaatattgttcaccactatggtcgatctttctaactttaaagagtacacaactgaactcaattactccaaagatatgtgaaaacacagaaaaatgacccctgttaaaagagtaaacctagcttttgntttactttccttttatataaaaaaagatgtacagggttctcttctganggccagtagtcaatttagaggggatacttcngaagctttttttggtggtggtaattgggnacctttacttcccaagggncccttntaccan

SEQ ID NO: 61168 - DNA, 819 bp, Homo Sapiens
atggccgaggtgcagctggtggagtctgggggaggcctggtcaagcctggggggtccctgagactctcctgtgcagcctctggattcaccttcagtaactatagcatgaactgggtccgccaggctccagggaaggggctggagtgggtctcatccattagtagtagtagtagttacatatactacgcagacttcgtgaagggccgattcaccatctccagagacaacgccaagaactcactgtatctgcaaatgaacagcctgagagccgaggacacggctgtttattactgtgcgagatccagtattacgatttttggtggcggtatggacgtctggggcagaggcaccctggtcaccgtctcctcaggtggaggcggttcaggcggaggtggcagcggcggtggcggatcgcagtctgtgctgactcagcctgcctccgtgtctgggtctcctggacagtcgatcaccatctcctgcgctggaaccagcagtgacgttggtggttataactatgtctcctggtaccaacaacacccaggcaaagcccccaaactcatgatttatgagggcagtaagcggccctcaggggtttctaatcgcttctctggctccaagtctggcaacacggcctccctgacaatctctgggctccaggctgaggacgaggctgattattactgcagctcatatacaaccaggagcactcgagttttcggcggagggaccaagctggccgtcctaggtgcggccgcagaacaaaaactcatctcagaagaggatctgaatggggccgcacatcaccatcatcaccattaa

SEQ ID NO: 61169 - DNA, 2895 bp, Homo Sapiens
atggcagggccacgccccagcccatgggccaggctgctcctggcagccttgatcagcgtcagcctctctgggaccttggcaaaccgctgcaagaaggccccagtgaagagctgcacggagtgtgtccgtgtggataaggactgcgcctactgcacagacgagatgttcagggaccggcgctgcaacacccaggcggagctgctggccgcgggctgccagcgggagagcatcgtggtcatggagagcagcttccaaatcacagaggagacccagattgacaccaccctgcggcgcagccagatgtccccccaaggcctgcgggtccgtctgcggcccggtgaggagcggcattttgagctggaggtgtttgagccactggagagccccgtggacctgtacatcctcatggacttctccaactccatgtccgatgatctggacaacctcaagaagatggggcagaacctggctcgggtcctgagccagctcaccagcgactacactattggatttggcaagtttgtggacaaagtcagcgtcccgcagacggacatgaggcctgagaagctgaaggagccttggcccaacagtgacccccccttctccttcaagaacgtcatcagcctgacagaagatgtggatgagttccggaataaactgcagggagagcggatctcaggcaacctggatgctcctgagggcggcttcgatgccatcctgcagacagctgtgtgcacgagggacattggctggcgcccggacagcacccacctgctggtcttctccaccgagtcagccttccactatgaggctgatggcgccaacgtgctggctggcatcatgagccgcaacgatgaacggtgccacctggacaccacgggcacctacacccagtacaggacacaggactacccgtcggtgcccaccctggtgcgcctgctcgccaagcacaacatcatccccatctttgctgtcaccaactactcctatagctactacgagaagcttcacacctatttccctgtctcctcactgggggtgctgcaggaggactcgtccaacatcgtggagctgctggaggaggccttcaatcggatccgctccaacctggacatccgggccctagacagcccccgaggccttcggacagaggtcacctccaagatgttccagaagacgaggactgggtcctttcacatccggcggggggaagtgggtatataccaggtgcagctgcgggcccttgagcacgtggatgggacgcacgtgtgccagctgccggaggaccagaagggcaacatccatctgaaaccttccttctccgacggcctcaagatggacgcgggcatcatctgtgatgtgtgcacctgcgagctgcaaaaagaggtgcggtcagctcgctgcagcttcaacggagacttcgtgtgcggacagtgtgtgtgcagcgagggctggagtggccagacctgcaactgctccaccggctctctgagtgacattcagccctgcctgcgggagggcgaggacaagccgtgctccggccgtggggagtgccagtgcgggcactgtgtgtgctacggcgaaggccgctacgagggtcagttctgcgagtatgacaacttccagtgtccccgcacttccgggttcctctgcaatgaccgaggacgctgctccatgggccagtgtgtgtgtgagcctggttggacaggcccaagctgtgactgtcccctcagcaatgccacctgcatcgacagcaatgggggcatctgtaatggacgtggccactgtgagtgtggccgctgccactgccaccagcagtcgctctacacggacaccatctgcgagatcaactactcggcgatccacccgggcctctgcgaggacctacgctcctgcgtgcagtgccaggcgtggggcaccggcgagaagaaggggcgcacgtgtgaggaatgcaacttcaaggtcaagatggtggacgagcttaagagagccgaggaggtggtggtgcgctgctccttccgggacgaggatgacgactgcacctacagctacaccatggaaggtgacggcgcccctgggcccaacagcactgtcctggtgcacaagaagaaggactgccctccgggctccttctggtggctcatccccctgctcctcctcctcctgccgctcctggccctgctactgctgctatgctggaagtactgtgcctgctgcaaggcctgcctggcacttctcccgtgctgcaaccgaggtcacatggtgggctttaaggaagaccactacatgctgcgggagaacctgatggcctctgaccacttggacacgcccatgctgcgcagcgggaacctcaagggccgtgacgtggtccgctggaaggtcaccaacaacatgcagcggcctggctttgccactcatgccgccagcatcaaccccacagagctggtgccctacgggctgtccttgcgcctggcccgcctttgcaccgagaacctgctgaagcctgacactcgggagtgcgcccagctgcgccaggaggtggaggagaacgtaaggacccaggaactaggcctggccggagatgtggctgaacgaggtctacaggcagatctccggtgtacacaagctccagcagaccaagttccggcagcagcccaatgccgggaaaaagcaagaccacaccattgtggacacagtgctgatggcgccccgctcggccaagccggccctgctgaagcttacagagaagcaggtggaacagagggccttccacgacctcaaggtggcccccggctactacaccctcactgcagaccaggacgcccggggcatggtggagttccaggagggcgtggagctggtggacgtacgggtgcccctctttatccggcctga

SEQ ID NO: 61170 - DNA, 1872 bp, Homo Sapiens
cttggattctagccagcacgactgaaggagccccatcagtagcacctttaaatgtcactgtgtttctgaatgaagccaattacaaagcaacaaggtgagctggttggctcaaggatctcccatgtgtggcaaagcgctggcatttctaaagaattattagaagaagttgggcaaaatgggtctcgtgcgcgtatttctgttcaagtccataacgccacctgcaccgtgaggattgccgctgttaccaaggggggagtcggccctttctctgaccccgtgtgtaaatattatacaggagggaataccgggtatttctgcgctaacgtatcccgcatgtccacacatagaagctttaaactaaataacaccttacacatcccctgtcgagggcgaccacaaccaaacgtgacctgccgagacctaaagcggtgcaatgtgtccgacgaagttcaaaggggcatgccagggaacgtcacaccctgcacacgactaggccggctctgtccgctatttaactcaggcgcctggcaacgcagatcctgtgctcatcatctttggctgcttttgtggattattttgattgggttggttttatacatctccttggccatcagaaaaagagtccaggagacaaagtttgggaatgcattcacagaggaggattctgaattagtggtgaattatatagcaaagaaatccttctgtcggcgagccattgaacttacccatagcttgggagtcagtgaggaactacaaaataaactagaagatgttgtgattgacaggaatcttctaattcttggaaaaattctgggtgaaggagagaaagggaccgtgtatgaaggactgtggaatatccccgaaggaaaggaagtaaaaattccagtagcaatcaagaccctaaaactggacactatggctaataaagaaatacttgatgaagcaagtgtcatgaaaggctttgggaacccccacgtagtgcgactccttgggatatgtatgacatctacaatatatgtaattactgaatactgtctactggtttatagaaggaataaagataaagctgaacaacaccggtcaaattgtgccgagctaaacccaccgctgcagacactattgaagttcatggtggatattgccctgggaatggagtatctgagcaacaggaattttcttcatcgagatttagctgctcgaaactgcatgttgcgagatgacatgactgtctgtgttgcggacttcggcctctctaagaagatttacagtggcgattattaccgccaaggccgcattgctaagatgcctgttaaatggatcgccatagaaagtcttgcagaccgagtctacacaaaaagtgatgtgtgggcatttggcgtgaccatgtgggaaatagctacgacgctgcggggaatgactccctatcccggagttcagaaccatgagatgtacgactaccttctccacggccacaggctgaagcagcctcgaaccgcttggaactgtacagaaatccgaatccgactcctaaaactaccaatcctggggagtcgaacaatgcgtccaatgacaatattttcaatggccacgcgactatcatcacccaaaacagcttggatgaactgtatgaaaaaatgtacactagcaggggaacccataccaaagactggaccgacattctcggtactaagactacagctggaaaaattgctagagagcttaccggacgttagaaatcaagcagatgtaatttatgttaacactcaattgctagagagcgaaggccttgccagggttcatccctgtagtaccgggctcgaacaccatccatgcagcgaacatcgaccgcgtccgcacctctataattgctaa

SEQ ID NO: 61171 - DNA, 1778 bp, Homo Sapiens
ccctagccttgggctgtagggcagagatacccagttacatgaaggagtgtgagccccattccaaaaagctcccatcctctgagtggtgctcaaaagtcgcctcctaaccagtagcacagcctgtgtttctgctgctgtctagaatgcctcattccaacctctgacgcccatctgaccgtgctggcggttgccacactgtcctgtcttgtggttttctgtccatccccatttcacagtgggcatttctcttggtttctgtcccatccagagcacaccatggccacgcccctggaggatgttggcaagcaggtgggtaggtcttgtctgcttcctgtggccctgatgggtccctgcagagcctcacgctgcttgtcgctccttgtcctcttccctccaggtgtggcggggcgccctgctcctggcagactacatcctgttccgacaggacctcttccgaggatgtacagcgctggagctcggggccggcacggggctcgctagcatcatcgcagccaccatggcacggaccgtttattgtacaggtaatgaggtgacatctcaggctgcagggaagtagtcaccttcacaaagcatgcactgactgtataaaaaaagaggcagaggcaatggaaattggatgttagctgctgttgattttgccatcctggtcccctggccctctccactctccattttttctcagtgacatcaaaatgacccagcaatacgcactcagcagcagcagcgtcacccagtggctataaggccattgagcttcaggaggtgcctagcgcccctgctggtacctctctccccactcctgagaaagagcaaatatctccaaaaacaggaggaatatacccttttagaagcctttgaaagcaagtttattattcttttcctgggtatagaagccttgcccattctttgtaggaggtttttaaaacagtacgtaaaaattactcataattttacaatccctagattgaatcaacaatatgcaacttatgggtcacctcccgtgtgccactcatttctagatgtaggaggccctgcggtgaatggagctgactaggcactgccctcagggcgcttacgttgtaagaatctcctccaaatgatagctgaaatcaagctgcagcagcactgtattctgctgaaaatgttgaaaaacatttttaagagcattttcttttttaaatatgtatatatttagggggtacaagtgcgggtttctgatgtgcagctatactgcagtgatgacatccgtctgggcttttagtggaccttccactcaaatagtgaacattgtacccaatagggaagctttaatcccccacccctcccaccgtgtcaccttctggaatccccagtgtctgtgtttccactcagtatgtccatgtttacccattgtttagctcccactcataagtgagaacattttaagagcattttctcatgccattaaaaaattattatataggccaggtgcggtggctgacatctgtaatcccagccctttgggaggctgaggcaggcagatcacctgaggtcaggagtttgagaacagccaggccaacatggtgaaaccctgtctgtactaaaaatacaagaattaaccagatgtggtagcggcgggcacctgtaattccagctacttgggaggcttgaacctgggaggcagaggttgcagtgagctgagattgcaccactgcactccagtttgggccacagagtgagactctgtctcaaaaaaaaaaaaaaaaaaaaaaaaaaaa

SEQ ID NO: 61172 - DNA, 2048 bp, Homo Sapiens
tttaatattacaaaaagaaatcagatacctaaaacattaaatatgcactgaaaattatttaccaaaaactgaaacaagtaaaaaacattcccttatttgaaaaatgcctttcattagaagccttatgatttagctaaaatgcacagaagataagttattgccaagtgcttgtaggatgccacttgaaaagttcctgtttgagagtccaggtcttatttcctcccaagaaaaatttagttatcaccattttatattttactttgtaagttaatcttttacttgggtatctgatataatctcacttttcttttttatataattgctactaactttgaaaaaaacactgcttatttcaaagagaaataatgtttaaaagatgtgaagcatttaatccttgaatgctggaaacgcttttaaagtattgtaagtacatctgtattacattacacacagggaaaagaatgtatgaattctatgatctgtgggcactaaggtggctggtttagaaaaacagtattttgcatttcaagtttcttttcaacataaagaatattctgcaattttaaaaagaataattccaggctggggtgtgtggtcagggaagcataagtaaagttttggttctacagttgttctctaactttagtaagcttggctctgcattttgttaagcacttttatatttttcctgatttgaaaacgattgcgtgagacaaactcagaacatggagaaatcactacatcacatttcttaatgagtgtcctgcatgtcttactcagctatgattatggtgcagataattttttactaattaagaaataccaaagtttgtgaatgatttactcttaaaattacagcaaatttaaatgtatcccaatgataacctcactcttgatcacttgtgttccagtgtgcttttttgagcaggagataaaaggatggagttacagccattaggctggatctcatgagatatgtgttttgcatgtgaatatcacctgtcattggtagagatgaataaaaatgctggagaacttctgcactagactggttgacatgttctcagctttttcttctttgacatgaaatgacattaacatgccaacatattctcatatgtacccgctagtgagctagctagaattccacccctttcactcccaccccagaaagcaagcaagaatgaatgttctggggatgcattttcagccacctcagacttatttttttaaagtaatgatttgagaatttcatgctttaatgaccattagcatctaattacctgtgacacatttggcagctatgtcacgataaactccgtatttcttaaattttacatggcaatataaatttctggaaaccagttataattagaataattgacttttttccaaaagccaattttgtaaccagttattttattgccatgttactagaaattgtcataaggtgattggttgtctttaaggctcaaaataaatatatttgaggaattcaaatagttagctcatcattcttttattcaagaaaaataacaacataaatattattattattttatttttttattttttgaggcagagtttcactcttcttgcccaggctggagtgcagtggcacgatcttggcttactgcagcctccgcctcctggattcaagcgattctcccacctcagcctcccgagtagctgtgattacaggcatgtgccaccatgccgagctaattttgtatttttagtagagatggggattctccatgttgctcacgcctgtaatcccagcactttgggaggccaaggcaggcagattacgaggtcaggagatcgagaccatcctagctaacactgtgaaaccccgtctctactaaaaatacaaaaaaaattagccaggcatggtggcacgcacctatagtcccagctacttgggaggctgaggcaggagaatcgcttgagcctgggagatggaggttgcagtgagccgagattgtgccactgcactccagcctgggcaacaaagcgagactccatatcaaaaaaaaaaaaaaaaa

SEQ ID NO: 61173 - DNA, 581 bp, Homo Sapiens
  misc_feature (491)..(491): n is a, c, g, or t
  misc_feature (520)..(520): n is a, c, g, or t
  misc_feature (522)..(522): n is a, c, g, or t
  misc_feature (562)..(562): n is a, c, g, or t
  misc_feature (576)..(576): n is a, c, g, or t
gagacagagtcttgctctgtcacccaggctggagtgcagtctggatcgcagccaagagcgcgatcttggctcactgcaacctctgcctcccaggctcaagcaattctcctgactcagcctcccgagcagctgggactacaggcgcacaccaccacgcccggctaattcttgtatttttagtagagatggggttccatcatattggtcaggctggtcctgaactcctgaccttgtgatccacccgccttggcctcccaaagcgctgggattacaggcgtgagccactgcacctggctggaatatattttaaaataatatgcatgagaaaataaccagtttcctggacttcagaagaggaagaaaagttgccctccctctcatttctttttgctttgacaattaaaacatcagacactactgttcaaaagcaccccaaagaccagtgcataaaaacaggtagcccctaattcatctgcataagacataactgnttatcaaaccgattataatcaagcatttncnaacagctggcttatttctcaaaaagcatttggcttaaaantagaatgggatatnccaat

SEQ ID NO: 61174 - DNA, 560 bp, Homo Sapiens
  misc_feature (508)..(508): n is a, c, g, or t
  misc_feature (523)..(523): n is a, c, g, or t
tcttgctcctcccgtaccaactgccgctgctctcgtttcctcttaattaatgatactctgtctttgatagctttagccatggtcttgtgatcaccttcacagacatacccagactctaccatttcttgtgcaacatcttctgggacatctctctctaaatcaaaagaaaactcaatagcttcattatctttgtattttccctttaatttcttaatatcttcaatacgtagccataattttatggctattttttctccatcatcctcttctgctaattctacccgtactcctgtttcctcttggaagaaggcatggttcaaaaggtctttgatggaatatctttcatctttgttttgtcgtatgcatccttcaataatttccttcacttcaggaattgctactttgtcaaaactggctggcttcaccccctcatttatacaatccttttgagggcagcagcagcaatgagaatttatgatgacaaatactgagcaaaaatctttctttntaatatccatcaganaaggcaaaacagatttcttattggaggaaaatgaagg

SEQ ID NO: 61175 - DNA, 484 bp, Homo Sapiens
tttttttttttttaatttttaaaaatagggtctcattctgtgcccaggctggagcacagtgatgcaaccaagctcaccacaaccctgagctcttgggctcgaataatcctctggcctcagctaggactacaagcatgtgccaccatgccctgctaaccccatctcaatctttatacccataagagaaccttttcttagaagcctcttttcttagggtttggaggttgatttactattgccaatatagcaaatctttattttccttaggtttattttgattttttaaaacaatagtctttttactcaaactttggcaaagagtttgggctagtataccaagtaaataagctttaattttctcttggccatgtatcttctattagtttctgcataagaccctcagtgcttccatgtttactgctcgctgcacaggcacctctcactagatggcacttaggatatttttcaaccatctttctgacca

SEQ ID NO: 61176 - DNA, 2048 bp, Homo Sapiens
gagaaccaagctatgcttccatgctaatatcaaggttccttgcttttgacagctccctgcccctgctctctaccattctccattaatatttacttatttttgcttgcctaaaagtttttaggcaatagttttagatccattacaaggtagatcctcctgtgtttgtcttccctattgaacctgcccatcacaatgtatctcacagaaaccatgagtatttcatagccttcatagcacttttaatgtagcaaatacattttataatcatttgtattactttgttcccaaatataatgcaagagacaagttggctagatcagtcttatcttgcagatattggtcgggagttcaagggtcataaaactttcctaactggggtgcagggccttaagtggcagagtgagaatcaaacccccctctccaaaactcctgtcttgttccttaacttctgcaaatgagcatagttgatgtgaacatccctgcaagccctttacacaggtgagaagtagttattattatttcactagtactaattagtagcattaggtgactatattcaaggctttggaaggcaagactaaaaatcagatttgggacagggagttcaaagatctgggcttcaccataccggatcattttggcaatagtggtgatttttggtgtagggaaaacaaagacctatgtttgggctaaccacaagccctgtgatcttgaacaagttctggaacatccctgagcctaaattacctttcaatggagatcctgtgatctatcacaatgcatttgtgagaatcaggggcatttctgtgatggcgctttgtcagtggtaatgcagtctgtacatgtgtccgattctgggtgcccagcggggcatctggcacacagtgatgacaccttactctgcttgtggggctcaaaggatttagacctagacaactcctagttcaagtcctcgttgtgctgtttaatacagggtgctcccttggtggtcacaggcactatttgttttctccacgtattcatttttagatctcttattaatgaggtcaccacagttgagtatagtgtgcccgcaaaagtgggatgagtgccacaggcattcacgggcatttccaggttgtgcgctgatttgtcaccagtggatggctgtgcagtgtcccttcttccactgccaccatcccaccttctcttgggttttgtttgcactgtttgtatctgttacccgtggagggtctgcttctactgttgtaattgcttgtgttgtgactttgcatcatagctggagatccctctgtagttcaaatggaaagctggtgttgaaggtgaaaccaggtcttcttcagaaacttgtgtgggaacctttcatgggctggataagcatgaggatcaggacagggcagggtcactgaccttaaaggaggatgctttgacctgcctccagcatgcacccttcctgctgaagccattgttagtgtcccttaattactcaggccaccacccagcagcgcaactgtcaacttgcagaggacttcagtggtatcagtagtgttcctttttactctcataggtgtcctgattcggaggatacattatatggtcaccctacttataggtgaatattgagtgaggtagtgtaaataatgtgcatgaggccaggcataaggcaaggactcaacaaacatccactgtttttgttagagggggtgctaggtgctcaagaaatgtctgctgagtggccaggcatggtggctcatgcctgtagtcccagcactttgggaggctgagttgggtggatcacgtgaggtcaggagtttgagaccagcctggtcaacatgatttaacctcgtctctactaaatatacaaaaaaaaaaaaaaaaaattagccaggtgtggtagtgggcgtctgtaatcccagctactcgggaggctgaggcaggagaatcgcttgaacccaggaggctgaggttgcagtgagccaggatggcaccactgcactccagcctgggcaatagagcaagactctgtctccaaaaaaaaaaaaaaaaaa

SEQ ID NO: 61177 - DNA, 5405 bp, Homo Sapiens
gcagggaggccttacgccttccagactgaaggagcctaccaaggtagccagtgggcggaccactccagcccctgtcaatcagacagatcgggaaaaggagaaggccaaagccaaggcagtggccttggactcagacaacatctccttgaagagtattggctccccagaaagtactcccaagaaccaagcaagccaccccacagccaccaagctggcagagctgccaccaacccctctcagggccacagcgaagagctttgtcaaaccaccctcactagccaatcttgacaaggtcaactccaacagtctggatctaccatcatccagtgataccacccatgcttcaaaggtcccagatctgcatgctacaagctcagcatctgggggccctctcccttcctgcttcacccccagtccggcacccatcctcaatattaactcagccagcttctcccagggcctggagctaatgagtggtttcagtgtgccaaaagagacccgcatgtaccccaaactctcaggcctgcacaggagcatggagtccctccagatgccaatgagcctccccagtgccttccccagcagtactcccgtccccaccccacctgctccccctgctgctcccacagaagaagagacggaagagctgacttggagtggaagccccagagctgggcaactggacagtaatcagcgggatcggaacactcttcccaagaaagggctcaggtaccagcttcagtcccaggaggagaccaaggagaggcgacattcccataccattggtgggctgcctgaatccgatgaccagtcagagctgccttctccccctgcacttcccatgtctctgagtgcaaagggccaacttaccaacatagtgagtcccactgcggccaccacgccaagaatcacccgctccaacagcatccccacccacgaggcggccttcgagctgtacagcggctcccaaatggggagcaccctgtccctggccgagagacccaagggaatgattcggtcaggatccttccgagaccccacggacgatgttcacggctcagtgctgtccctggcctccagtgcctcctccacctactcctcacaaatccggaagcttcgtagggaactggaatcatcccaggaaaaagtggccaccttgacgtctcagctttctgccaatgctaatctggtggctgcttttgagcagagcctggtgaatatgacatcccgcctgcgacacctggcagagacggccgaggagaaggacactgagctgctggatttgcgagaaaccatagactttctgaagaaaaagaactctgaggcccaggcagtcattcagggagcccttaatgcctcagaaaccacacccaaaggtaggacatccagccacagattgagagggaacagggagcaggaaagtaagagtattacagatttttatctgggcccatagtattccaagtcctatatcaagtctctagaaggtgagggcctttagataccctttagtgtgatgtctggactggtcagtgaggagtaccaggggcatgaccccagcttcctagggcatgaaggcaagcagaggagacctgtaagccccaggggtcctctccttaacctttacctcacggccaaagagccatcaaagaccatcgttaaaatagccctttacatttttatgcaaatgtgttgtgtgtccacacacacacaaacaatcttatttgatcctcactttagttctccaactactcttccaatgaaacaaccaaagctcacataggttatatggtgctgaaatggcaagttagcctggacgtttagtaaccagtcaagctttgctacagaagtcaagatggatgggagtctgatgccacaaaatctgtgatctctaactccagtcaggtcttcaagataccttggcagtcctcttacttgtccacagtcagttttcttttttattccactaccagtgattcccagctttcattgcttttttcaagctcctcattccaccactgatttgccttactctgaacatagctttggcgccccccttagttaagaaaatgaacattttcaagagagaactccattgacttttccccactccatgcgtttatattcatccaatacttatttatttgtctccattttgttggaaggattcatcccttctggccaagagtgaccgcttatctaatgttttgggatgccctctttagcaaccatacaacccccctttacccaacacatgcccttttctacctctctaatctcttatgctctattcattccttccctgcttataaacctgccaaaggctcttgtatgttaaaggggaaagatgtatcaatctatgttctaactataatcttatttctttgcttcctccagtcgatcctacctttccacctccctttcacacctaaccccactataattatgcttctgtcaccatcattctaccaaaaacactttcactgcagtcaccagtgactcccatttttccaaaatccaacttacaatttttagtacttattttccttttttttttttttttgagtcggagtctcactctgttgcccaggctggagtgcagtggcgtgatctcggcttaccgcagcctccgcctcccaggttcgagcaattctcctgcctcagcctcctgagtagctgggactacaggcgcatgccaccatgcctggctaatttttgtatttttagtagagatggggtttcaccatgttagcaaagtgttttcaagactcatccatgttgtgtcatgtatccacacttcattcctttttgtggctgaataatattccattgtgtggatataccacagtttgtttagctgttcatcagttgataggtaggcattgagttgttttcactttttgcctattatgaataatgctgccataaacattcatgtacaagtttgtgtgtggacatatgttttttgttctctggggtatatacctagaagtggaattgctgggtcatatggtaactctatgtttgactttttgaggaattggcaagctgttttccagagcagctacaccattttacattcctgtcagcagcatatgagggtgccgatatctccacattctttgtttttgtttttttgagatggagtctcactctgttggccaggctggagtgcaatggtgcaatcttggctcactgcaacctccgcctcccaggttcaagtaattctcctgcctcagcctcctgagaagctgggattacaggtgcccgccaccacacccagctaattatttgtttgcatttttagtagagacagggtttcaccatgttggccaggctagtctcgaactcctgacctgcagtgatccgcctacctcggcgtcccaaagtgctgggattacaggcgtgagccacacacccagccctatagctccacattcttgctaacacttactgacctcttttttgtaatagctagcttagtgggtgtgaggtggtatctcgttgtggttttgattttcatattcttaatggctaataccaagcatcttttcatgtgcttatttgctatttgtatgtctttatggagaaatgtgtattcaaatccttggcccacttttaaaatcaggttatttgtcttttgttgttgagctttaagagttttttaataattctgaatattagacccttatcagacacatgatttgaaaaatagtttctctcattgtatgggttgctgttttgctttcttgaaaatattctttgaagaacaaaagttttccattttcatgaggcatcatttatctagttttttcctttggctacttgtgctttaggtgctgtatctaagaaattattgcctaatccagggtcatgaagacttactcctggaattccttctaaatttttttttagttttaggtctttgttccatttttagtaaatttttgtacatggtatgaggtaggcagtctaacttcattcttttacatgagaatatccagttgttccagcatcatttgctgaaaagactattttttcccccactgaattgtcttggcactctaggaaatcaattgactatacatatatgagtttcattctagactttcagttctattccattcttctatatgagtttctttctagactttcagttctattccattcttctatatgtctatccttggccagtaccacattgttttgattactgtagctttgtagtaagtttggaaattgggaagtgtgagtcctccaactttgttctttttcaaggttgttttggctactctgtgtcctttgcatttccatgtgaatttcaggattcgtttgttaatctcagattgaattttgctagggattgcattgaatctgtatatcaatttagagagtattgcctcttaacaatgttaagtcttccaatccatgaacaggcatgcctttatctaaatattctttcatttctttcagtgatattttgcagtttttcagcatatgaaccttgtacttattttgttaaacttagtttttatactgttctaaactgaattgttttcttaatttctcttttgagttatagattactagtgtataaaaatacaattgattttttgcacattgatcttatatcctgcagacttgctgggctcacttatcagctcaattggttttacaatctcttcttaatctgtatttctatccatatcagtctcctgagttccagacctttacttccaaccacgtttggatgtttccacttagttgacctcatagagatatctctaacttaatatgtccaaaattaaagtcatccccttcaccccacttacaacaaacacacaagccaaccttttcccttctgcagtttgcgtatctcaggtattatcatttgcctggttgcccaagcctctaatatgagaatcatctttgattcctcactgtttcaccctgtatagtcagttagttctaactcctacgtagatctcaattctatccctcttctgtattgtcactaccctggctcaggtttttatcattcttctcctagaatatttcaataatttccttactggtcttgctgtgctcgttcttccagtgctttccttgcccccagagtaatccaattatatcagttaagatgagaaattactccaggccaggcacagcggcccacgctataatcccagcacttcagaaggccaagacgggaggttcactttaggccaggagttcaagacaagcctgggcaacatagtgagacctcattcttaaaaaattagcctgtagtcctagttactccagaggctgagtctggaggactgcttgggcccaggaggtagaagctgcagtgagccacagtggttgcactgactccagcctgggtgagagagagacctggtttc

SEQ ID NO: 61178 - DNA, 2471 bp, Homo Sapiens
aaaattatttaaatgtttaaaaatattgtttaaataaataacattcattgttgccaggtctccggcaagaatatgcagccaccacgtctcggcgcagttctggttcatcttgcaattctacaagacggggtacttttagtgatcaggaacttgatgcacaaagtttagatgatgaagatgacaatatgcatcatgcagtataccctgctgttaacaggttttcaccatcaccacgcaattcacctcgaccgtcacctaagcagtcacccagaaattcacctcgttcacgatctcctgctcggggaatagaatatagtagagtgtccccacagcctatgattagccgcttacagcaacctcgcctttcacttcaaggccatcccacagatttacagacaagcaatgttaaaaatgaagaaaaactaagacgcagtcttccaaacctgtcccgaacatctaatacacaagttgactcagtgaaaagcagcagaagtgactcaaattttcaagtgccaaacggaggaatacctcgtatgcaacctcaggcttcagccaataagtatccttcttatgctttcatgtatcagttatttaaagagaagtgaaaattttagatatttgttttatgctgaaaaaccgttttttatgctgaaaaaccgttttaaaccatagctatagtaaaatttagtgtttattagttgctggatgataatcaaagttatattacaatttaaaattttctatgtaggatacttgattctgccagtacatctgtctatacaaaactctggtctctccagaattttaaaataagcaaaatgtaactattaaaaaagtaggtgtagcttttgcttatagatactagaattagaaataaaaaccagtagagcatccaaaaatatatgtcccttagtacgtaaattttctttaataacctccactttaaaaatacctaaaagtttgattattacataattttagaatcatactcaaaataatccattgttcaaacctgcaatatattaaatctgttatcaaagttgaattgttgaagttcttttctttccaaaacaaaagtataccaggagaactcttggatgatctcattttatttctgcatctgttgagataagatttctggttttgatttgattttctgtgtttgttaaggctattttaatgaaaaaatacaatattgaatcaatatgtatgccaaattaattcatagtcctaatcctacttatagattaaaatttgagataaattgccagaaaccatcactttttaagaattgatcaggacttgtctctttaaattatctttcagaaaacaaattcttagagttaaagctaaactcttaaacagagaaggtgaattttagaagtatagtagaaagaacacatgtagattataatttttaataagttttggtcattgggtggttactaacccatgaatgtgacagtatttgtattcaactattatttgtaatagatacttgagtttttattttgtggcaagtagtatgttaaatcaatacaggcatttctactatagcacaaaatatgcactccttaaaaacctcacattctgcagtattacacaataaaaatgataggatgatgaggagtggagggaatagtcctggaacagaccactgaaaacccaagcaactttcttagaaagcattaataaaaacaataatgatactagcacagttaaattcatgttaaatctttattaaatactccaggagatatagaacttcatttttaaagaaagatttgaaggtaatgtgatggaaaggaaaggttgagactgttgaattaaggaaacatatgcagcatagacgaagatcagagagaatcatacagtaagatcatctaggacaaaatagccaaactgatccaagaagtagtgatgttggagtaaatgggcattgtgtatattaatgtacaagttgattttaaaggaatttcaaaaaattactttttagctaggatagatttgagcgtgtagtcaaaacggttttaaataaatgattacagttatttttatgatcttatgaacgctcagtattcatcccatgtgtttcacagctcacatcagtcccgtatatgagctctgagacacaaagggtgcatattcactggggtccttgtagggacacaagggatgcttattcactcagatccttgtaggtacacaatggatgcatattgtctcagatccttgtggcatattactatcagtggttgaagtggtagctgtgttatattctttcattttctcaaggctatgaagaagtgatacaaacgagtttgttgactgttcacttataacttgtttattaagcagttaaaaatttgaagatatttaacccttttttcattttcatctttttttttcttttttttttgattgagtcagggtttcactccagtctattgaaagaaaaaaaaaaaaaaaaa

SEQ ID NO: 61179 - DNA, 2110 bp, Homo Sapiens
ctgaattgggtattactaatagtagtgataaattccagggatcatctcaaataaacttccaggtctatagttctaaagattaatttaataactttaatagtggaggtaaatagaaatgattgacattttgtcacatggcattatattttgatttctcataattcataccacgcactattcttccccttttcatttcctcacttcccattcttccccttcatcttttatctatctaagaaattctgtctccaggctgccagagccataaaagtatcaccaacaaacaataatggcaataacagcaaaagcagttggaattacttctgctcatttacaggcatatgccacaaccacaaccaagacccaaaatatatgcttatttttgcaggtgcacttctattattctaagactttatgataaacattttaaaacataatttaggaattacccatcaaactccttttcttcagtgaagcagagggaacatattgctctttaaaggaatgaattcttccggagcatgctggtatttgtgatggttttgtttatttcaaagactaattcccacttcaaatagaattttcaggtaaagaactaatttctcttctaacatccttggaaactgggaactggaaattgattgacataagcttgcataatgagattgaacctaaatgcacatgcttctgagaatatgtgatgggtttgacattacttttaggaaccaagctcttgacccaaaaagccacttgcttgttaataacactcttatgaaatacacagaagttcattatcccttgggacttcaaatcaccctgcaaatacctagtcagtcattctgtgttgaagtcatttatttctccttagtttgaatagctagaatcagatctaaatgttctctctaaagaattgtttttaattgaagaaaataaacattcttttaaaatgttctggtgcattcttttaaatacaccagattctaatttactttgcatgaacaaagcgcaaatatcagaaatactaaaatctattttgaaagtttgcacatagtaagctagtccagaatctgaccagaaatacctattttttacctttattatttgataatgctggcagcatattaaaacagtccaatatctgatgagtggttcaaaactagcaaagtatacaattatctaatctgaaaaaccactttttattgattgatttgcgtggtttttcattctttgaaagtagagatcttgactaagacattcaatctgcgtagcagtcataaaatttagtatcccctttgtgacatgctgtgtgtggaagggttggggaggagctattgataatttcttaggacatcgagcacaaaccaggaccatcctgagcaaagtatatggtcagtatatacttaaagacagtttatagaagtgatgataaataatccaaagatggttctattgtcataaacttgagcaatttcccccccaacactcacttaattggttctctccaataaatattctttctttaaaagtttcaacaaagttttaaaggtctaacttttacttttgacttattcgttttgcctggaagcactaaggcttacagtctgtggtgactggcagtaagaatcaacatggttttcctttttctttttctccagtgaaaactatttccactttaagtcttctgcacacggcaattaatgagaggaaataatactccctgaccaaatcacaaacattctgtataatcatataagttacttttccaagctgcacaaatgatatgtttcacatgctgagaattgttaacaagtacagtactcaatacgcaatgttagaacttactttgtttaaagcaaatagactgagataaaatatctatcccctaaccccaagatgcttacaatcttcctagagttcaaggcttgcttataaaaacaacaacaacatcaacaacaaagcaataagaggcaatgaatggcaatacagataataaacaccagaaagaagttcgctgtaagttggtgtagttatggaaatgatgatctgtagttcgtctgagagagttgcaagattctaaacagagagctttttcaaaaaaaaaaaaaaaaaa

SEQ ID NO: 61180 - DNA, 2041 bp, Homo Sapiens
acagcaagatccgagccttcatcctccccaaggcagaggtgtgcgtgcggaaccatgtccagccctacatcccatccatcctggaggccctgatggtccccaccagccagggcttcactgaggtgcgagatgtcttcttcaaggaggtcacggacatgaacctgaacgtcatcaacgagggcggcattgacaagctgggcgagtacatggagaagctgtcccggctggcgtaccaccccctgaagatgcagagctgctatgagaagatggagtcgctgcgactggacgggctgcagcaacgatttgatgtgtccagcacgtccgtgttcaagcagcgagcccagatccacatgcgggagcaaatggacaatgccgtgtatacgttcgagaccctcctgcaccaggagctggggaaggggcccaccaaggaggagctgtgcaagtccatccagcgggtcctggagcgggtgctgaagaaatacgactacgacagcagctctgtgcggaagaggttcttccgggaggcgctgctgcagatcagcatcccgttcctgctcaagaagctggcccctacctgcaagtcggagctgccccggttccaggagctgatcttcgaggactttgccaggttcatcctggtggaaaacacgtacgaggaggtggtgctgcagaccgtcatgaaggacaccctgcaggctgtgaaggaggccgcggtgcagaggaagcacaacctctaccgggacagcatggtcatgcacaacagcgaccccaacctgcacctgccggccgagggcgcccccatcgactggggcgaggagtacagcaacagcggcgggggcggcagccccagccccagcaccccggagtcagccaccctctcggaaaagcgacggcgcgccaagcaggtggtctctgtggtccaggatgaggaggtggggctgccctttgaggctagccctgagtcaccaccacctgcgtccccggacggtgtcactgagatccgaggcctgctggcccaaggtctgcggcctgagagccccccaccagccggccccctgctcaacggggcccccgctggggagagtccccagcctaaggccgcccccgaggcctcctcgccgcctgcctcacccctccagcatctcctgcctggaaaggctgtggaccttgggccccccaagcccagcgaccaggagactggagagcaggtgtccagccccagcagccaccccgccctccacaccaccaccgaggacagtgcaggggtgcagactgagttctaggccagtgggtccctgactgctgcacatggcacaggccgttcccttccggacccaggcaggctcagctctggggagggcaccctggtctgtgccttgtgggtggaggcggggcagggctgtgtggcaccgccagggagcgggcccacctgagtcactttattgggttcagtcaacactttcttgctccctgttttctcttctgtgggatgatctcagatgcaggggctggttttggggttttcctgcttgtgccaagggctggacactgctggggggctggaaagcccctcccttcctgtccttctgtggcctccatcccctcatgggtgctgccatccttcctggagagagggaggtgaaagctggtgtgagcccagtgggttcccgcccactcacccaggagctggctgggccaggaccgggagagggagcactgctgccctcctggccctgctccttccgcagttaggggtggaccgagcctcgctttccccactgttctggagggaaggggaaggagggggtcttcaggctggagccaggctgggggtgctgggtggagagatgagatttagggggtgcctcatggggtgggcaggcctggggtgaaatgagaaaggcccagaacgtgcaggtctgcggaggggaagtgtcctgagtgaaggaggggttcccatcatccctccctgatattgtattgaaaatattatgcacactgttcatgcttctactaatcaataaacgctttatttaaagcc

SEQ ID NO: 61181 - DNA, 615 bp, Homo Sapiens
tgggcaaccgtggctgcgtgtgcactccagtgttgccaagggctggggatacggggggccagggtgggggtcagggagggtttccagcgcaggaggggagggctgtgcggctcccagcctttccaccagggcctggctggctggggctggggcggagggccccacggagctgcgaggctgcggacaggagtctgcggcctctagtacttagcgatgtcccccttcttcaggatgacctgtcgctgccagggcgccagcttgctctcatcgtagcccagcgtccgcagcttctctgactgttccttctcccgccgcagctcctcctgcttctgtcgctcctcctctttccttccgcctctgctcctcctcctcctgcatcttcagctgcatcttgcgcaccatcacctggcgcttccactcggggatgggccggccctgctcatcgtgcgtggggatgagagcctccacgtccagctgcactcccggcgcaggagtagtgggcggcacgggaaccaagcttccattgagcagcggctgaaaccccgcagctggcggtgtggggctccggactggtgacagtgcaggtgacacagaatgcagcggcgaatcgtgctg

SEQ ID NO: 61182 - DNA, 552 bp, Homo Sapiens
  misc_feature (518)..(518): n is a, c, g, or t
  misc_feature (520)..(520): n is a, c, g, or t
  misc_feature (522)..(522): n is a, c, g, or t
aatagcagttgtccagtggaattatgtgtttatttgtgtgattaggattctctctctctctttcattcttattctctgatggtgggggccatgttttcagtcacccctatatatccatagtacaacaacatgtcccccacaaaagactaattaaaagaaaaagaaactcaactatgtatgtgtgttcctctacgtatatgcatagggaaaatgtaaaaactagaataagtatccatttggtaagattaacagggatgctttattttcttctttttgcttctgggttttcaaaactttataaacggttattctgtaatcatgcaaaaattcaattaaaaatagatacacgttataacggattgaattgtgttccccaaaacggtgtgtcgaagtcctacctccagtaacctgtgaatgtggccctcttaagaaaaagagtctttgcagatgtaattaagatgtaagttatacagattagggtggccctaaatccaatcactagtatccttaaggaaaancntngagaccggcacaccccggaaggacccagcc

SEQ ID NO: 61183 - DNA, 560 bp, Homo Sapiens
  misc_feature (533)..(533): n is a, c, g, or t
  misc_feature (542)..(542): n is a, c, g, or t
  misc_feature (559)..(559): n is a, c, g, or t
aagtaggctgccaacttattcttataactcctctccatcataatttctgcaaggccattgccttatttttccctcagcatggctgctttacacagtgtggccagcagatgggagcacaagaaagtcaatctagatggaaaacaagttatagggataattggcaaagcctccctttctatccctctctaagacccctttttgcaaggactagaatgtgaagtacgtaagtgtaaagaagtgttcatgaatgtgttttaattcattcaaagaggtatttttaaagaaagatttcaaatacaagcaaaagaggagaattgttagatgaacataactgtccccagaccaacaattatcaattcgtagccaattctgttttatttctgtccctaggaatttgatcctttcaattatttattctctcaccataaatacttgtcagaggaagaatccacttcatagtttgcatcagaaaaggtatatgggacgtttattctttagcttttagatatactgggtttctaataaattttacnggaaccctnttccctaaaagaattcna

SEQ ID NO: 61184 - DNA, 551 bp, Homo Sapiens
  misc_feature (456)..(456): n is a, c, g, or t
  misc_feature (473)..(473): n is a, c, g, or t
  misc_feature (485)..(485): n is a, c, g, or t
  misc_feature (503)..(503): n is a, c, g, or t
  misc_feature (518)..(518): n is a, c, g, or t
  misc_feature (528)..(528): n is a, c, g, or t
  misc_feature (541)..(541): n is a, c, g, or t
ggttaaccctagctaaacctcataactccttaatgagaaagacactaataatctacaaataatattttacaaatgaaaaaacccaagcactaaaaagttatgtatcttgccctaggtcacatagcaagtgaaaggtcagaatcttaacactgctattctgaccacttgtaataccttctctaggcttaagataataaacaaattaagcaagggatatgtctttttatttttcccttttttgtttgtttgtttgcttgcttgctttttctttacgtagtattgctgtgctaggcacatgttagtatctcaacgaataatttgtattcagctttctattaagcacagctctctacaacctgcattgttaaacatttatagtcaacaacatgatgttaattatgacgacctgaagacattgcaagataatagagtcacttgaagcatcaaagaaagatnaaaatatggtcatctgngccctggactgnagaatattgatagggccngaacccggggaactnttggcagaanaaggcaggtcccnggcccacctt

SEQ ID NO: 61185 - DNA, 2543 bp, Homo Sapiens
agcttttcatgacaactttgtaatactttttttgtttgctgttatgaaatatctccttttgggtggggtggagaggggatgtcaggtagtatctgtggtaataggtgaagagatgatagctaatgtgaggctgttggtccatctggatttcagggaactcacctccccaccttgtgaaatattagagaaaattaccattactgttctcatgatgttaattatatcttctgaagttttagaggtttacatataaaccaaaccccaattaaggtttaagaaagtggcatgacttagtgcaaacagatgaaatgttgatttctttaaaagttgtcttaatactaatggatcttacaggtgttttcaagaaagttataagttttgtaagtataattttagtaaataaaattttgtaaatataattttgattttggacttttttttttccttccttacttgctgcatcaaagtgaacaaatgacaagtgaaatttttttgagtcttctgagagaaggaagtttataaaagcagatgcctttttctgtacttccaggtcaaaaattgtaggcctccattttaatatagcttattgttagaacaaggaaatttcatttaagacaagaaatgaagtcatagttacattctgtttaaaactaatagaattaaacattttgacataaataaaacaattagaaaactttacaaaataaatgtaaaaagaattcattcacaatacactgattattacagctatgttaaagtctacaattgaacacaaaatataaacaattgttatttaagggattataagtaaatttaataaattttctttacaaaatttttggtgagatatcttataagaagtagaggggtcagaaatcaaatttctgggatgcttattaagataagcttgaaatgtaattgaatttttaaattcgcattacaagtcataatagtagactattcggtaaatgtagggagtaatggtaggtaatagcaaagctaggtaatttgactctttttttttttttaagctcattttcaaatgagagactccatacacggagatagtagtgtcgaacaatgataaaaattctaggagttgttactatcttaacacatttatctaagcatttacctatgttgccttggtgcctttgactgctgacattgcaccctttcgtctgtttttaacttgtcgaaattgttgttataacatttatctgcctctgttcctcaggtatagctgtgaaaatagaaatggttcggggttaaggattgtgaatgggaggaagaaataatcctctcattattttcaatacagggaaagaggattatttgtaaccctgagcttttaccccaaaaggacataaagtataataggtgatctttgcttttataaatgtgaaccataataactactcttgggaaaggattgataggccctattttctacttgccttttcatccatttattttgtgataattcctctatgtttcctaatcatttgctctttgaaaaaagtgagagcttgtgatcagtcctgcacggaagccagtacacaatctaggtattagagcagtgcattgacagagaggctaccttccattttgtgcttccaagaggtggttgtaaataggaaagtgaaaattgttaaatgacaaaaattactttgaagtaaatttctctgcctgttttagaacttaactctagatgaagaatcagtatattttggggagcagtaatagtaagaccaaaaagcaacgtttttacagcagtgtcagaatatctatttgccaagtattatttccactttatggatggggcctaaaagccagatagtttgtttgacttgaaggtcactggttaatgagccttttattactacgtaggttttcaccggtgctgagcaagaaagcttacaaatctcctacctaaggcatgcttatatccgaaccattccaagatgaagaaaatgtacaatttaagcttttctggaagaaaggaaaacctcaacactttctgatctctctcagatcaatagcattttaaactaaatcttttatgcgaaaagttaattaaggcaactccaattcctttcttaacagaaatggttttacatcatcctccatgaagtaactaaccaaagacaggcccaccttcatctttctccttagtaagtttattgatcccagggctctttactcttacacgtccaattttaaaatgtacacgtggccgggcacagtggctcacgcctgtaatcctagcactttgtgaggccagggcgggcagatcatgaggtcaagagatcgagaccatcctggccaacatggtgaaaccctgtctctactaaaaataaaaaaattagctgagcgtggtggtgcgcggctgtaaccaaagctacttgggagtctgaggcaggagaatcacttgaacctgggaggtggaggttgcagtgagccgagatcacgccactgcactccagcctggcaacagagcaagactctatctcaaaaaaaaaaaaaaaaaaaaaaaaaaaaaa

SEQ ID NO: 61186 - DNA, 2294 bp, Homo Sapiens
tttttttttttttttttgtatatctatgtatcaggcaatgtactaggcactgcgtttgttaccaagataaataaaaatttatattaagatgttcaaaatttcctaggaaacacagacataggatagctataataagagaagtataaacacagccacaggagaatgggggtggggggaccgaagtcatttgcctaaggtacaaaactagcaattggaagatctgggacttgagatctgggtcttctgaatctagagtaagtcctctgtcttggcacagcaatataaccctcttagcttttccagagaaataaaaacaaaactgaaaaatattcactcaaaaacacatgcataaattgccaagtgggccaagtataaaaagactgtggaagcggtgatcaagaccaggatatgaaaagagaagataagacctggcagacaggaagacaaagaggcctcttccaacccaccctcgggctgttcttgggtttggatagttatgttaagatccacgcccccatagcaatctgactttgagttggaggcacaggaaacatgaatctcttgcggttaggctaagtcccttcaaatgcagcccaggtttcacctcccgttgaggccgggtgtgaggaattctccatttaggaagacgggtcttaggcgagtgggaggaactgcctaacaacagttgaagtaaatatgagggaagacacagcaaatggccagcttctctagcattcaaattcctccggtcagcaatttcttgcctcccttcctcccccaaatctgggtggaaatatgaagccacagttcactcccccgtcactcattctgatgacaaaaaagaagttgattccagcctatcatttcacagctgtttgcttccacttcccagcagacatgctctttgccgagggacttggttaaatggctctgagagaggcaccttcaggcagctcgggctcctggtggaggagggaagcctggggactgcagcccagggacgaggccactccctttgtcctttcgggcagggagggagtaatgggacccgtgccagtgatataaagtactcattttccactaaggccagggctttgtcctgggaagaaggagcaagaggtaaacacgaaacctgatttgcctgtgccatgtggaactacagaaccttgatgttgtccgggccactcctcccttcctttccactccttagcaggagaggctgagctaaaaaaaacccctgcttattcccatcctgtcccggtgcccctgtctacagccacagttgattggaccagcgtggacacctgacccaggctgggccaatcacatcctctctcctgcaaacgtggaaatggcgcctccaagaccctgagccgtgccaaactggagattcttcaccttcgctctatgttgaaattgcccaggaattctgaaaacactgtctatgaaaagggtcaaactctaaaatatttagagatttattatgagccaaatatgagtgaccatggcccgtgacacagccctcaggaggtcctgagaacctgtgcccaaggtggtcctggcacagcttggttttatacattttagagaaccatgagacatcaatcaaatacatttaaatacattgggtcggtccagaaaggcgggacaactcaaaggtggggagagggatggaggggaaggggggacttccaggctacaggtgaatttaaacattttccggttgacaattggttgagtttgtctaaagaaagccctgggattcatagaaagggaatgttcaagttaagatacagattgtggagaccaaaattctttcaaagtcttatagtggctgcccttagagacgatagatgacaaacgtttcctattcagatcttagttaatctctttaggtcaggaagaaaaagacctagctatgttaataaagtttctttacagatgcaaattttcccccacaaagaacagctttgcagggccatttcaaaatatggcaaagaaacacgttttggggtaaaatattttgattttctactttgtctcttaatgttatgccagaatcaggttggaaagtaagccagagtcaggttggaaagtaagtcaccatatatagggttaaataaaactcatcgatgagaatttataatttgtagggcatgactccccagactccttagataggaatttgggcaagataaaaaaaaaaaattagaatttagtcctcaacacaccacacacacacacacacgtgcgcacgtgcagtggccaggcatggtaaaaaaaaaaaaaaaaaa

SEQ ID NO: 61187 - DNA, 2529 bp, Homo Sapiens
agaaaagaggacagagtcattttgctcagaagaaacagcatgtgcaaatgtgccacaaccattcaaagcaagttgctgcttaagtcttgcccacaacttttcatctgaaaagtggagtagctgaagcagccaatgctggtggttataattcttgaggatgcaacagtaagaacggaaaggaaataacccccgaagcctttgcaactaaggacatgtatccttcagacaagtgtttactgggcaacttcttcgtgctgtaattgagtgtggccgattgctcacaaagatgtttgcaaaatccctcctgtcccctaactcacttctccttgcagtgtcactctgccaacttctcctgtcgattggtgaagactgtttctcctcccccttgaatatgggctgggcttgtaacttgcttgaccaatagaatgcagagaaatgaaatgcagccttcaacattcaaggctatgctcaaggagtctaaccctgtggatatgctgttgtcaaatgagggagcttcgattagcctgttgaagacacacagacgacccgacaggcaataccaacattcagatatgcaagttatgctgtcttagaccatgctgcccaggtgaacttttagacgactgcaatttgtgagtgactctaggcaagaccagaagaaacttctagctaaatctaaaccaaatgccaactcagaattgtaagcaaataaaacggttgttgtttaaagacactaacttttggggtgttttgccacacctcaatacataactgttacactaattatttttcattgtgaaatcttcagcgtcttattctgtaatcaaaccagaatgtccttgccttcttagcactttgccacagtccagtggggtgaatagacagcagctgctcatttatgctcatgctcatgttcataatttgcatttggactaaaaggagctctgttctccaggacagaactattctaaagctcttcaggaacaggaacaggagtccatcacagacagcgaaatcaaaagcgccctacatagaggcatccagactgagagctgaaagggatctgggaaatcatttagtctcactccctcattttccattcagaccacagggatgaaagaacttgctgaagttctcaccgctctgtagtggcacagtcagaacaaggatcccaatctcctaactactaacataaaatgctttcagcatgcaagttgagcatacaatgggacagtttaaatttaaatggtgttttgagcaaggggagagtctaattaattacttcaaagtataattttggagtcaccagaaaggcgttaaagacaaaaaaatgctttggaacctaggtgcttcatatctgaaattggggcaggtacaggtgtattcctaccactaaagggtcattagttggttgggtagtcctttagtgttcttggtactaagcacaaaacatgggtaagatggttcaaggctggttgtggtggctcatgcctatagccccagcattttaggaggccaaggctggaggatagcttgagcccaggaattcgagacaagcctgggcaatatcgcaagaccttgtctctacaaataataatttcttaagaattggctgggcatggtggcacacacctgtaggctatttgagaggttgaggtgggaggattgctttagtgtgggaggctgaggctgcaatgaggtgatcacactatggtactacagcctgagaaacagtgtaagatcctgcctcaaaaaaaaaaagtttatgttctcaaagtgctcataatctagtggtagtacagtatttgagatattagagcagtttctcctccttttgcaactaaggacatgtatctttaaagcagaaggaatggcagagtcgtgtaataaaccctcaagtaccattacttagcttcaacaactatcgacactctactgttcttgtttcatttatgcctcacctccttcccatcccccacttgaatattctcatcctttttttttacagtttttaagataacaattacataactgaaatgcacaaatcttagctgtacagttttgacatatggatacacctgtgtaaccaatgactgtatcacaacatagagcatttcatctccccagcaagatccatgtgtcttttcctagttaatgcctctttatttctgagatggttattgctctgcttttgtttttcatgttaggctagtcttgcctgttctagaatttcatataactgagaacatacagaatgtactcactagtagtgtctgactttttcacaaaggataatgtctgtggtattcattcatgctgttgtatgcatcagtagtttattttctttttactattaagtagtgttctaaggactattttaatagcatcccacaaagggggtatgatatgttctatttacattattatttggtttgtaatattttatattttctcttgtgatttctcctttcactcatgaattattataataaattttttaaagtgtattataaaaaaaaaaaaaaaaaa

SEQ ID NO: 61188 - DNA, 2763 bp, Homo Sapiens
gtaaatgtccctatcattctttgagtttaatcttaacataattagctcctcgcacaatagagtgtttaatttgaaatgctgccaaggctcattaagtgagagaagtacttcctgagatctctgttgttaaatttgggattttttgtatgagataattttctcaagaagtgttagggtatcagaattgttgttcatattctgacatttatcacccaaactcactgaaacacttaacattttctgttttattgatggagccttttattaatattggggaatttgctatgtcacatggaaagaaattaatttccgaagtcttgacaagcgttctgagtgataggtccatttgccctgctgtgccttccccacacaatagcgatagtaaatatgagctggaaggatttatatgagctggtaggatttaattcttctatctcttcttttgggttctgtttgattattgatttctgagtcaggataagcaatacaaaatgtgaacaccagtgttttgttgttgttgtttgtttttagtttgcatttctattttggcttgacttgacatctccccaggttgtttttggtttgtttttgtttttcattaagacaggtagggtatcgctctgtcacccaggttgcagtgtagtggcaggatcagggctcactgtagcctcaacctcctaggctcaagccatcctcctgcctctgtctcccaagtaactgggactacaggcgtgtgctaccatgcctggctaagcttattttatttttttatctttagtagagatgaggtcttactatgttgcccgggttggtctcgaactcctgggctcaagccatcctacctcctctgcctcccaaagtgcttgcattacaggcataagccactgtgcctggcccccaggtgtataaaacacaatagaaccgtcctatatttttggaatgagagtacagaatattttaatatgctttgatagtttattacatgtatcaactgacatggttttactagtaaggcgtcttattttataagatcactaacctgtgcatactagaattccttggtctttgtaagtacttctatatattaacaggaggtaaatctaatcgagtataaaaaactgaaaagtaatgattattaagaaccaatataaatttactaggaacaaatcctgtgacattaaccccatttccttttttgataagtaatgaaccaaaggtgtaaaaattgctcagaaaagtcattggacagtgtgagctgcaggactataatgctgttcactttacatggtgatcagacaccctgagtgttgattaccaaggcaataaaaacctagagagacagatttcttgctatgcttctaggctgtgtttttctctgcgtcctcacgatcagctcatactgcaatattagagcagttttaagtcttctgatataggaacatgggagtcttttcccatttatcgaggtcttcttttctttctttctacggttttctgtagttttcagtgtataattcttgtattttgggggataaacttattcctaaatattttattctttttgattttttttaaacgaaattgttttcttaatctcatttttaggttaaatgagattaatccaaaaactgaattttattcagtcatatgttacttaatgacagggatatgttctgacactttgctcaattagtttattggatctaatagttgtttagtagattttaaataatttctatatacaagagcatgtcatctgtgagcagaggtggttttaattcttcctttgcaatctatatgccttttattttttcttgcctaattgctgtaactagaacctccagtgcagtgttgaatagaatagtgagagtggacattcttgctttcctaatggattttagggtttatatccttctactatctgtatgtatatttttatcctagctcagctccgtatggtgctttgtataagcctttacgttataatgaaacaaatcaaaattccttttacaactgagaatgtcaaaaactgaaccaaggattgtcttcactacagcctatggtttttcacatgaagtattcacttcaaaaatgacctagtgatggttcctttgacaggtccctttgtatgcagctttactgcattctgtcatgagacagcaccactagtttttgattccagtaatacaatgtcacatctggcagggatttttaaattcatctgtttatcacatatttattgagtgcttatcaaataccaggcataattgatgttctggggaaataacagttaataagaaacttagagtcttgctagaggctgacagattaagaaattgacaaatgtaaaatttttagactatctccccactgctaccttttctagaatttgtattttagaatacatttagcaacggaccggccgtgcacaatggctcatgccgcacacaatggctcatcccagaacttcgggagaccaaggcaagtggattgcttgagctcaggagtttgagatcagcctggccaacagggtgaaaccccatctctacaaaaaatacaaaaattagctgggtgtgttggtgtaggcctgtggtcccagctacttgttgggggcgctgaggaaggaggattgcttgagcttggaaagtcgaagctgcagtcagctgtgtttgcgccactgcacctcagcttgggtgacaacgcgaaccctgtctcaaaaaaaaaaaaaaaaaaaaaaaaaaaaaaaaaaaaaaaaaaaaaaaa

SEQ ID NO: 61189 - DNA, 2315 bp, Homo Sapiens
aggcgctgcagcaggaacaggagattgagcagcggctcctgcagcagggcacggcccctgcacaggccaaggccgagcccaccgctgccccacaccccgtgctgaagcaggcctccagccagctgtcccggggttcggccacgacgccccgaggtgtcctgcacacgttcagtccgtcacccaaactgcagaactcagcctcggccacagccctggtcagcaggaccggcagacattctgagagaaccgtgagcgccggcaagggcagcgccacctccaactggaagaagacgcccctcagcacaggcgggacccttgcgtttgtcagcccaagcctggcggtgcacaagagctcctcggccgtggaccgccagcgagagtacctcctggacatgatcccaccccgctccatcccccagtcagccacgtggaaatagtgcgagccaggccccgtggaagacgggctccctcctcccccacctggcccctggtctagaaggacccactgcaccaccctccgctggctcgggaagacaccgtgcccgccccaagagcaagcaccggccatgctgcagaggcaagacctcaattcttggctgcaaagtttcatcagggctagggggctggtgccgcctcataggcagacgaggatcatcgctgggggacctttcccgtgggctttcttcctttctctctttgcctttagtttgcccgacaccagcagaaaagtggaccttgggggctggttctgctcctggcccccttgttcagcccctgccggcacacgggcggctcaccctggacactgtgatgcgcatgggcaaggccagcgcccggggcttctgaaccgagcggggtgtttcatttttttgcttttccctgtcttaggctcccaatctttgactgccttcccatggcgatctataagttgaaagatttttttttttttaatcacctcatgatgatggagttaaaagtaaaccgtgcagaccctggggtccctgttgtacgctgcatcatcccgctggccctgtgccctggagggtgggcggctcatggtgccacagcccctggcagggacggccggcccgcccccgtgactgactgacagatgcagggatggccgaggcagccctcgctccagctgaacgcctccattgctgcttgttctggagacccccgcccccgcaccttccagacttagcagaagaacaaactgaagaacagacccagccagagaagcagggattccagaagctgcccattaagggagaaggagaggatccggtcggcagcagccctgagcagaaagctggaggggggactgtcgcggggtttttctgttgtggtttattttattaaatttttccttttttctattcatttcgatggacgcaatcttaagccaccctggccttgctcctgggaaggtgagcgtgcacaggtgtgtgcaggtcaggaggtgccgtccaggtgtgcggcgagccgctgcgcacagatgtcaggatttccgtttgggtctagtttagaacctgtccttaaacctaggggttgctgtcaggatttgctttcagactttttttttttgtaattccctttagagtctacaaaaatgtttttaaaaggatcaggtctgcttttagtttcatttttgtttctttcccgtcccactctttaaaaactggttccgtgaggaaaggcagaagccgttccgtgtctcttgcaggctgggccggcttcatgccagtgcgagggcgtcccgtgcccacgtacatacgtatgtctccatgagttctgggctccaccggttccaattgagctccagccctggttttcctacccatgcagttagggactttaatttaatttttttttgtagggccaccgccttcaaacacaactgctacaacattctaataaaggctcatttaacccccaggctcctgtcgtgtgaatatcctcagtctgtaggaaactttttttgacacagcatagaagacctagttttggaaaacattatctaattttttgttgtgcaaatccccaaatttctcactaatttttgtttttttgtgcataacttggatgggctgaaggaggtgaggacagattggggaagggtggctttcattccaagatccagggatttggggaaaaggaaggaatttgatgttttttggggtgggaggggagggtgtgttttttacaccaaaaaaaaaaaaaaaaaatcaagagtatgcaagcatttctattcctcgcatttttctgtgtgcctggcaaataaatacctgtctcctacgaaaaaaaaaaaaaaa

SEQ ID NO: 61190 - DNA, 500 bp, Homo Sapiens
  misc_feature (324)..(324): n is a, c, g, or t
  misc_feature (419)..(419): n is a, c, g, or t
  misc_feature (466)..(466): n is a, c, g, or t
  misc_feature (482)..(482): n is a, c, g, or t
  misc_feature (498)..(498): n is a, c, g, or t
tttcagagcaacaaaaataaaagcttttatttgttcatttgaatataaaacaggcgttatcacagatgtacaaagcgtactggtggtttaacatacaagaaggttgctgtcctttgcacataaaaattttgtttgaaactgtggctggttgagtacatgagtttctctaaccagtcaccacactctgaaataacgctgctaacattcaactgataaaagggaccatctcccttgggtaaagtgtcaagcaggattaaatatatataataaacaagcaccatgaaggaatctgctcctgtttgattaggtctgtgtttatatgtnactgtgtaccctcctttttgtgcaagttgatttacacggttttgtctggacttcaaaagcacaaggtcacaagacaaacatttttttaccaatcnccatggaatggatttaatctacagtacaattttggataccggatggncccttccttaattgcnggaaacggggggtacnaa

SEQ ID NO: 61191 - DNA, 1885 bp, Homo Sapiens
gatgtgaggacacatagagcatgccatctatgagaaacgggctctcatcagacactgaatctgctggcacgttgaccttggactttccagcctccagaactgttcccatagaagaaatggtttccagaatgcagaagtggtccatgatgccagatgttgcagaaagagcaaataaggagaaaaagaatcctgcccaggaggcctcccaccccgacataggagggcaccacccacatggcatcagcctgcagctgatttcatattccatgctcatgacatagtaccttataggacatgtcacaactcacgccttccccttatccgccatcggggatagaacagaaagacataagcaccggcatgggcctattccacagccaaggcaggcaatgagctctcaggtacttgcaacaaactcgagtgtgcattcggtccaggaggaagagcccgcacccttttttgttgctgttcagtgttaatccttcggtggaacccaccaggacagcagtctcagtgctgttgtttttgacagggagaacatcccagggcagaaaggaaagcctaaagctacagcctgttcctctagttcttagaacagctggttactgagctctcaggccagacactggatcccggagagcttgtccactgcaacagtgcaacacgctaagggctgtgtggcggcacaggggctctgagctcctgacctgagtcatggggacctgaaggctgacacccagccctatacctacaagctgggtgagacccctggcagttgcctacacgcctgctgagacccagtaccttcctgtaaaatgggggaaataatgcctgcctcacagggtttcgatgaagggaaacatttggaaaccccttggaggagatctgccacatggcctccagtgaactgtagactcctgcatagccttccaaagttcttcatttggtgaatattatgagaaatgacacgtatgactttctcccaaatacgtggcttaaacccaaagtacagtgaaatcagaactgaccacacagagtaattggggcaagggagtatttgtgacacaaagccctcatcactttataaaagtacttgctactgattacattgaaaaccagtcttcctgagtaaaacatgttttttgttttgtatcgtttttgtttttgtttttttgagacagagtctcactctttgacccaggctggagtgcagtggtgcgaacttggctctccgcaacctctgccttctgggttcaagcgattctcttgcctcagcctcctgagtagctgggattacaggtgcccgtcaccacgccagtctaatttttttgtatttttagtagaggcgaggttttgccatgttggccaggttgatcttgaactcctgacctcagatgatccacatgcctcggcctcccaaagtgctggggttagaggcattaagggaggagaccacccctcatattgtcttatgcccaatttctgcctccaaagaaagaaaaagtaaaaactgaaaggcagaaatgaaatccacaagcagacagcccggtgccacaccctgggcagatcgacccctgacctaatcggttatgttatcgattacagacattggatagaaaagcactgtgaaaatccctatcctgttttgttcagatcgaattaccggtgcatgcagcccccagacacgtaccctctgcttgctcaatcgatcacgaccctctcacacgcacccccttagagttgtgagcccttaaaagggacaggaattgctcactcggggagcttggcttttgagacaggagtcttgccaatgcccccagccgaataaaccccttccttttttaaaaaaaaaaaaaaaaaaaaaaaaaaaaaaaaaaaaaaaaaa

SEQ ID NO: 61192 - DNA, 5275 bp, Homo Sapiens
cccgccttagcatgctggccgggacatctggtgaacatggcctctgctactgcggcagcagcacgacggggcctcggccgggctctccctctcctctggcgtggctaccagaccgagcggggcgtttacggctaccggccgaggaagcccgagagccgcgagccccagggcgccctggagcgccccccagttgatcatggccttgccaggttggtgacagtatattgtgagcatggtcataaagctgccaaaatcaaccccctcttcaccggacaagccctgctggagaatgtgcctgaaatccaagccctggtgcagacactgcagggacccttccacacggcaggattattgaacatggggaaggaagaggcctcacttgaggaagtgttagtctatctcaatcaaatctactgtgggcagatttctattgaaacctcccaacttcagagccaggatgagaaagactggtttgccaagcggtttgaggaactgcaaaaggagacgtttaccacagaagagcgaaaacatctgtcgaaactaatgctggaatctcaggagtttgaccactttctggccaccaagttctcgacagtgaagcgatatggaggcgaaggggctgaaagcatgatgggctttttccacgagctgctgaaaatgtcggcctacagcgggatcactgatgtcattattgggatgccccatagagggaggctgaatttattgacaggccttctgcagttccctccagagctgatgttccgtaaaatgcgaggcttaagtgaatttccagagaatttctcagccactggagacgtcctgtctcacctgacctcctctgtggacctggactttggggcgcaccatcccctccatgtgacaatgttgcccaatccctcgcacctggaggccgtcaaccccgtggccgtgggcaaaactcgcggcaggcagcagtctcgccaagacggcgattactctccagacaactcagcccagccgggggacagggtcatttgcttacaggtccatggtgatgcttctttctgtggtcaagggattgttcctgaaacattcacgctgtccaatctcccacatttcagaattggtgggagtgtgcatttgattgttaataaccagctgggttacaccactccagctgaaagaggaaggtcttctttatactgcagtgatattgggaagcttgtgggctgtgccatcatccatgtcaatggagacagcccagaggaagtggtccgtgccacacgactggcttttgaataccaacgccagttccgcaaggatgtgattattgatctgttgtgctacaggcagtggggccacaatgagctggatgagccattctacaccaaccccatcatgtacaaaatcatcagagctcgaaagagcattccagacacatatgcagagcacctcattgctggcggactcatgacgcaggaggaggtgtctgaaataaaatcctcctactatgccaagttgaatgatcacttaaataacatggcccactacaggccccctgccctgaacctgcaggcccactggcagggcctggctcagccagaagcgcaaatcactacctggagtacaggtgtgcccctcgacctcctgcggtttgttggcatgaagtctgtagaggtgccaagagagctgcagatgcacagtcacctgctgaagacacatgttcagtccagaatggagaagatgatggacggaatcaagctagactgggccaccgcggaagctcttgccttgggttctttacttgctcaaggttttaatgttcgtctaagtggccaagatgttggtcgtggaactttcagtcagaggcatgcaatggtggtttgccaggagacggatgacacctacatccccctgaaccatatggacccaaatcagaaggggtttctagaggtcagcaacagccccctgtcagaagaggccgtcctgggattcgaatatgggatgagcattgagagcccaaagttactgcccctgtgggaggcacagtttggcgatttcttcaatggtgcccagatcatctttgacacattcatctctggaggagaggccaagtggctcctacaaagcggcattgtcatcctccttccacatggctacgatggggctgggccagaccactcatcctgtcgaatagagcgtttcctgcagatgtgtgacagtgcggaagagggggtggacggagacactgtgaacatgtttgtggttcacccaacaactcctgcacagtatttccacttgcttaggagacagatggtccggaacttcagaaaaccactcattgttgcttcccctaagatgttactcaggctcccggcagccgtgtcaactcttcaagaaatggcaccaggaacaacatttaacccggtcattggtgattcatctgtggatccaaaaaaggttaagaccctcgtgttctgctccggcaaacatttctactccctggtgaaacaaagagaatctctgggggccaagaagcatgactttgccatcatccgagtagaggaactctgccccttcccgttggattctttacagcaagagatgagcaaatacaaacatgttaaagatcatatttggagtcaggaggaacctcagaacatgggtccgtggtcgtttgtttctccaaggtttgaaaagcagctggcctgcaagtcaaatttttagaagttatcaaaccattctgtgcagttctaccagaaattcagaaaccggaaaggaaaatccagtttagagagaaggttctgtggactgctataacgctcttcattttcttagtgtgttgtcagatcccactgtttggaatcatgtcatcagattctgcagatcctttctactggatgagagttattctggcttccaatagaggaactttaatggaattgggtatctccccaattgtaacatctggtttgattatgcagttgttagctggagccaaaatcattgaagttggagatacaccgaaagatagagctttattcaatggagcccagaaactgtttggtatgatcattaccattgggcaagccattgtgtatgtcatgacggggatgtatggggaccctgcagaaatgggtgccggaatctgtctcctgatcatcattcaggtaagaaatcctatattttcctatgcagataacaaaacagtttgattcctttttccttttctaacagttctttaggtgattggcttattcattttcttacttttgaattatttaattctagtattttgatcactgaagtgatacgtgtaaaatttttttaaaaccttctgtcaccgtgacgtgttcaagttgtgttgacgtgaaaaattcaaatttattctaatagcttcataactgcacaatacaaagaattatggatcaattgtattttattgattcttaagatacacatttgtcacattttgatgtctctagaatcaggatgtttttgtacagtaaacagtgccttccacttgcggtctgccaggaggcagtcatggtggtgtcactgcctgtgcgtgtgtcagcctgttcaggtcatgctgaccttagttggctgagtgtgatcttcacagaatgggtgtttgagttcaatcgctgtctaaaggtgttcagaaaatctgttgtgatttgttattgaaatgaaagtttatgtatagaagggcaagctagatgataaatatctaccactaggtctaaaatacgtttttgtaagtagaaaattaaaattctttgcaataaggtattgtgccataagttaattggcagtattcttttcttagtagtacacaaaataatgatgttttacatggtaatgtcttagagtcagtgaaacactgtttatacacacataaatatattccatgggttttttaaatggatgcttaggaatggaatttttaaaggtcaacataattattagtgtcctaagtatctttttttttttttttttgagacggagtctcactctgtactccagcctgcgtgacagagcgagactccgtctcagaaaaaaaaaaaaagaacataatatgtgtattgtgtctcatgtacactgttgaagaggtagcagcccatgattgatgaaatagtccagtgatcttatgagatacaagtttgttttcatgttctctctctgacattgtctatgcttagttattgtgttcatgcttattccttcatggtccaagttggctgtcccacctccaggcatcaaaccacattccaaacagcaaccaggaggaaatagtaagctgataggtcatggggaattaggttggaagccattgctttttaatttacagaagtccattctccccaggcacttctttctaagtctcattgatcagaactcaaccacgtggccaccatcagcagaaacatctctctgtagcaccgtgaaacacatgagaacataactggggatgaccgttgttacttgaactattttgaaagatctgacataaaggtcatcgccttgtgcacttcaatgggtgttactgcaaaactcccagggctaggcatggcgacatacacccgaaatctcagctatctgggaggctgaggtgggaggattgcttgagcccacgagtttgaggctgaagtgtgcctgtgaatagctactgcactccagtgcctaggacacatagggagacctcacttttttatggctgcatagtattccatggtaaagaaatgtaccacattttctttatccacttcactgttgatgggcatttatccacttcactgttggtgggaatttaggttgaatccatgtctttgctattgaagtcacactttttaatcaagttatttaactttcctgtgttcatttgtgttatataccagaacatttttatttctatggttttaatgccacctaatatgattatcaatgtgtcattctccataaatcattgtgttatacatgttaaacgattaggtattaagtgtataggtataaatcacttagaataatgactaacacattgtatgaactaaataagtactgattcatctgattcatcaaatttccattattcataccattcattatttattaagtggtgtagtatttgttcttatcaacatttgcttttctgtcctatctaaatattaatgaaacagtggatgtgggctcagtgtgctgtcttgaaataatccaaagtcaaatggcatgcttcactggtttcctttagatgcaataactcatttgactcacacaataaaaatgagtattaagt

SEQ ID NO: 61193 - DNA, 1713 bp, Homo Sapiens
gtacagacggggtttctccgtgttggtcgggctgatctcaagctcctgacctcgggtgatccacccgcctccgcctccctgggtgctaggattgcaggcgtgagccaccgcgcctccggcccaatttagtaaccagaaaggaatagatcggcctggcgtggtagctcatgcttgtgatcccagcactgtggacggccgagcgcggcgatcgattgagcctaggacttccagaccggcctgggcaacgtggtgaaacactgtcttttttttttttttttttttttgagtggagtttcgctcgttttgcaggctggagtgcagtggcgtggtctcgactcaccgcggcctccacctcccgggtttaggtggttctcctgcctcagcctcctgagtgtctgggattgcaggcatgagccaccatgccagctaattttggttttatttttttggtacagacggggtttctccgtgttggtcaggctgatctcgagctcctgacctcgagtgatacgcccgcctccgcctccctgggtgctgggattgcaggcgtgagccaccgcgcccccggtccaatttagtaaccagaaaggaatagatctgcctggcgtggtgcctcccccttgtgatcccaggactttggaaggccgagtgtggcagatcgcttgagcctaggagttccagaccgcctgggcaacatggtgaaacccggtctctgttttgagacggagtttcacccttgttgtccaggctggagtgcaatggtgtgatctttgcccaccgcaacctcggcctcccggatttaggtgattctcctgcctgggcctccctagtagctgaggcaagaaaatcgcttgaacccaagaggcagaggtcgcagtgagccgagatcatgccattgcactccagcctgggactgtcccctgacaggcagtgcgacgaggtcaggcccgcgcccgccgagtcctagggccgctgccgccgacggccatggaggacgagcagctcgacagcctggagggctgggcgccggtccggcaaggcctcttcgccgatcccgagaggcaccggctgcgcttcctggtggcgtggaatggcgcggagggcaagttagctgtgacttgtcacgacctcaccgcgcagcagccgcagcggcgcgagggggcccggctggggctggagcccaaacccaaggccgctgtggtgcattggccgggaaacgaacccgggcctcccgcgtggcccccccccctggcatggctttggaatgtacagaatcctcagtgattattggttatctgattattattactataatagaagcctggcttgctgctgcccgtcattgacttactaaatacctgtgaaaggaaagtcagcaaaaaaaaaaaaaaaatcagattccacaaaatgagttggaatatattatgtagaattgaaaggttcactgaagtataagtttagcaataagcacaacaggggtagtccccacaaaattagaagcttcctgaggtgggagcatctagttgcttgctactgatgtccaatgctaagactgagctgagtattcgtggagtgggatgggttgaaatggcccagaatagttgcagcgattgcactgtaattaaaaatgtctaattggagctataggaaggcaagcagagactggcttcttcagcacactcatacaactgggctagctccaacattaaaact

SEQ ID NO: 61194 - DNA, 2806 bp, Homo Sapiens
caaaaaaagcccacaaaaatcagtaactcaaccccttttacaatagctgcaaaaaaaaaaaaaaaaaaaaggaatacctaatcattaagcactttggaaacaaattaatattttggaaagtattcagatttttttcctctatgtgaaaggtaaatcatgataaatttatttcttcttttgtctcttgggtcaagaaaagcactaatttaatgtcttctattagctgtatctttttttctgtcaccccagttttcatttcaggttaattgaagtgtgggttttccaaattggtttttgcttaggctcagtaaagttgatccattagctctgaatttctttctatacatacttcgaaagctagagttattgaaaggagtaattttttccatttaaatgtactttgcttattatttcccaggttctgatagcaatatactgctcagtgggaaaagatttctcctgtgattgactgttcctagcactgtgtttaggaaatttctttcaaatttttctcttaatatttttctagtgctgagatcctgtggtttgaaggacttttatttcagagacataggccatgcttagtggagactcattcacaatggaaacaaagcttagatgctgattatccaaataccccattttgaatatgagacttcttactgaaaggacaatttggagagatatatggtcaaatgactaggctaaatttatctatattcatttcctaaacaatgtaggtaaattgcacattttaaaatattccagcatctcaaaacatggcacctaccatcaatatttctaataatcattcacttgttcagcacatatacagcacttaaccacatgaatgctttgtaaaagtctaggggaacatgagaaataagtcagacacagtccctgttgtccccgtttacaatctactgtgagacacagataattaagaaggtgattataatcatgtgggaaaagcagttcttactgtagattcagacaagagattctagattttcaagggatctacatctcaaacccaaagaagtaaatccctcaaagtgctgggattacaggtgtgggccaccatgccaggcctattttttgattttttggttatggccattcttccaggagtaaggtggtatcgcatcgtggttttgatttgcatttccctgattattagtgatgtcgagcattttttcatatgtttgttggccatttgtatatcctcttctgagaaatgtctattcatgtccttagcccactttttgatgggactgtttggttttttcttgctaatttgtttgagttcattgtagattctgggtattagtcctttgtcaggtgtatggattgtgaagattttctcccactctgtgggttgtctgtttactctgctgactgttccttttgctgtgcaaatgctctttggtttaattaagtctaaactatttatctttgtttttattgcatttgcttaaatgggttcttggtcatgaaatccttgcctaagccaatgtctagaagagtttttcctatgttgtctctagaagttttatagtttcaggtcttagatttaaattcctgatccatcttgagttgatttttgtataacctaagagatgtggatccagtttcattcttccacatgtgacttgccatttttcccagcatcatttgttgaatagggtgtctttcccctactttacgtttttgtttactttgttgaagatcagttggctgtaagtattagggtttatttcttggttctctattctgttccattggtctatgtgcctatttttatgccagtatgatactgttttggtgactatggacttatagtatactttgaaatcaggtaatgtgatgtctccagatttgttctttttgcttaatcttgctttggctgtgcgggctcttttttggttccatatgaattttaggattttttttttctaattctgtgaagaatgatagtgatatttggaggggaattgcattgaattgtagattgcttttggcagtatggtccgtttcacaatattgattctacctatccacgagcatgagcttggggtgtgtttccatttgtttgtgttgtctatgatttctttcagcagtgttttgtagttttccttaaagatgcccactgtcaccactcctcttcaacatagtactagaagtcctagccagagcaatcagacaagagaaagaaaaaaagggcatccaaattggtaaagaggaagtcaaactgttgctgtttgccgatgatatgattgtttagctagaaaaccctaaaggctccttcagaaagctcctggaactgataaaataattctgcaaagtttctggatacaaaatcaatgtacacaaatcagtagctcttctatacaccaacagcgaccaagctgagaatgaaatcaacaactcaggccgggcattgtctctcatgcctataatctcagcactttgggaggctgaggtgagcagatcacctgaggtcaggagtttgagaccagtctggccaacacggtgaaaccctgtctctactaaaaatacaaaaattagcggggctgtgatggcgtgcctgtaatcgcagctacttgggaggctgaggcaggagaatcacttgaacccgggaggcagaggttgcagtgagctgagatcgtgccactgcactccagcctgggtaacagagcgaggctccatctcaaaacaacaacaacaacaaaacaacaaaaaaagcccacaaaaatcagtaactcaaccccttttacaatagctgcaaaaaaaaaaaaaaaaaaaa

SEQ ID NO: 61195 - DNA, 1843 bp, Homo Sapiens
ctttctaagttgcgggcgtcagcccggcgcctcgaacctgcagctcctccccgcgggctgcttctgagttcctgtggattccgccttcagggattgcgagcccggttggccctcgcgcgagtcacaacctctgaatcagcccctgaggattccccgagcgcgctgaacgcgcctggcacgggagctgcccctttttggcgttggccaaacccccgctgctccgtagccttgggaccctgggcgccgcgttgcccgtccggcgcgtaagcccgagcccctctcctgggcctcccgcgccctgccccctagcgcgccccccgaacgcctccgcctcccggggtccgctccccgccggggcctcgagaaggaaggtgtcacgttggtggcattcgagccagccggcaagacgaatgtccgggttgtcacttttgagaaatcccagccagccagagcaggtagccaagcagcccttcgatagctgttctgttagtgctgattcgactgttcttggagactcataaatccaatttggcagctgttaggtttgctgggattgacagtgacgcgtgtgaaggcattaaatgtgatgatgtatgtggcaacgctgtgtaaacagcagagctgtccacgattttgagggaattggcagtctgttttcagtggcggggaatgtgtcaacctcggtgcgtggcgttattaaaaactgtttccagcccctagcctttgataaaccaggtaagctggagtggcgagaacattaagtggaagtgtttagacaaacacagacgtttaggagaaataatattctaggttcatggacaatctggaaactaagttcgttttgaaatgaagctgagagcagagcgggtttctcggctttggtggatggcccttgggaaccagagcgggcataggaaggggttgccctgagtaccagtccccggccggtagctgcggggggtgtgcgggaggtgaagcctgctgagactgagaagccaagtcccgctaacgttgtgcccttcccaggagagggcctcgccgaggacggatggggctgggaacgggtgggcctatacatagtttctgcccgttattgtttatacctcttgaaaggatctgtgttgaatgggatttaattttaggacaagtaatgcatttacatggtacagaactccaattctaaaggtgcacaggagtacgtgcagaaaagttggtctcacagtctccaagtgtccttctctagaggcaactactcttcccagtttcttgtgaagccttctagaaataggctgtgcatgcatactatatatactatatattctctaccatacacgtgcgagtagcacacatgttgttttgcacatttttccgttttcatagtgtttcttattagaatgattgttctgagtcggtgcatataagactggcttacttgattttaattactgcttaggccaatgtacatacggttttatgaataaaaccattaacaagtacgtatggatttaaatgtttatgtagatttgaatgttttttaacctatttagacagtccctgttgatgaacatttgggttttcaatcagaaggtttgtgacagcaaagtcattggaataaatctttcttcttgatggagatgaaatatgtggctagtcttcgtgaggcagtcaccaattaatcaacttcagaaaaatagaaccaagcagaatactgaggaggggtgcgttacaggaaataaaaatgctatcagagggcaacccgctctggtccccttccacgctgcggaagctttgttcttttgctcttcacaataaatcttgctgctgctaaaaaaaaaaaaaaaaa

SEQ ID NO: 61196 - DNA, 2511 bp, Homo Sapiens
ttcactcgacatttggaatatgtattataagggaaagcatagggtgttatgaaagcatgaaatagtgggatctaaccttgttgaaacaggcagagtgggactgggggttgccagggacaactttcttgagaaggtaagtttgagatgggtgttgatagagggtgagttttaagtaggccgagtcagcaccttggtcccccttcctttatattcatgtaccagcttgatctcctggggaaatgtgagaagtgttctggagaagcatggaggtttagagccaccgtgaacctcagagcacattatgtagcccaccctgtctgccctcactcttctcagtattgccaatgagggcagtggcgcccacgagctaatgtgacttcctcgtacccctcagctgatgagcaacagagctgggactacaggacatagccatctttgtccctattatgtgccagacatacgtctagcaccctgcgtacttgatattgaatctgcactagcaactctatgcagtacgtattattattacttcttgtttacagatgaggaaacagaggccccgggagggtaggcacccctgtaaaggtcatacggttcgggaaagagtcaggatttggattcagcctgactgcacagcccccacactcctaatcacagcattgtccttccccctgccagaaacttggtttgcagtatttctactgaaacgtgacattttacctgccctcatggaggtatgatctttttggagagaaaagatagcaacaattcaacacagacaccacaccaaaggttcttgagatggaacagaatgcaggccccagggactcaaagtcatttttcagcatgggaagacttggcaccgagtctgtatcacaggatgagcagggctgtgcagagaaaacccagaggactggagggtgggctttgggaggagcaagtcaatttatctcttgggcttcattttcctcattgggagcattgaggaagagtaagggtgggagggaggggtgggttggcaaatgttttcccaagtccctggggttggtgggtggagtttaagccaattgctgatggctttgccaccaggtggcaaagtttagactttgtctagaagaagtggggagccatgaggggttttgagcagtgggacatgaaagtattgctttgggaagttggaatccaggaggcttttatcttccagtcttgcttctctggagactgatgtcccaagagaacatgcctggccgcttagctccgtggagtttatgctctgggagaccctgatggggagatcctcatttcgactggtcacattaatactacttttcgagtgtgaaaggttgagtcaaggtttggacttctggcaggttctcgcctttggctggtgttccgcctttgagatggtcccactactttcactcagcgtccctaccccacacacatctccccctctacacagacactaagggctcctcatggggtttcattattggtttttagcggatgttcctctaactcggtgcatttcctcaagccaacgtctattccactatcatggggaaattaatatagaaatttcctcctttgtatcatcaatttcagaggatgtatgttcccggctgatggccctcccctctatttgcataacagcaggtaaacaatactgccacctagtgggagctcaaggtgtgaccttcggagctcctcctcctgaccccgggacattatttctattactgttaatatttaaactaatgggcagttctgagctcagtgctcttcccagtgagtggatccacgtggattttcacgtctccttctcattctcttaaaacttggagttacaagtgtcagagaagctgttttgtgtacgcagaacgattggaacaggtgcagggagttttacctactttactttgacttttgctcacagcagtccaggtaggtaactggattcccgttttatacgtgaggaaacccaggctcagtaagattaagtaacttggaactttactgagcacctaacgtgcccaactacgtcctggactacctaggtagtatggggattgtggcctgttttcctctaagaatgcgctgtccagacacagtggcaaggcgtagttagctcctggccaacttgtagaggagaggagagacccttgcacactgcagtagtgcagcaagactgcttggatggaagaagtgggtctggagctaggattcgaaaggtggcatgggaagagaatgtttggcggatgaaggcacagaggcggcgctagtgctagggatgtccgggggcgaggaaagacttgctgatcttgggctgtgccaggtgttgtgggttgaggggtctgggatacagagcctgcgagagctaggttgagagctccagggagtcactgcgactacttccttgctccatttgtgaactgagaagtaagactcgtttgatggacgaaatttaaataatgcagaaatatattaaagtaaaaaaaaaaaaaaaaaaaa

SEQ ID NO: 61197 - DNA, 1115 bp, Homo Sapiens
aaaatgaaaagtgaaaccaaagacaaggttagactacggcactatgaaaaatcataggccaacaaaccagataacctagcagaaaccaaagacaaggttagactacggcactatgaaaaatcataggtcaacaaactggataacctagcagaaaccaaagacaaggttagactacggcactatgaaaaatcataggccaacaaactggataacctagcagaaaccaaagacaaggttagactacggcactatgaaaaatcacaggccaacaaactggataacctagcagaaaccaaagacaaggttagactacggcactatgaaaaatcacaggccaacaaactggataacctagcagaaaccaaagacaaggttagactacggcactatgaaaaatcacaggccaacaaactggataacctagcagaaaccaaagacaaggttagactacggcactatgaaaaatcacaggccaacaaactggataacctagcagaaaccaaagacaaggttagactacggcactatgaaaaatcacaggccaacaaactggataacctagcagaaaccaaagacaaggttagactacggcactatgaaaaatcacaggccaacaaactggataacctagcagaaaccaaagacaaggttagactacggcactatgaaaaatcacaggccaacaaactggataacctagcagaaaccaaagacaaggttagactacggcactatgaaaaatcacaggccaacaaactggataacctagcagaaaccaaagacaaggttagactacggcactatgaaaaatcataggccaacaaattggataacctagcagaaaccaaagacaaggttagactacggcactatgaaaaatcataggccaacaaactggataacctagcagaaaccaaagacaaggttagactatggcactatgaaaaatcataggccaacaaactggataacctagcagaaaccaaagacaaggttagactacggcactatgaaaaattacaggccaacaaattggataacctagcagaaatggatacattcctagaaacatacaacctataaaaactgaatcagaataaaaaaaaaaaaaaaaa

SEQ ID NO: 61198 - DNA, 1894 bp, Homo Sapiens
aaaatacttcttgcacttaaacactgcacatgccgtactttgaggttagtctgaatcttgaactttaataccaaattaattttgaatgcttttgtttcctaagagataatggcatggtttcatatgttatactttggacagacagagttttaaaaatggaattattttttctttcatgcctcttgtaatgttctgaacaaacttgaatgatgaaagtattaaagagatatcagtatttgaggtttgtattttcttctgtctctggggaggatttctcagtggtggtgggagcccagtcttggagtgaaagtgacacctgctgtccataattcagcaagctcaagtcttctccatgggactggggtcgggcagcctctttattctgcagttgctcttgtggggctgtgcctgtggaggaagaaaatgggaagaaagagaaaaaggtacacaaaggaaagaaaactatcatctatctgtggtggaggaacagtccagtgacccaagtgccctccagcaggcgaggttttgaatctgttctctggtgcctggtattccttcagtgtgtaaaggtgcttagtgcgtgctttgctttcttggcttttctgtccccatctgtctgaaagcagacttgccatctctcattctgttgattgttctgtgcagtactctcctttttggaaaaactccagggtatgcttgggaaggaaaaaaatttttttccttaccaaccaacgctgtgttgttgagtaaacactgatctctacccacacagacaacaggaatccagctttctgcagccccacagcctagacagcagcaacctggggagttgtttgttagcaaccattgcacagaaggacgcagcacacgttcctgagtgcaggggtgttactcttagaaaagcgtcttgtagtcgaaagagaggaacttccccactggttaataagtaaagcctgttgaaatttacatgtcaattacctttcatagtcatggtccgaaaacagctagaacagctgtaaatctggtacattttccttccctcctcatctacacgcacccacatcttcacacacactcatgcccctctttcacacgcagtttgctgcacacagtgggatttagcagatagaatgcattctcttgtcctgtgtagtccaataagacatttactgaacacctggtactatctatgctaaatgctctgaatagctctctaggtgcaaagagaagagtaaggcatggtcccagatcagtggaacttaggttttaagaatgttcacttactatacattctgtgacgaagcctaaaataaacttagcctaccatctctataggttttataaaatttgcaaaagtaatcctttctcagtaaattcaagtaatggaaatgtatatgaaaaaagtaaacttctttgttcttcaccagtcccactgcgtggagctaactgccataaacagtttgctttatatggtcccaggtttttccattcctggatgatgatgtagctatataaatagatttagaagaacaaagacaggatggtactgacataggattttgtaacgtgcttctccaaacgaacaaaatggatctctttgcatttcagcacttacagatttgcctcattctatttagaggcagaatattgcattggatgcatgtcatcatggactcggtacttctatttatggacaggaggttttttttcccagtttgctgctattacaaacaatgccacaatgaatgatctgaaacataaaactttgcgttgtgtggtagcattttggggaatagattcctggaagtgcaatttcaagatccaatagtgggaatatttttaaaatttgaataaatatagccacatttccttttgtaaaaaaaaaaaaaaaaaa

SEQ ID NO: 61199 - DNA, 1938 bp, Homo Sapiens
actatccttgagtgtttcactacgtattaaatttccacaatgcatcactagagcctatattgtatctgtggacactctttaaatgtggacatttaagcaaaagtcgaaagaataaatctagaaataaaaatgaatgtgaaatttgatgagaaggattggctcctgctgcaaataaatttctgttcattatacattacagtcagtggtattctattatagcagcatgaaatggtctaatacatctgatcaagaatggagaatctcagtcctatgaggacaaagaggcttccatgacctactaagttgcctggtattgttcagtctctcctgcaggctctttgtcttgtagcctaagtatctcttggtagaaaaaagaagtctcaggacaggtgggtgaggagatgcactctcatgtcttaagttcagctggtgctatgctgggggctactgtttgatctggagaaacaatgggcctatctgggctgccttctgctactatgtcatgggggaaagaagtactggatatggatggccttcctctcaggtgggaggacacaaggcatcttgatgttgtgttgttgctcaaatcctgggtccccacaccagctcttctatttttaccacctgcagagttctcctttatttgctttttgtaccatttgcagtgcttagggttgtgcctagtgagagggagcgggaggaggtgggtctgtgccttcttgtttgagctacagcttacttagatgtttttgatccttgtttctccaatattaatgattaatttttaaaactttaccctaaattaatctgtattaccttttttccataaactccataaagacagaatgtgtttcatttttatataattaaacaccctgcctgcaatttacaaacaaatgatatgtcatttaagtttcataaatgggaaaaagattaatcacagacagtttatttctttaaaaaataacacaaatttcttatttctgtatttgtcataagttcaacctttttgcattatcttgatcagtgtaaaatgcttggatggtcagtgttgtttgacttgtgtctgtatttggttaggatccatttaaactctctaggataatgtcaaaatcaatttcttcctttatactttcttattttcaaagaaatggtgctaaatatttctatgaatatatggaaatatctatgcgaatatgtatctgactaaaaatgttgcgggcatcttttctgtttttttaaccctttgtaatatttttattttgtttatttagtgatataagggaaaattgtgagcatttaactacataatctttatgtttccaccaaactcaattttttagttcttagtatatggcctataatctaactttaatttatcccttttatattagcttattttcttgttaacaacaaggatatctcttctggagtatctcaagtcaaggtagaaaaagtagtcaacaggaaaatgaacagaacagttttggatatgtatgagaatttaaagcaaatgtttctaaatgagaaattgtaactcaggaaatatttggcacattctatcaaaattttgtgaattttgataataaaacattcacaattcaattaggagtaaaggaacatcagaagaatttgagagcataccatggctggcagtccataaaagactagttaggaacatcagcttttaatcatcgaccctgctttcaggtttcattttaaacttatagaagaggggaagacatcagtgtgcttatttggcctttactctaaatcttaaaaggaagaaaattttaatatttcttagtttgagcccaggtgcggtgtctcacgcctgtaatcacagcactttgggaggccaaggcaggcggatcacttgaggtcaggagttcaagaccagcctgccaacgtggtgaaaccctgtctgtactaaaaatt

SEQ ID NO: 61200 - DNA, 2163 bp, Homo Sapiens
taaaccatgacctggctgcagaccttgactggcttattggaacagatgcaggttcacagagatgctgagtcacagctggttttgcaggagtggaaaaaggaaaggaaggagatgcgagaaatgaccaagagtttcttcaatgcccagtttggaagcctgttccgcacagaccagaacccaacctacttcctaaggcgcctgtcgcgcttcgctgacatctacatggcgtctctgagctgcctcctgaactatgacgtcagccacactttctacccccggaggactccactgcagcacgaactgcccgcctggtcagaaaggccccccaccttcggaacccctctcctgcaggaggcccaggccaagtagccaagggcaaaaactagaaactgtaactgcccctgattgggcaggcatgatggggttgacttcatgtgggtctgagtgttgcttttggaaaagatacagataagccttttgatatttattttgcaccttacggagaataattctcccaatgattaagacaggagctagcagcccacccctccagcctttccccccatgcagggctgaaaggcaagcttcacattggaactctgattttgcctttttgtttactgaggtcctggaacatcaggtttcctgggataggtgagaccacttgatgccatgtctgtattctagcaggtcaagcttgaaaccgttcttgactcctccatggaacatttcctgaacatttacgggctatgcattgggaactgcaggggcacagtgatgggcaaagattagctgcttccagaaggctgatttcgtgggctccacaatggtaaaacgctgctgtgagtggcagagaggttccccaggtgatggccagttcccaaatcatttggtactaaggctttgacattctggcacatcacatcaaatagaacacagcctccctggaaggacttaagtgagaaagaacaagagaagctgcaactcctggacccttttgtcctcagtgtgtggttcctgcgtccttccccagggcaggagagaggagatgagagctctggtcaaaacctgccagctagtggaacagccttctatagagccttctgcaagaaacgagtgggtttgaagaaccaaaacatttgtggtgttttcgccatcagggtgtattggaggctgacacttaatgggtgtgtgttacgcccagaactgctcggtgtcggggttctaaaagaatgcgctggtgttcttggcttcaagtttctgctttggagaagcagattcaggaagaatgcagctatatgtaaaccaaaggaagattttgacttcatcttattcagagctttataaggaattgttcgtcatttcagaagagcacatcctccacaggaggccactcctggtatttgagtcgtgaatcacacccgtgtcagtctgcatttctactggtcatttccatgaagattatatagacgcacgtatgtaagactgtacttactgtctgagtccattcatgctgctataacaaaataccatatgctgatttagcttataaacaacagaaatttacttctcactgcccaggaggctggcaagtccaagatcaaggtgccggcagatttggtgtctggtgaggcctgtttcctggttcacagatggtgacttctacatggtagataggttgagggagctctctgaggcctctattataagggcactaatccctttcaggatgcccctcccccttaatcacctcccaaaggcttacaggctcacttaccaccctcctagtgttatcaccttgggggtaaagatttcaacacaggaattttgggggtcacaaacattcagaccatagcacttaacctttattttaaaatgtcagccaggtgcagtggctcatgcttgtaatcctagcacttagggaggccaaggtgggaggattgcttgagctcaggaatttgagaccagcctgggtaacatagtgaaaccccatctctacaaaaaataaaccacattagttgggtttggtgatgggtgcctatagcagcacctacttgggaggctgaggctggaggatcacttgagcccagaaggttgaggcttcagtgagccgtgattgagctactgcaatccagtctgggtgatagagtgagaccctgtctc

SEQ ID NO: 61201 - DNA, 482 bp, Homo Sapiens
ttttttttagcacaaagtttctctttattgccacaggtcaagaatgctgaacaggaaaggcaccaaagaaagacactggcaatgaaagtgctattgggaaaatactgtgttcaagcaaagaatggggttatttacatccaccaaaaagtctcaaaagtgtaaatgggcaaatcttccattgttagattagaattatgatggaaaaagaggacggtttctctagtctatgttcatataaagacaatggcactgttatgaacttttaggaaactcctcaactagaaacagaagccaacttaaccaaaacgaagtaaataaagtgtgtacagtcccacacagactagtacagtttacaattaaatacacagaactttaaacgtgctaaagggaaaggaatctgacattctgggtaaatcttactcaatctaaatcaaagcttggttttcagggaggaggaggtgcgagcgcggcagaggtgctga

SEQ ID NO: 61202 - DNA, 544 bp, Homo Sapiens
  misc_feature (10)..(10): n is a, c, g, or t
ttttttttgngttccaataaaactttatttacaaaaacaaatggccagccccaagggcctggtttgcaactcttgctctggagcagagcagaaggtatactctgaactgcaacaaagtttctgctgcaaaagcagcacctctgctgtccgtcccctcctctctgtccactggctctggacgtccatgtgaacaggcttgccaagaaggacaaagtgggcaggtaaagctggggggggcggccacaatcaagatcccaacacccctatctttaagaggcagtgccaagcgaatcccatttcaggggacccactctacctcgctgcctacgatgaattcccatcttacagcctctcgattactatgcagttaccaagctggctaccaccttactaagattcttgccattttctcattctagtcaaaaaagtaagtcatcggtttagtggagggggcagctaaagcccaagtttgtatttgagaaagatgtacaacaggttctttaaaaaaataaattacataaaattttctggacacaaaactcct

SEQ ID NO: 61203 - DNA, 2699 bp, Homo Sapiens
cattaatcctccactcaaccttcaagaaactcaagtcactatagaagaaatcactcctcttgtccccccacaatcaggagataaagggcaagaagatctcacaagctattttcttgaagcacttctaaaatacatagtcattcaggtaaaaagtttagaatggaagaacaaagaaaaccaagaaaggggattttcatttttgttttcacattttaagaaatattacttgccttatatttttccaaacatctgtaaggaaaacagtttatatcatcctatacttgacatcccgcagatgagaccaaagccacattatgtcgtgataaagaaagatgctgaaaccaatgaagcaatctattgtacaaaggagcctttcattaaggctcgtgttattgtcattcgttggctggtttctttctggctggagccaaaaccacatacaggacctcatattcctgggatggaaggtgaagtcttgccaaagaatattcagagagcagctgctagtttagtatccagagaagaaagcaaaaatgataatgctgataaaacagacagaactacagaacctgaacagtctcattccaatacaagcactctcacggagcgagaacctagctcatctagtctctgtagtattgatgaagaacatctcacagacattgaaatagttcgcagagttttttcttctaaaaggagtaatgtaaactttgtgacagagatatttcgtcaggcatttttattaccaatttgtgaagcagcagctatgagaaaagtggtaaaagtatatcaagaatggatccaacaagaggaaaaacctttgttcatgcaagagcctgaagaaattgtgatcacttcttcagacctcccttgcattgaaaatgtcacagaccatgatatttcaatggaagaaggagaaaaaagagaagaggaaaatgggaccaatactgctgatcatgttcgaaattccagttgggcaaaaaacggctcctaccaaggtgctcttcataacgcctctgaagaagccacagaacaaaacatacgagctggtacccaggcagttttgcaggtgtttattataaactcatcaaatatatttcttcttgaacctgcaaatgaaataaaaaatcttctggatgaacacacagatatgtgtaaacgcattcttaacatttatcggtacatggttgtacaagtatcaatggacaaaaagacttgggaacagatgctgcttgtgttgctcagagtcacggaatctgtactgaagatgccatcacaagcttttctacagttccaagggaaaaaaaatatgaccttggcaggtcgacttgcaggaccacttttccagacccttatagttgcctggatcaaagcaaacctaaatgtgtacatctcccgagaactttgggatgacttactgtcagtattgtcatcgctgacctattgggaagagttggccactgagtggtcactgactatggagacattaactaaagttttagctaggaatttatatagtttggatctcagtgatttaccattggataagctgagtgaacagaaacaaaaaaagcacaaagggaaaggagttggacatgaatttcagaaagtttcagttgacaagtcattttctagaggatggagtcgtgattagcttggccaagccccaatgagacagaggagtgcaacaaccactggttctccaggaaccgaaaaggcgaggagtatagtacggcaaaaaactgtcggctaatgaagaaaagccatatgatcacatcaatagatgcagaaaaaacatttggcaaaatccaacacccatttaggataaaaactctcagcaaggtagaaataaggagaacttcctcaacttgataaatctattaaaaaataaaaacacaggacaacttacctctagcatcatacttaatggtgagaaactaggtttttttctgctgagatccacaacaaggcaaggatatctcactattcctgtaagacaggaaaaggaaataaaaggtctacagattgagaagaaataaataaagctatctttgtagatgacatgattatttatgtggaaaatttcaaagtgacaacctcctgaaactaataagcaattatagcaaggttataggatgccagattaatatataaaagtcagtcgctccttccataccagcaatgaacaactggaatgtgaaactgaaagcacagtaccatttacattagcatcaaaaatctccaaaacaattaggtataaatctagcaaaatatttacaagatctatatgaggaaaactatgaaactttgatgaaagaaatcaaagaataaataagttgagaggtctagttcatgtacatggatagaaaaactcactattggcaagatgtcatttttttccctacttaatctgtagattcaacacaatctcagttgattttgttcttaacaagttattttgtggatattgacagaatctaaaatttatatagaaaggcagagcatgagcaacatggcaaaacctgtctctacaaaaaatacaaaaactagttggatgtggtgtcatgtgcctgtagtcccagctacttgggagcctgagatgggaggattgcttaagttcaggaggtcaaggctgcagtgagccatgattgtgcccctgcactctctagcctgggtaacacagcaagatcttgtatcag

SEQ ID NO: 61204 - DNA, 2552 bp, Homo Sapiens
aagagaaatgctcttcatacccagtaggcagacagtccctacatataaaaagcttcctgagaatgtacagcccaggttcctggaagatgaaggcctttacaccggggtaagaccagaggtggcacgcaccaatcagaacatcatggagaacagattgctgatgcaggaccccgaaagaagatggtttggagatgacggcaggatcctagctctgccaaaccccatcaagccatttccttcaaggccgccagtactaacacaggagcagagcattaaggcagagcttgaaacactgtataaaaaggctgtaaaatacgttcacagtagtcagcatgtgatcagatctggagaccctcctggaaatttccaactggacattgatatttcagggttaatcttcactcatcatccctgttttagccgagagcatgttttggcagccaagctggcccagttatatgaccagtaccttgcaagacaccagagaaacaaggcgaaatttcttactgataagctccaagctttaagaaatgctgttcagactggccttgatccagaaaaacctcatcagtctctcgataccatccaaaaaaccatcaatgagtataaatctgaaattcgacaaacaagaaaattccgtgatgctgaacaagaaaaagatagaacattgcttaagactatcataaaagtttggaaagagatgaaatcccttcgagagttccagagatttacaaatactcccttgaaacttgttttgagaaaggaaaaagctgaccagaaagcagatgaagaagcatatgaagcagaaattcaagctgaaataagtgaactgttagaagagcacacggaggagtacgcacagaagatggaagaatacagaacgtcgttacaacagtggaaggcctggaggaaagtgcaaagggccaagaagaagaaaaggaaacaagcagcagaagaacatcccggtgatgagattgcagagccgtatcccgaggaggaccttgtgaagcccagccctccagagcccactgatcgggcagtgatagagcaggaggtgagggagagagcagcccagagcaggaggaggccttgggagcccacgctggtcccggagctaagcctggcaggaagcgtaacacccaatgaccagtgccccagagcggaggtctcgagaagggaggatgtaaagaagcgctcagtgtacttaaaagtgctgttcaacaacaaggaggtgtccaggacagtcagtcggccactaggagcagacttccgagttcactttgggcagattttcaatttgcaaatagtcaactggccggagagtttaacacttcaggtctatgaaactgtcggacacagtagtcccaccttgctagcagaagtgtttctgcctattcctgagactactgttgtcactggaagggctcctactgaagaagtggagtttagcagtaatcagcatgtgacactggaccacgagggagttggaagtggagtgcccttctcatttgaagctgatggcagtaaccagctgactctgatgacctcagggaaagtgtctcatagtgtggcatgggccattggagaaaacgggatacctttaattcctccattgtcacagcagaacatcggatttcggagtgctttgaagaaagcagatgccatctcatctattggcacatcaggactgacagacatgaaaaaattggccaagtgggcagcagagtccaagctcgacccaaatgaccccaacaatgcccctttgatgcagcttatctcggttgctaccagtggtgaatcctatgtccctgatttctttagactggagcagctgcaacaggagtttaactttgtttcagatcaagaattaaatagatccaaacgatttaggcttcttcatcttagaagccaagaggtgccagaattccgaaattataagcaagttccagtctatgaccgagaaattatggaaaaggtattccaggactatgagaaacggttacgagacagaaatgtaatagaaaccaaggaacacatagacacccatagggccatagtagccaagtacctccagcaggttagagaatcagtcatggactggaggccacgccatctgactcggtggaataggtattgtacctctactctgcgtcacttcttgcctctgttagaaaaaagtcaaggagaagatgtagaagatgaccacagagcagaactgctaaaacagctgggagactacaggttctctggatttcctcttcacatgccttattctgaagtgaagcctttaattgacgctgtgtatagtactggagtacataatattgatgttcctaatgttgaatttgctttagctgtatacatacacccataccccaaaaatgttttgtctgtttggatctatgttgcctctcttatacgcaacaggtaatttttttcactgtactttctgtatcatgtaaaaactacacttaggatatgagaaaattttaaattatatgcatcacatcagaagaacatattattggcaaataataaaattatcaactgtt

SEQ ID NO: 61205 - DNA, 545 bp, Homo Sapiens
catcaaaagtttctaattttattctgagaaaagataacaccaagaaaacaattttaactacagaaacaatggttagcgtaaaaaattaataatcaaaaagataaaccatgttataagtacttaacaaacttataaactatttcttccataacattctccatattttaagttcatacatgttgatatgatcagatttacaatttttcagaaaagacgggggaaaaggtgtgattatcgtcagctagatgtgctcactgcatgctccattatttatctgcaaggcctgggtgactggaagtgcagttgacaggcattttaataaactggacagccatttgttcttcaggacaaggcgtgttttccccaggagcaatcagaagaaaacaggaagcagctcagcactctgcactgcaacaggccaccttaatagctaaccagcatcactcaactgctacgcagccgggccttttcaataggcagcctcttcttccagggacgttgcttccatagactgagtatgtggatccttttcccccaagtcctcc

SEQ ID NO: 61206 - DNA, 424 bp, Homo Sapiens
ttttttttttttttttttattttttgcatataacattttattttttatacttacttagcttttaaattccatgacaaaaatgtttcatctgtacacataattactaaaattatttcatcccacctcttttaatatacattatgtgtatttatttttttaaaaaagcaacaggaaaatattaatagatttaaatacaccatgtaggcaaaacacactaatatttatgtcttctaaacctgttagtgatatacaaggaaacttgttacaagtcataatgctttcataatctgtcaggaaaagatcacattaacatccctatatgcttcagtacaaatgtatgctataaaccacactgggtaaaagtaatattcctgtttttatttttggaagtaattattagtaagtttatgcttattaaatatat

SEQ ID NO: 61207 - DNA, 581 bp, Homo Sapiens
ggtaaagacttttgtatagttttcctgatgccctaatttgttccatttaatttctataaatattcaaaggacatggaataggatctgttaaatcaactttattaatcccattttaaatatctttcatatgcttatttttctgcttgatcagcaaataatgaactaatcactttcaaactgctagtttctatacattcaattatctgagatttctattggcttttacattgtttgatattatacgttttcaaataaatattcatataaatgtctataggtcttatagttctgttgtaggctacacatgaacagcaaccaaaaagaggaaaaatcttctttgtccccatgctttttccttgaattctgcacttttcatattaacattagcccttgctttgtgatttgcctttgctttattttaccctgtcttaatcttaaccttcccaaatatttccatacagggtgcacctctcctagacaacacacagcggagagtgtgcttcccatgtattcaatcttcgtctcttgaaaggagaggtgccctcattacacttcactgtgacacaggatacccttggttt

SEQ ID NO: 61208 - DNA, 423 bp, Homo Sapiens
actactatgctttaagcttctgcttttgtggccatctgacaactttctctcaagcctggtggaagtggagtctttatcactcttatatttctcctttgctaatggtaacttggctctatgactagaatccttctgtgtactatgtgctgaagaagaagcagtctctaatacaggttcaacaccagtttcttcaaaaggtttgtcttcaactttagacttacgctgtttttctgagtcattttcttctgtgttcttctccttgtctggttttggagtggttgcctgttttgtggcaccttcttgtaattctgtttctacaacttttacctgtttgccttgagtttttgatttagacttcaacacaagtttctcttctaacaagctctttgttcgtcgtttctccttgtgaacaacctcttctgg

SEQ ID NO: 61209 - DNA, 423 bp, Homo Sapiens
  misc_feature (328)..(328): n is a, c, g, or t
  misc_feature (371)..(371): n is a, c, g, or t
  misc_feature (390)..(390): n is a, c, g, or t
  misc_feature (411)..(411): n is a, c, g, or t
  misc_feature (420)..(420): n is a, c, g, or t
gagaatgctattgaatccagtttttgtttagttactgttcattttactttataaaattgacataattgagtttattaaatttattgggccaatttaagtaaacagttgaacgtttcataagtcatgaggtctttttggcatatacatgaagtaaacaaagacaatactagctatgtaatagaagctacataattagaagtaaatattctttttgaaattggcctgtggtctcaggtgaaaaatgggaaaatatctatagtaaaaaaaatgacattaattctgcatatggaagagagccataattgtacccatgccacacaattgactncacaattggaaacaaggtggaggaggtggggccttttaggccnaaacttaggtggaaaaccntggttaaatttttccgggttntgttttctncct

SEQ ID NO: 61210 - DNA, 1030 bp, Homo Sapiens
tttaawacagattgcaatcttacatgatgtaatattaaatgccttcttaatagcatctaacctamccttctgattgaaccgaattggmmtacactgggatggaactcttgttaccacccatgtttgtggagtactgttcttcagtacagtacacctaattcatattgtcaggccatataattcacgggtagtggtattaatttctaaagctgaattaaagcacacatccaaaccacatatattttttacttttcaacttaaagagttcawacaaagtctatttcctttctacagtagctatcactccagactgtggtttaaaaatccaagaagtgggaagaatgtctttgttttcaatgcttctttcttccatcctttttctatcctccttttttccttctttccattttctttcttctattcatctccttctttcctttctttcttagtgataagaggttaacagaaatgggctattaaggaaatcaaagtctagtaaacgtccaaaamagagatgagaatagtcacaaactcttctttttgtagtgatgttaaattactgacaaatgtttttttgaaaacaaaaaaatctaaaaaccagcacaagctagtggtgctgcatattatttaagcaactggcgttcttcaatgcttttgaggcgtttcttccggggctgtacaaagtcatcatctgaatcatcactaaatttattatcttctgattcattcctgaattctggtttgggaaaccttttttctggatagaggttctttagaagttcttcaaaataattttcaagttttataccagcattggctacttctgaatcaggctcattgaattcagcacagttttgaaagatcaatctaaaatcagctacaaaatcttcaggttttgagtacatggaataatcttcttgtagtcttttcttgatggttgacaaatccattggatttttaattattttgtaataatcaggcacagttagaggaacagggtcttgaaaagccaggctcatttcatggcagt

SEQ ID NO: 61211 - DNA, 530 bp, Homo Sapiens
tgtgtatattgcagaaagagatttattttaaggaattggctcacattattctgggagctggcaagtctgaaatctgcagggcagacaaacagcctggagacccagggagatttgacgctgcagtctggaggctgaattgcttcttcttaagggtctcgttttaatttgaactgaccggatgcggcccaccctcattatagagggtaatgtactttaatcaaagtctgctgatttaaatgttaatcacatctaacaaatacaattcatagcaacaactagactagtgtttgaccaaaaactgagtaacatgggtagcatcgcctagccaagttgatagataaaattaaccattaaagtcactaagttccattgacaatgacctttaaatatttctcaagttggtttcttcttctccattgccattgccttaatttaggcttgtgttctcgtttaattaattcataaaatacttacgtattaggcattatgccaaatgttggagatacaattgtgagtaagattgtgtcctt

SEQ ID NO: 61212 - DNA, 468 bp, Homo Sapiens
tttgccattattagtttttattgaaggagaaaatttttttaattcatctcaggtttaagataaattctgcaaacattgattaaaacatgaaaggcacttaaataagcatacgtatctctgaaaacatgaaatgttatgtacatgtgttcaccattgtttggatttagagctttgaattcactaagagtttaaaatgcctttttttttttttccatgccaaaacgtttgactgtgaaatatcaacccagaatgctctgggaaaaagttagcaaggcttcaaccgttttttttttttttttcaattgcaggctaaaaccatctctattcatatagaacccaaaaagcatgtctccttggacatgccatgtggcctctcggtttcaccaggcatcttgaaacatcgagggcaagtaagagagttgttcattcatacctttatcaccaatatcaagtttcttttaaaaattc

SEQ ID NO: 61213 - DNA, 701 bp, Homo Sapiens
  misc_feature (221)..(221): n is a, c, g, or t
  misc_feature (486)..(486): n is a, c, g, or t
  misc_feature (495)..(495): n is a, c, g, or t
  misc_feature (498)..(498): n is a, c, g, or t
  misc_feature (623)..(624): n is a, c, g, or t
  misc_feature (647)..(647): n is a, c, g, or t
  misc_feature (650)..(651): n is a, c, g, or t
  misc_feature (667)..(667): n is a, c, g, or t
ttttttttttttttttttttttttttttcactggccattgagcagtttattaccatcaacctgtccccagttttccagcacaacagccagcccacactttaaacacgccttcactccagtccattttggcacctagcctaagtcttaaccctcctccctcctccacacactctttcccccagccctccaaggcagcaccaggcctgagggccacacctcanctgggggaggggagggaagacagtgagacaaacaaaacctggggaaagaggagccagggttggccccaagcttctgtagccaccactccagaaaggagggaaagggggcagggctgaggctggggctggggttgccaggtgatgacagttcacgtggttcaggcaggaggctcttctccaggaggtgcagggaagccactcaggtctcggccaatgatctcactcacttcctccagcgtgataccctggatagggacactgtctnggaagccgntgntgtagccacccctggatttctcctgctcccgagccccctccccagggccatagcctggccctaccttattgtatcccctcagcaggtagggatgcacatcacttctggaaaggaaggggccttcnnagcggggggatgccagaagagangcnngccgaagggggctgcngagagaatggcaccccccagggggaagaggaccc

SEQ ID NO: 61214 - DNA, 5252 bp, Homo Sapiens
cacgggggaagcaggcgggccccccagcacccgggaggccgagctgaagctgcggctaaagctggtggaggaggaagccaacatcttgggccggaagatcgtggagctggaggtggagaaccgtggcctcaaggcagagatggaggacacgcggggccagcaggagcgggagggcccgggtcgggaccacgcacccagcattcctacctcacccttcggtgactccctggagtcctccactgagctccgccgccacctgcagtttgtagaagaggaagcggagttgctccggaggtccatctccgagatcgaagaccacaaccggcaactgacccacgagctcagcaagtttaagtttgagcctccccgggagccgggctggctaggagagggtgcaagtcctggtgccgggggtggggcccccctgcaggaggagctgaagtcagccaggctgcagatcagcgagctcagcggcaaggtgctcaaactgcagcacgagaaccacgcgctgctgtccaacatccagcgctgcgacctggcagcccacctggggctgcgtgcccccagtccccgggacagcgatgccgagagtgatgcgggcaagaaggagagtgatggggaggagagccgcctgccccagcccaagcgggaagggcctgttggcggggagagtgactcggaggagatgtttgagaagacgtcgggcttcgggagcgggaagccatcggaggccagcgagccatgccccacggagctcctgaaggcccgggaggactctgagtacctagtgaccctaaaacacgaggcccagcggctagagcggacggtggagcgcctcatcacggacaccgacagcttcctccatgatgcggggctgcggggtggtgcgcccttaccggggcctggcctccagggcgaagaggagcagggtgagggggaccagcaggagccccagctgctggggaccatcaacgccaagatgaaggctttcaagaaagagctgcaggccttcctggagcaggtgaaccgcattggggatggcctatcccccttgccccacctcacagagtcctctagcttcctctccactgtgacttccgtgtcccgggactcccccatcgggaacctggggaaggagctgggcccagacttgcagtccagactgaaagagcagctggagtggcagctcgggccggcccgaggggacgagcgggagagcctgcgcctccgagccgcgcgggagctgcaccgccgcgcagacggggacaccgggagccacgggctgggaggccagacctgcttcagcctggagatggaggaggagcacctctatgccttgaggtggaaagaactggaaatgcacagcctggctttgcaaaacaccctccatgagcgaacctggagtgatgagaagaatctgatgcagcaggagctccggtccttgaagcagaacattttcctcttctacgtcaaactcaggtggctgctgaaacactggcggcaagggaagcagatggaggaggaaggagaggagttcactgagggtgaacatccagagaccctctccaggctcggggagcttggagtccaggggggtcaccaggcggatggcccagaccacgacagtgaccgaggctgtggctttccagtgggggagcactccccacactcccgggtgcagattggagatcacagcttgcggctgcagaccgcggacaggggacagccccacaaacaggtggtggaaaaccagcagctgttcagcgccttcaaggccttgctggaggacttccgtgcggagctgcgggaggatgagcgtgcccgactacggctgcagcagcaatatgccagcgacaaggcggcctgggacgtggagtgggccgtgctcaagtgccgtctggaacagctggaagagaagactgagaacaagttgggagaactaggctcctccgctgagagcaagggggccttgaagaaggagagagaggtgcaccagaagctcctggcagacagtcacagcctggtcatggacctgcgctggcagatccatcacagcgagaagaactggaaccgggagaaggtggaacttctcgaccgcctggacagagatcggcaggagtgggagcggcagaagaaggaattcttgtggaggatagagcagttgcagaaagagaacagtccccggagaggtggcagtttcctctgtgatcaaaaagacggcaacgttcgcccctttccccaccagggaagcctccgcatgccccgtccagtggccatgtggccttgtgcagatgctgactccatcccgtttgaagaccggccgctgtccaagctgaaggagtcggacaggtgctcggccagtgagaatctctacctggatgccttgtccctggatgacgagccagaagagccaccagcccacaggcccgagagggagttcaggaaccgcctccctgaggaagaagaaaatcacaaaggaaatcttcaaagggcggtgtccgtgtcctccatgtctgagttccagcgtctaatggacatctcccccttcctgcctgagaagggcctgccgtccaccagcagcaaggaggatgtcaccccacccctgtctccagacgacctcaagtacatcgaggagttcaacaagagctgggactacacacccaacaggggccacaatggtggggggccggacctttgggccgacaggaccgaggtggggcgggcagggcacgaggacagcacagagcctttccccgactcctcctggtacctaaccacaagtgtcaccatgaccacggacaccatgaccagcccagagcactgccagaagcagccactgcggagccacgtcctcaccgagcagtcggggttgcgcgtgttacacagcccgcctgccgtgcgcagggtcgacagcatcacggcggcaggtggtgagggtccctttcccacaagcagagccagagggagcccgggagacaccaaggggggccctccagaacccatgctcagcaggtggccttgcacctcccccaggcactcccgggactatgtggagggggcacggcgcccccttgatagtcccctctgtacctccctggggtttgcctccccactgcacagcctggagatgtccaagaacttgagtgatgacatgaaggaggtggccttctctgtcaggaatgccatctgctccggccctggcgagctgcaagtcaaggacatggcctgccagaccaatgggtcccggacgatggggacccagactgttcagaccatcagtgtgggcttgcagactgaagccctgcgtggcagcggtgtcaccagcagcccccacaagtgtctcactccaaaggctgggggcggtgctacacccgtgtcgtctccttcccggagccttaggagcagacaggtggcccctgccatcgagaaggtgcaggccaagtttgaacgcacatgctgctcccccaagtatggttctcccaagctgcagaggaagcccctccccaaagccgaccagccaaataacaggacgtcaccagggatggcccagaaagggtacagtgagtcagcctgggcccgctccaccaccacaagggagagccccgtgcacaccaccattaatgatggcctctccagcctcttcaacatcattgaccacagccccgtggtgcaggaccccttccagaaggggctgcgggccggcagtcggtctcgctcagcagagccccgaccagagctgggcccaggccaggaaacaggcaccaattcccgaggaaggtcgcctagccccattggggtggggtcagagatgtgcagggaggaagggggagagggcacgccagtgaagcaggacttatctgctccccctggctacaccctcactgagaacgtggcccggatcctcaacaagaagctgctggaacatgccttaaaggaggagaggaggcaggctgcccacgggcccccgggtctccacagtgacagccactcgctgggggacacagccgagccagggcccatggagaaccaaactgtcttgctaactgccccctggggactctagccctgcctgcctcacgctgaactaccttgttctgcactagctccatccctagagccctgcttctccaggcccgagagaccagcaaaccgtcgccctccgtcccgttgggccccacattcccccactgcctcacagcctcagtcacccggagacccgacgtccttggaggagcatggtggcgaggagccgcccgaggagcagccacaccgagatgcaagcttgcatggattatcacagtataattcactgtaatttgcataaccacaccatcaccatgaacaaaactctgcccaacaggagagatctagttttctcaaggtcaaagaatgttttttaaaaacacaaagctgctgaatgttcaacctgtgaaactgagatgtttctagaatgaaacagtaaatgtgcctgtaataacttaatttttttcatagctcagaaaactatttttgtctccatcttttttacacacagtatattaaacgaaaacgtaaataaggtataaatagatttaaaaaataaaagttttaaaaaatgtacattttaagagattctgaacaccctcgctgtcaatacctgactgcctctgttaaatttgcactgttacattttggttcagtttatttccatgttgaattagagtggattaagttaattttattttgtcagtgttactgttttttatgaattttttaatgcttcagactgtctgattcagtgaactttttgtagtgaaaaagccatgaagccagtagacaagacagatattctgtatgctggaggggatacaggatgattttgaaaaggtacaaagtcctcagtgggcttagaaaattcactgtatgatccttatattatcctacttggcttgcacgtcttcgggtgcatgtatataccgctactgtgtcctcgccatcacctaaatgtgactcagtctgttccactgtaatatgttgtgaatttccttgtactgtacttttattgttggtcttcttgcatcgatgatccaacagcaacaccatttttaaattattgtgaaaagattaactggcaatgtacagagtttactcaaagttttcttaagggaaaacactacaaaaagtcacaaggataccaaatggaaacacatgatgatgcctctgggtctgtatgagaccgtgatgaagtagaaataaagcccttctgagatggc

SEQ ID NO: 61215 - DNA, 532 bp, Homo Sapiens
tcgcgacgtgttatcctgaagatcatgatttcagtgttgatctctgcaaccaacatgctttagggagtagctagtcattacccctgctacaatagatagtattgtcagtctaagttacagacaaaaaattctaggttgactgattaagaaagccatgtgttttaatttccttcatgttttaaaaacaatggacgtaagtgcagagagacctttgaaaatattaagggaaatctatttaaccctataggtatgtgatgacttgttttttttggaaaaaggtatttggaacatcaatctgtaattatccattttccattcatgcattcactaattcaatatttgatatgtgtctgggagtgctgggaataacataaatacaaaaaaaaaccctaagataatcattcaccagaagctcatagatataatacagttatatagctaaatgcaaccagtggtttttccaaatgtactcatcatctgtgataaaagaaaaatgcagtacaacatctgaaaccttaacttactcatgagt

SEQ ID NO: 61216 - DNA, 338 bp, Homo Sapiens
  misc_feature (70)..(70): n is a, c, g, or t
gtaaaagaaaaagcgttcagcggccgcatatagactaaaatatcaattataacacattcaaaatgtcccntacactggcgaatgtttaatccataaggtttttttagtagtttgtcaaacagtgaccttctcacttcccagctgtaacacatagcaaaaccaattttcctacccttggctcagcaatctgggtctcaggattatttgtgcccaacaaaatctcttagccatttcttaaactactggcaggtagttagattttccacttgacattgctaagagattaaaattgtttatctcattgtcatacacaggccttttcagtttcctgctaacag

SEQ ID NO: 61217 - DNA, 484 bp, Homo Sapiens
  misc_feature (408)..(408): n is a, c, g, or t
  misc_feature (468)..(468): n is a, c, g, or t
  misc_feature (484)..(484): n is a, c, g, or t
tcgcccaggctagaattcagtggcaggatcatagctcactgcagcctcgaactcctaggctcaagcaatcctcctgcccctgcctcctgggtagctggaactgtagatgcaagccaccaagcccagctctaatcacactttgaatagctatgaattaacaataaacacaaattcaaaaggaaatagaaaagcaaacattatctttatttaataatctttgatatttaaaatacaactcattgaacatccacactaacaacagaatcctgtgttcaacagtgctttggaagcccggcttttctaacgaccagacaggaaggcctgtgtgtgtaataacagcaaatgaacttaacgagggagcacacacagaagggctgcagggctggggtcctgagcaagcggcactgnccacagtgcacttggtatcatgggccaaacaacaatggctttttgtttcagatattttcnggtacttgaatttcan

SEQ ID NO: 61218 - DNA, 4276 bp, Homo Sapiens
ctgtgacccagaagtcttcgaattcactggtttttcagactctgccacggcacatgcgacgaagagccatgagccacaacgtcaaacgccttcccagacggttacaggagattgcccagaaagaggcggagaaagccgtacatcagaaaaaagaacattcaaaaaataaatgccataaagctcgaagatgtcacatgaaccggacgctagaatttaaccgtagacaaaagaagaacatttggttagaaactcacatctggcacgccaagcggtttcatatggtcaagaagtggggctactgccttggggagaggccaacagtcaagagccacagagcctgctatcgagccatgacgaaccggtgcctcctgcaggatttatcctattactgttgtttggagttgaaaggcaaagaggaagaaatactaaaggcgctttctggaatgtgtaacatagacacagggctgacgtttgcagcagttcactgcttgtctggaaagcgccaagggagccttgtgctttatcgggtgaataaatatcccagagaaatgcttgggcctgttacgtttatctggaagtcccagaggaccccgggtgacccttctgagagcaggcagctgtggatctggctgcatccaacccttaaacaggatatcttagaggaaataaaagcagcgtgccagtgtgtggaacccatcaaatcagctgtctgcatcgctgacccacttccaacaccatcccaagaaaaaagccaaactgaattgcctgacgagaaaattggcaagaaaagaaaaaggaaagatgatggagaaaatgctaaaccaattaaaaaaattatcggtgatggaactagagatccatgtctaccatactcttggatctctccaaccacaggcattataatcagcgatttgacgatggagatgaacagattccggctgattgggccactttcccactccatcctaactgaagcaataaaagctgcttctgtccacactgtgggagaggacacagaggagacacctcaccgctggtggatagaaacctgtaagaaacctgacagcgtttcccttcattgcagacaagaagccattttcgagttgttgggaggaataacatcaccagcagaaattccggcaggtactattctgggactgacagttggggatcctcgaataaatttgccccaaaagaagtccaaagctttgcccaatccagaaaaatgccaagataatgagaaagttagacagctgcttctggagggtgtgcctgtggaatgtacgcatagctttatctggaaccaagatatctgtaagagtgtcacagagaataaaatctcggatcaggatttaaaccggatgaggagtgaattgctggtgcctgggtcacagcttattttaggtccccatgaatccaagatacctatacttttgattcagcagccaggaaaagtgactggtgaagatcgactaggctggggaagtggctgggatgtcctactcccaaagggctggggcatggctttctggattccatttatttatcgaggtgtgagagtcggagggttgaaagagtctgcagtgcattctcagtataagaggtcgcctaatgtcccaggcgattttccagactgccctgccgggatgctgtttgcggaagagcaagctaagaatcttcttgaaaagtacaaaagacgccctcctgcaaaacggcccaactacgttaagcttggcactctggcacctttctgctgtccctgggagcagttaactcaagactgggagtcaagagtccaggcttacgaagaaccttctgtagcttcatctccaaatggtaaggagagtgacctaagaagatctgaggtgccttgtgctcccatgcctaaaaaaactcatcagccatctgatgaagtgggcacatccatagagcaccccagggaggcagaggaggtaatggatgcagggtgtcaagaatcggcagggcctgagaggatcacagaccaggaggccagtgaaaaccatgttgctgccacagggagtcacctctgcgttctcaggagtagaaaattactgaagcaactgtcagcctggtgtgggcccagttctgaggatagtcggggaggccggcgagctcccggcagaggccagcaaggattgaccagagaggcttgcctgtccatcttgggccacttccccagggccctggtttgggtcagcctgtccctgctcagcaagggcagccccgagcctcacaccatgatctgtgtcccagccaaggaggacttcctccagctccatgaggactggcattactgtgggccccaggaatccaaacacagtgacccattcaggagcaagatcctgaaacagaaagagaagaagaaaagggagaagaggcagaagccaggacgtgcctcttctgatggcccggcgggggaagagcccgtggctgggcaggaagctctgactctagggctgtggtcaggccctctgccgcgtgtgacgttgcactgctccagaactctcctaggctttgtgactcagggagatttttccatggctgttggctgtggagaagccctggggtttgttagcttgacaggcttgctggatatgctgtccagccagcctgcagcgcagaggggcttagtgctactgaggcctcccgcctctctgcagtatcgatttgcgaggattgctattgaggtgtgaatgcgtgcttgtatcccagcagggcatagataatacgttattattgtctgccaagttctacatgtggagaatctgcttctgctttaaaatatcatgtgaaactccctggaaacaagaataaaaaattatgtattatgcagatgatgaaatgtttacatcattccagtaatgtcattgattttcatctttccctgtccttgctgtaatacttttaaattatttggccaaaagctttgtattatgatctcttggtctgtgtagttgtggctgaaaataatgagaagctctacgagttatcatcccctttttttgttagaaacaaagggcttgtcaggtctatttgaaaaacctcatagtcatgtgataagcaacaatagatgtttaatgatttcactgttatagcagaagacaagagaagacgcttggcctctgtacatgaaatatgggctcctgatggacctcattcaattctgtactgtgatttccatgccgaacaactcaagccttaaagagagaaatcatggacaactgatttctgcctgttttcaggcaggcacagtttatggcgtcagtgctaggctggaattagaaagtgggggtctatgacgtggacttcctgactctttgatctctttgttgttgaccaacacttgatcctactagttacttaatttttttaagtaaaaaattattattattttgtttctgcaaagattttctcaaagccatagaggagcatttctcagaatatgttctatgatatgtgtcacctaaaaaagtaagagattccaaggtcaggttgatatggaaactctaggttaaataaagttaagcatttctttatgaaagaacttctggaaacttccatgtgataatgtgcattgcggatctctaggaaggaaatgatagtgtatagtattttctaaatacttgtgattcctaaagttctcttacaaggagccctttgtaggaccagtgttcttagtagcgcgctttgggcagtgtggctgtgtagtgcatagctacctctgcaaggtgataactaagccggcaagctgcctttcaacactcatgcagtcacgttgtccacctgagattctcaacagggtataaaaggaaggtctcatcttgcctcacaggaagagtgggctcagtgtggcttttttccaactatggagaaactcagtgctcatctactttaagtttccacatatggcttgctcatagccttggtccttacctttcctgccataactttctagaagagcttaatgggatttttttctaaaaaatgtaaatatgcagttaggcattattttatgtaaatgcattgggtttttactgtagcatttggcactaaatggctttgggggtgatgaggtggggaaggatacagcaggtggtacagtagtcaggaagtacctgccaccaatgagatgtctgatgctttgcctcttaccatgcctctgaatgtctttggatccaacccagatgagactgaaaaaaaaaaaacagtgtaactaagtggcatctgtaaacagaataaatgaaaatgtcacctg

SEQ ID NO: 61219 - DNA, 757 bp, Homo Sapiens
  misc_feature (668)..(668): n is a, c, g, or t
ttttagaatgaaataatcagtttaatatttatagacttgagaaagaacttgaattaaaattcagtctggagtctgaattagcaccatctgaatacagaaggaattctatgtacatgcacaaattagtttaattaacatatataggtaaaatatatttatttgtttgttttacttgatatacttgttttgacagactcttcctggggttacacttatttttattagttggctgggcatgatacaggttgaacgcccctcagttccagggccttggcaaaattaacctccagtggcttgcctgtgcctttggtgagcttcagggatctgatgcaacctcggaacggaatactggttgttaggccaaactgctttttgcggtcatctgggaagcctcaacaaacacagggtcatttgtgtcaactgatgtagatgctgggtttgggctttgggcttccacctggttcccatcgactgtgagctcaatgcggtgtttgatcttgttggagtatgccattgtccatcacacaaatgccctggaaccccagcatcatagacagcagtgaatctgcccgcaccattgtccacatgaaacatcaacttttcatcaatcatttcaatacccattccatccatttttttgactactgatccccaaaaaaaactccagncgtttgagttgtggcggaatcaaaatctacaagaagggtcaattcccactttgaattccacaaacttgctttggcaaaaccgggttccg

SEQ ID NO: 61220 - DNA, 427 bp, Homo Sapiens
tttgacaagataaagtttattagatggagaatgttaatacagctgaaacctttgaagaattcagaccagtcctcaaaccattcatcctgagtacctggaatgttatatgatcttgagtgggatatttcccctctatgacttcagctgtaagatgacactgttcttttgtaccagtacatgaagactagctaattaaaatactatactagttcattcaaaaagtatttactgagttgctactacgtacaaggcatcatgcaaacagactgtgcagtattacataaaatttttaaaatagatttccataaataaacaccatgataggattatgtaacatcttccagggaattttaaccgtttggatgtactacacagtggttctggttctaccagtctaaatgaattgacttgtttttttttccaccat

SEQ ID NO: 61221 - DNA, 945 bp, Homo Sapiens
  misc_feature (945)..(945): n is a, c, g, or t
agcgtggctggtgaggaagccgtcgggagccgccgccgccatctgagggaggtaccctggaaaccaccttttatcggtggggaagtgcagtcgcggtgggcggctctgggggccagcgaaacgggaggcctctaaatctttagttggggctgcattgccctggagccgcactcttgagtccgaggccatcttttgttggagaaggcgtcggcgttggcgttttcccgaggttgggctgtacagtgtctccgtccgcggaaaaagaagcctctgaacccgcgccggcccgcagcccccgtgccttccggccgctgctcgccgtcgccagaggctaggccacgtttcccccagtgccgaggtgtttctgtgaccctccctccactcccattcccttctgaaagggcacctgctcttggtgagaaaagaaattatagcacgaagagccagtatcagaagagtatccatcacccgcagcaaccgctcagggaacaccatcaaaaaagaacaaaaagggaatatctggatttcctgggcgaggaggagcgagtctgctcgggagctgttccagcaggcgatttttaaatactggtttctacgccctatacaacttggcttcacatacttttacaacttaacctttttatgattttaaaaaactggtctgttccgggacttctccggccgggacaccgggtaacggaggtctggccgggctcccggcggcccttgggacctcacttgtgggaaccttaacccatcgagacagaaatccggtgacggcgccaagaagctggaccaggggcttcggcgtcgaccacacctgttagagccggaccatggcccgagccgcggcggggccccggaggccacaggccaaggcgggcgaggcagcgctcgaaaacacggtgaccccaagagggagaagccactagcgcagaagggaan

SEQ ID NO: 61222 - DNA, 744 bp, Homo Sapiens
ggtacctgggaatataggcactcgccaccatgcccagctaattacttctgtctgtattttaatcttctctgctctttagatgttgaagtgaggccaggcatgtggctcacgcctgtaatcccagcactttcggaggccaggtgggagaatcacttgaggctaggagtggagaccagcctgggcaacatagcaagactgcatctctacaaaaaaaaaagaaaagattcttgaagtgaatgtatactcatttcctggtggtttctttctgtaaggatgtctgacccagctaattggtaaacaggaattctggcactcatttctgttttggcattctcaaccccagttgggcacacaagtgtttaatgagtatttaactgattgtgataagaataaatccatgcgatttctgggaaaaaaaacaaaaaaaaacaaaaaaaaaaacttgtgggggggctggggccctgagaaaaggtttttcaacaccccttcggttggggctgccgggggccccccataagggttaagcgtcagaaccgtggggcactaggcgcgcttccccagaggagaaaatccgcggcgaagcaaactagtgcggcgtgggtttctcccccaccaataacaaaggagcgcgcgggggcagccccgaagcggttgtggaaacaatctccagagggggagtccgggagaggacaacagaggagccgatcacgcgggaggtccaacaggaaccggaaataaattagc

SEQ ID NO: 61223 - DNA, 508 bp, Homo Sapiens
ttacgcacacaaatgtatatttattagcaagaaaaggcgttcacaatatattgataaaagggaaaagttgaagtttcctgccagtttgtgagaggcagctgttgcttagtgatcaataattaagaacacacaggctgtgtggaggcagacacatggatccactaattcactgtgaccttgggttaattgttctaagcctcagtttagtcatctctaaaatggggataaaatagcatccctcatagctgtggttaagtgagattatttgcacattcaattgacaatatttattgaacatctctgtggcagggaaacaaatggttcctgccctctgagagcttccagtctagcaaaaaaaaaaatcagaaatcccacacccgtattaaacataaaaataaattacagatgatggtacaagtgatcaaggaaaggtaatggatgtgatgaaactaacaagggccctgacttgtgctgtcaagaagcctctgaagaagtgacatttaagatg

SEQ ID NO: 61224 - DNA, 548 bp, Homo Sapiens
ttttttttttagaagagaaagagatttattttaaggttatttaaatttaaacaatattaaccttaaatctgctaaatccatgtttctttattaactggggtaatatagtgattctacttagaaacagacccacatagcatctatggcaagaaaccctcaccataagagttagcagattaagtgtgtaagttttgatcttggaattatcgtcactcacacgttgcatgattctagcacttctctttccccccagggatgccgaactctgccaattcgccctttagtggaatgagtactgggggagaaaaagtaaggtttctctttgatcatccccaatcactggcattaatcctgtttttcacacagctgggttttgtctataaagtttgatccctccttttctcatccaaatcatgtgaaccattacacatcgaaataaaagaaaggtggcagacttgcccaacgccaggctgacatgtgctgcagggttgttgttttttaattattattgttagaaacgtcacccacagtccctgttaatttgtatg

SEQ ID NO: 61225 - DNA, 513 bp, Homo Sapiens
ttttctgcatcaggaatgaaatattgtgggatatttatcattcacatgtgagttcatgtaatttatgttcaattagaattattatctattcagcagctgaagcccaagaactgctgatacactgcagatgagaaaacatttgctactctcccagctctggcctttcttaagctaaatgatgatcacaacaatatagatcacttgttctataaaacaattttggcttacatgtatagcaagctgcactgccagcatttacatttgcaacaacatttcaatcccttttttgactctagaggttgcaactcttcagctttattggttcagcaatttagtcccaaattctcatgaaaaatttacactttttaatccagcatttattcccttgaaatgagttactacacctatgtaaatttttttaatgtttgaaccccaaagataaaataaatacatttttaaataaccttcatgatattcatagttaaatacttcatctcaaaatagtcattgact

SEQ ID NO: 61226 - DNA, 378 bp, Homo Sapiens
atcttcacgaagctttattgcagctgtttcccttacccagttgaagtggccagtcattttaatttgcagttctatttacattcccaaggtaaccacgttcagtaactctctagaggctaagctgttaaaatttccatttttatacaaatagcaaagatgtttctttccctttctttctttctttctttctttctttctttcttttctttctctctttccttccttccttccctccttccttccttcctttctttctttttgtttgagacagagtttcgctcttgaccccgaggctggagtgcagtggcctgatcttggctcactgcaacctctgcctcccggattcaagcgattctcctgcctcagcctcccgagtag

SEQ ID NO: 61227 - DNA, 565 bp, Homo Sapiens
tttttttcttgaaaaatgtgtcctctttctttaatgttagggacagttctatacagcacagacataactgaagaaacacattactttgatttgggtttatgtattgtacttttaatcacttactgagaatatttcaaatttatattctcatcaggaaaatgtaaaaaagatactgatatatattctatgatttttatgccacaaacacccctgttatgagatcatttaataggaaaacaattatactgacatcttttgttccatttttcccattagatatatacatacaacttcaagatagtttaaaaataatcattcaggttattctaaaattttgccataaaattagcaaagtatgccttctgttaattgctaaaaccaatatttcacatataaaagcatgtgatctcattctacatgcagctccatttctgaaaattaaaaacctatcatttcatgggctaaattatagaactttctatattcgaagaactacttcataagactgttatgacaaatgctttttattacataatatttagtagtcatgctcaatcaacaaggt

SEQ ID NO: 61228 - DNA, 501 bp, Homo Sapiens
tttgtcttgttgtttctatcacaggaaaatttattctgtaaaataaaagtatgctgtgcataacaaagatcaaatgctgtactagatttttaagaaaacatttagcacccactatatttttttaaatgtgaggattgtgaacttcccttccagctcaatcttcacaaaattacatatactatacctcagggtaaaatctaactttaaaaagagttacaacatctttcaaataaagcaaattcagtctgtaggaaaataaattatcacttgatattggggtatatctttcttcaatcacttggcacatctgcggccagaaactccattcactaagtaaacgaaggaacttcttccttccaagggctgggaccaaatttcctgtgcaaaaaccttcctgtataattgaaacctgtcattctcccagcaaaggataattgagattagagagtgtgtaaaacaaaaatacaaaaatattacccaaattatttgtaccacatacag

SEQ ID NO: 61229 - DNA, 377 bp, Homo Sapiens
tttgtctgtcatttaaaagacttatatttacttagaaatgttgtaaacatatggtaaagagcttggtgttttattacatttcttgaaaataggtgagtggagaaatggaaaataggttaatcttttaaactgtatttataattgcttcctttccaaagccaatgagcatcttttttctctttttattataggtctcttgttggtcatcagccatagtgcacagcagtttttagatgtgcctacatgaacagtacacacatactcacacactaacatccacatacatctcccttttcagtggcttaggcagagcagcaaaaaacatacttgtctcataccgaaaggatttcatttacaaaagtaaaacccgttattgt

SEQ ID NO: 61230 - DNA, 520 bp, Homo Sapiens
ttttttaaaattttttaaaatgtactgcattttattatataaaagtacaattggggggaggggggacggatagcattgggagatatacctaatgctagatgacgagttagtgggtgcagcgcaccagcatggcacatgtatacatatgtaactaacctgcacattgtgcacatgtaccctaaaacttaaagtataataaaaaaagtacaattagtaaaatatatgaataatatactagttttctcataatgcaaaagaatattactcttaacacctaccttgtgcatcactcaatagtataagttaaccacaaagaacctctccacttagattttcaccatgcatcttacattttaatattcttactcatccatagaaaagatcataaataatgcccatctaatgaagaagaatctctcatacctctgatgcagcaacaaatgatcacaagctttcacaagtgaataagaatgaagaaacagcagaaaataatgagttgagttacatcatttgcttttca

SEQ ID NO: 61231 - DNA, 2702 bp, Homo Sapiens
ggaaggaatagattactatgcatttttgagaggatgaagaaggcttcttggagaaggtttctgaaaagagatacggaattaagagaaatagaaaagagcactgacgaagcactcaggatggctattcaaggaattggggatccacagcagctgtgcacaaccatccctaatgccagaaaaatggggtaagggtgaagggaactgggtctagagctttgcatgtttttttctggttaacccttagagtcaccctgaaggtgtggatcccatcttataataaggtgaggacactgagtcaggaaactaacttgctaaaatcaagtcctcccagtcctcccatcaggtccttccagatctggaggagccaggatttgaactcacatttgtctgacttcaaaatccatgctttttcttgtgttccaaattgcacaatggagtcactgccagttcaagctcctatgaaaagggatggatgtgaaaagtcatttgttgattccacagatttttagtaggtaccatgtctcctgcctttatcactatcctactcctctgctacaacttctctgctacaggcacccactgcagttacttgatatgagttaaatgaatccatccatccaaacttccattcattgaataaatacttagcaatggcttcctttgtatcaggcactattctaggagctggggctacagtgcagatggaaaccagcaaagctcactgccctcatggagcttatatgtgagtgaataaatctcagggtggttctcctgtcataggtcctggctcctctgccagctcttccaaatgggttcagagaggttttctccttgtcctgttgtgtaactgataatcccatggtggacctcactttgctattcatatgcactaagtagtttatggtgtgctttgtggctggcaattgtgacagattctattcttctattggtatgtggtttctttggggcatttgtttggatactgatggcatcttccgggggtctgaggcacctacacaaacctcaggtcactatcacgtgatactggagttgcctgttaaattatatttcttcttccacaaaactgcaggttccctgagggaaaggtctatgtcctgctcatttttggatccctaatggctggcacagtacctggtgcataatatggttcaacaaatatttgtaaaatgaatgaatcaaatagtccttcaaagcatcttcagaatcaagattgtcatctagattgcacccgaagtttatctttctagtattcagaatataatcaatcattgcttaaattattccatttcatcattcttgaataaaagctactaattttaaatactaatatctgagatatcttcgaaaagaagattagtcgttgtatgtgttgcttataaattttctctatggtggaaaatattcccaaaccatgtctaagcaatgaaaaaccagtgttctggcaggaaataaactgatgtttgttgtgttttgtatctgtcttcccgttccaaatcatttatatatacttgatggtctgtgggcttgacttgcaagtattttcctgggagacatttttattcaaaagacctgtattgcctgccaaaccttcatttaagagactcattatggatgtcatctgcatcattgcaaacttttctggtcgtctctataaatagcaagataatatttacagagttttacattggctcttgaattttaaaatattcttatagacaaacattaattggaatggggggtaaggaggtaggaatggcttacttgcggaaatgcaggctcattgttgtgtctagtaggtgctaggtgcattcacacatctcttaagctttaaacaacctattgagccggtttccatttccttgatctattagatttaaaaaaatgaagcataaaggagttggctcttgccctaagtcatactactgatggaatgagaatacaaaccaaaaacactttattcaagtccaggaaatatctgccttgaaaaagaataacttaaaaattaaaagtgtcctctatttgaacatgaaaacagctaataaagatgtgttattttattttattattattaattttgtcctcccatattggcaaagataaagcaattgacaaaaatggaattcttgttcaatactggcaggagtgaaaattggtagaacctttctagaaggcaatttggcaacatgtatgaaaacctaaatgttgatacacctttacccagcagtttgtttaggaatttatcctaatgaataaaagttgtccaagtcttcaaacatgagcccaaaggtatatttcatgatgtttatgatattaaaacattggaaacaactgaaacatccttcagtaaaagatggattaaataaattccatgcagttgtcatttaaaaatatttagatatatgtttattgctatggatatatgttcccaaaatattattgaatcaaaaagtagactacaggatatatgttgaatatgagctcatttataacattgaatattttaagataatgtatgtttcatagagagatcttcaccaaatgttaaggatttttttttctgggctgtggtatttgggtgatctttacattcttcagactcatgtgtgtttgaaactttttataatgaacatatatcatttttattagaaaagaataaagtttttgaaaaaaaaaaaaaaaaa

SEQ ID NO: 61232 - DNA, 547 bp, Homo Sapiens
tctcgctcgccgagctccagccgaagagaaggggggtaagtaaggaggtctctgtaccatggctcgtacaaagcagactgcccgcaaatcgaccggtggtaaagcacccaggaagcaactggctacaaaagccgctcgcaagagtgcgccctctactggaggggtgaagaaacctcatcgttacaggcctggtactgtggcgctccgtgaaattagacgttatcagaagtccactgaacttctgattcgcaaacttcccttccagcgtctggtgcgagaaattgctcaggacttttaaaacagatctgcgcttccagagcgagctatcggtgctttgcaggaggcaagtgaggcctatctggttggcctttttgaagacaccaacctgtgtgctatccatgccaaacgtgtaacaattatgccaaaagacatccagctagcacgccgcatacgtggagaacgtgcttaagaatccactatgatgggaaacatttcattctcaaaaaaaaaaaaaaaatttctcttcttcctgttattggtagttctg

SEQ ID NO: 61233 - DNA, 84323 bp, Homo Sapiens
ctgagactacaggcgcacaccaccgtgcctggctaatttttgtatttttgtagagacagggttccgccatgttgcccaggctagtctcaaactcatgatctcaagctgtccgtccgccttggcctcccaaagtgctaggattacaggcatgagccactgtgcccggccaacggtgtcttttttttttttttttttttcctaaagtaaaatgtcagatggccgggcatggtagctcacctctataatcccagcactttagtaggccaaggcaggtggatcacttgagctcaggagtttgagaccagcctggttaacatggcgaaccccgtcgctaataagaatacaaaaaaaaaaattagctgggcatggtggtgcacgcctgtaatcccagctactcaggaggttgaggcaggagaatcacttgaacctgggaaacggaggttgcagtgagccgagatccgccactgcactccagcctgggtgacagagtgagaccctgtctcaaaaaaaaataataaaaataaataaagtaaaatgtcagaatatgcaaaaatgctgtacttatttctgttaataccttgaaaatagtggaagtttgaagatttttaattcttaaagagtccaagctggaagatgactgctactgatggggtttgttcaacgtactgattccaagcttggcgaccatcagcaaactggtacctgcaattaaacctggagacataaattttccagagtggtagaatctcattcccataatgccagccaaggtctcagacgtagcaaggaaaacccaagcatcccttggatcctgagagctgataagcacccaggcctgttaaacccccagagaggaatagcattctacctgcttttgcatagtcagtgatccctccagaggcaaccagtgctgcgtagccaaaacccaaaccagtgcaaaggcactagtggaccagtatcctgcggcattgttctcttctcaccctgtcctgtgcagacagtagactatagcaggcctgcatttgcaccgctctcctgaaggtctgtactggtcaacaagatctccttatccttttaatatctataggacatttttaaatttctcttattttctttttatttttaactttttttaaagatagaaataggggaggccaaggcgggcgaattgcctgaggtcaggagtttgagaccagcctggccaacgtggtgaaaccccatctctactaaaaatacaaaaaattagctgggtgtggtggcgcatacctgtaatcccagctactcgggaggctgaggcaggataatcacttgaaccggggaggcggaggttgcagtgagctgagatcgtgccactgcactccaacctgggtgacagtgagactccatctcaaaaaaaaaaaaaaaaaagaaacaggatgtcactatgttggccaggctggtctggaactcctggccttaagcaatcctcctacctcagcctcccagagtttttctttgtttattaatcagtctttccagaaacttactaattttatttgtcttttaaaaaaaatttatttccattttctttgggttaattttacttttctaacttcatgagacagatttattttgatttttaaatttcattaattttagccatcctccttttctaatatgtttatttaaggctgtcattttcctctaaatactgctttggctgcatctcagtttttgatacatagttatttccatcgttgttcttttatttaacaaatactaagtgcctcctatgtaccagatagtgggctagatactaagagttcagagtaagcaaaacacagtactagcacttaatgagctcataatctagttgcagaaatagatatgtcaacagattattatgtaaccatataataagtgttatgtttgaggtatgtaaatacaaggggctgtcacagaacaaactctgcctgctggagtatagaaaggttccatggggtagatgggatgatattcatccatccatccactcatccatccatccatccttatagtcatttaacaagcatttgttgtgcatctattttatgtaagtcttgtgctaggtgctggaactatggctacgtcttgaaggatgtgaaaaaaataggctaatagaacaaggtgggggtgggattttaaagcagaagtatcaacctatgcaaaggcacagaggctcaggggcatggaaatgcatgatgaagctggcatgatggggagtagctagttcaccaaggctgtgtgtggtgtggaaaggtgtttagattttggggttttgggttggaaatgagaagccatggaacttaaagaaaataaacacgttttttcatttgatatgtattctggcagtagaataagtgtgaggcagagaccagttaagaggcttttggactaggctcaaagcaaggacagtaaatgtggagagatggatatagatccaagagataactaggagttggaatcagtagaatggaaggatcctggggagttaaaaaaaaaaaaaaaggcataaagtatcacttccaagtttctggcttgcgtgactggatgaatggatggtggcgccattgactagggtaacgaataccgaaagggccacaggctttggcagagaagttacaagtttggttttagatcaggctgagcttgccaaagaaagtgctatccaagagcatctggtctaaggaagcaggaataaacaaaggagcatttctggaagtggagagaggatcagtgccaccgctagccaatatggtacctttgtacaagttattaaaaaaaaaagcatctctccagggcagaccaattagaaaagggcaacctttcttcacagtagactcagccacttggcttggcagaaagcccaggatggattttagccccattcacacccttggctgggtacctatgtatagtgcacagattatacaaccatacacaggagccttgggacttacttgggtttagggatatgcctaagagctcagcccattgttcaacaatagaaaaaggaggcaggaaactgaatttggctgggggtgttggtcagggaaggaatctagtaattgctgaaggatttggtggtcaggcctctttccagtggattacattgaatcttgtcctcacccgtgaaaggggttactatgagccctccctatcatctaagggcattatgaggactcaaggagaccatgtatatgaagtctttccggcatctctgtacccccaatttctagtaccagacatggcacacaggtttaaccattaaatggtaaaaggaatggtgaaggtcaaatgaagaggtgcatagtggtaaactgaagaatgtatacttggtaagtgttgtgactagtgagcaaatatgaagatagtacaggcccagggagggacatcttcaggggaccagtggtaagagataatggcagataaagagggtgttggtcagaggtgtctgctgtggcatgggggtctcagagcttggtctctggagtatgggtaaagggaagcaagctgagaattgaagcaccaaagagcagcagaggcgcctgagacaagaaatctggcaggtagtcagccccttagctgatgttacggtttgggaagagtgaggcaaaaagaagaaagtcatccagggaggaagaaatggctgttgggaagggttctgtcatagtagaagagatttgggaaaagtgaagaggtcttatgcatgatgatgtggaatcccagtggcaagaagcagcaggatgatggcatcctgaagtctactctctcttctctttgccctactcagtaagaatggaggaagactgagtgggagaactggagggtttcttgagggaacatagtaggtgatatgttatactcaggacaaaggatagccggaagagatgagctctagattggtttccgcgtaggtccttgagagtttgatagcttgcttgatccattgatgaacaaaatatctgttgtggcccaactggatcaggcagttgagatctcaaggtttggtacagtgtctgaggaatttaggcagctgcaagacaggtgcttctaggccgagtgcggtggttcatgcctgtaatcccagcactttgggaggccaaggcaggcggatcacctgaggtcaggagttactggccaacatggtgaaaccccgtctctactaaagatttaaaaaatagccatgtgtagtggtgggcacctgtaatctctactcggaggctgaggtaggagaatcgcttgaacctgggaggcagaagctgcattgaactgagattgcaccactgcactgcagcctgggcgacagagtgagactctgtctcaaaacagacaaacaaaaacaaaaaacaggtgcctctagccacttaggtcccaactaaagcaaaaagggaaaaagcatcttcctgagagacagaccactccaagcctgaattatccagggtagtagccaagagaagcagagctagaatccagtcctacagccttagtgaagacccaggaagcactggtaacagaagtccagcactctgtatttcataaggatcttttatacatagatctgacttaatcatcatagtgatcctgtatggtgggtatctgcatttcacagatgacaaaatagaggtgtagaagtttctagaagaagctggagctatttacctaagggatatgaattgattcttgtgagttgttacgtctttagttgtctgtagccttcgactggaggcagctcatgctaatctggtcagcctacatgtaactggatattctagcctttaaagggtgtttgtcctctgttagaggctaggactccacctcaggttagattgaaggtgctgcaggagtattcatctccctccccaggaccctgagacttggaggcatggacaggacctgggctgtaggtcctgaccatagtgtatgtgtgttagtgtatgtgtgtgtgcacataggctgtgtgtgtgcacataggctgtgtgtgtctgggagggctgtggaatcagtatatccactctgggggtacccatcaagcacacatatacacatttgtgtaagtctctgtaagtgttcaggggaagaaggatcaaaaaagtgtttctttttttttttttttgagacaggggctccctctgtcacccagactggagtgcagtggcatgttctcggctcactgcagcctccgcctcctggattcaagcaattcttctgcctcagcctcccaagtagctgggactacaggcgtgtgccaccacgcctggataatttttggttttttgtttgttttttgagacagagtcttgccctgttgcccaggctggaatgcagtggtgcgatcttggctcactgcaacttctgcctcccaggttcaagcaattctcctgcctcagcctcccgagtagctgggattacaggcatgtaccaccacgcccaactaatttttgtatttttagtggagacggggtttcaccatgttggccaggctggtctcgaactcctgacctcaagtgattcacctgcctcggcctcccaaagtgctgggattacaggcgtgagctaccatgcccagccgtgtttcttgtttctcccaacccttccacttcttcctattttcatgttttctctctcatttctctttttcctctcctttccttgtgagtttagatggcattgtgattaagttctctggcacaggacttgtcactcagctttgtcatgtcagaggacagggtccctctgtggctgagactttgtaacttcagtcagttgctgaataatccagagtacttctgctgacagtggcctgagcgggtgggggggaagtgacgggcagaatttggtgtagccacacctgagactgagcctcccctcagccccgtgtctggcaccatcatggtgggtgggaccagagggtacatgtgaacacagacaaagatttgttttgggggtgaaggtagagcttggtcaggggaagccgaagaaagtcatatatcaggaacagcccaggagttagcctgtctgtcccctttccacagcaacaggtgagaagaaggaatgctggtcgtgggagtcctacctagaggagcagaaggccattactgctccagtcagcctcttccaggacgtgagttggacaatttccccgtaggaacagcttgtcttcctagcctagggacacaccaccaacctcaggccttctggcgttttctgtgtcaggcatgcctcagtggactggcagaatggaaagggagagactgtttaggggcccagagtggaaaagggccccccataaggggctggcagggtgggaagaaacagagaggtggaagctaggctcactcatcactgggcctgcagacttttgaattctggtgacttctactcaattcagcattgatctttccatgactttggtgagagggagcccttgagtccagccctgactcacccacatttttcaagggacctgggagatattctctctctctctctctagatccctgtagtaacgatccccaaataagttgcccctttggaaataccaggcgggtggggcctaaaggcagctccttcaccccaagcccactaggcaaggataaggctggatggaagctgggtcctctccactctgtgcgttgacagtcccaggcagtcactcacaacaagaatggcttcaaactgggcatgaagttggaaggcattgaccctcaacacccgtccatgtacttcatcctcaccgtggctgaggtgagctggggcttggtaccacctttctgatgatgtctctcagtgcagattgatggatcttgctggggacatagaaggaaacacctccctcccctcagagcacacacaatctagtagtggatgaagctggaatacatagaaagcttaaaacaacaaaaaccagatggagttcatgggacagtcctattattggatgaatgtatactgtccactctgggggagcttgaggagatcccgagggccagggatgttggcatgagtcaaacaaggtccttgtcctctaggagctcacagttgtctggggaatcagccaaataaacatgtcagtgacatgccacaggggtggcagcagacttgagctgggaggcacagttgggtcagttctgtctgaggagcagcaaaagcatagaggaagggcctcctttgcagagtcttgagagataagttgtgaataaggagggagctccaggcagaaggagcaaagtgggcaaaagccctggggcatggaacagactgctaccttcaaggaattgccactagctcagcaagactggaagcagagtgcgagtggggagcagtgagagaaggtagcagagggagcggtcatcaggagccctcagcagtcctgagccttggtggctgccctcagaattctgtccagggctcaaaagggcaggaagctgtcatagggtccacctcccttgcatccagaactcagggctcatgagtacatgaactgtcctcactgtagaataggacagggtggggtacaattgggaggaaagaaaggtggggttggggaacctgctagcattagagcccctgagaccaccagactgggccaggagaggtgaggcagatggggagtggggcatctcctgacattggagttcctgattcccctcatggggccaggtatgtggctatcgcctacgcctgcactttgatgggtattctgagtgccatgacttctgggtcaatgccaactcccctgacattcaccctgctggctggttcgagaagacgggccacaagctgcagcctcccaaaggtaaggcctagctgggttggtcacagtgaggcagtgagtcctcagacccttcgcttcttccccttgggtccccggcttccagctcttttgttttctgaccctgtaccctgttccaaagccagcctctcttcatcgcatcctgatgactctgcgctggggccaagttgaccagaagccctagaacttccgctttgcacttgccctttgagtgtctactcaagtcgtgtcctgcttcagtagtggggaatccctgggcaagttcttgagggttggggggaggtcctcaggcatgcctgattctgctgcttcactgtggggtgcccttgctgtggcccagcctctgcacggcgctctgttcatgcccctcgaggggcctaggttacaaggaggaggagttcagctggagccagtacctgcgcagcacaagagctcaggctgcccccaagcacctgtttgtgagccagagccacgtgagtgcccctgagtgagagtggatgtcactcccatgtgccagagttcactgcagctggcccagggtatctgactcatcagaagggagctcatgtgctggttctctcagctttgttctgatctctcatatcagatgggaggggtacagctgggcagggtccagggccagagatgggaagctggttataggtttttcccgacttccctccctcctttgctactgcagataccctgtcctcacatccccttggagcccctggcccactaccctagtctgagcactgagatgtcattgctcatatattcttgctttggcttgctctgcagttctttggtgtaaggtcaatgcctctattctgggagcttctttttctttccttttgcccaacattgagactcttccatttatttccaacaattcatcccttgtcctttcctctgttcagggcagctggcagcttatccagcagttaaagtatctcataatcccaaccaaaaggcctaagagatacagggagcctccattaaaaatatcatactggaccaggtgtggcggctcatgcctgtaatcccagcactttgggaggctgaggcgggtggatcacctgaggtcaggagttcaagactagcctgggcaacatggtgaaacccccatctctactaaaaatataaaaaattagctgggcgtggtggtgggtgtctgtaatcccagttactcaggatgctgaggcaggagaatcgcttgaacctggggggcggaagttgcagtgagccaagatcacgccattgcactccggtctcagcaacaagaacgaaactccgtctcaaaaaaaagaagtatgtatcagtcttactggctgggtgcggtggctcacacctgtaattccagtactttgggaggctgaggcgggaggatcacttgagcccaggagtttgagaccagcgtaggcaacatagtgagaccccatctgtacaaaaaatgtcattaaattattagctgggcatggtgcatgtgcctgtagtcctagataccacagtagctagctgagctgggaggattgtttgagcccaggaattcaaggctacagcaagctatgattgtaccactgtaccccagcctgggcgacagagtgagaccctgtgtctaaagaaaaaaaaccatattgaatgtctagagtttccctgggcccaggactccaccatgctcttcaggcagagacagttactcccctaccccagtccagccccagagttcatacttgcaagttcccaggtgacaggtggggtcctgcctgctgttgtgacaacgaatgccgacttttaattcaaactatttaaatactggccccgccgttgactagcattgtgttctgggccaagtgatttaacttcttaaatgggaatagggttgttgtaaaggtccaaggaggtgatgtcttttgaagcttacatggcaggtactcagtttatactggttccctgtctgcctctatgccatagatgtccgctgtttcttcccagccaccccactgttgccacaactgcctcaggacaagctgggaagggcttgtctgggtagggaagatttatacttggttcaccaggttctttgggcgaacgcatagcctccttccaggcacttaccttctgacacaagccaggcctctgagtgcaccttggaggccagaggttcctgagtgcctcagggctcaggttatgattctgccctggagggccctctttcccagcttatttctccttcctttctcactgcccacaccccaggctttcctagagaacctattcctttgtttgccaatgggctctgggctggtcttagccagcttggccctggccgtggcagctcctttttttcccctagagtcccccacccctgggcttccaggtgggcatgaagctggaggctgttgaccgcatgaacccgtcccttgtctgcgtggccagtgtgaccgatgtggtggacagccgcttcctggtgcactttgacaactgggatgatacttatgactactggtagtaggagggcccagacttggcctcagggggtgaggggatggcagggggcaactgctttcatatctcaggtaccatgtggcaccactcagtccagttctgacattcagatcttcctccggttggaagataattgaattgagctttatcataagaaatacagctcaatattaaatgtttcatctaaaaataccatggttaagatgagcaagcccctatgattcatgattttcccttagatattatggtgatggtagagtttgtaattcatgttgcaattttctaactttgtccttgccatctgtctccctctcactaagaagtagatgagggtgggccctgagccatgctttcagaggatggcaggctcagggcctcaagtttctcttgggacagtgacatgttcttggatttcaggtgtgatcccagcagcccctacatccacccagtgggctggtgccagaagcaaggaaagcccctcacccctccacaaggtgaccctgcagcctgagcaagccccctttcctaagcctggctctgcttccctctccactgacccctcaccagtagtgccccagtagctggctctctagggtcagggtgagagaacagacatgtcctgaagcctcagcttcttggcctgggagttgagaaccctttgattttaggagactcctgtcaaaccctgactccactggggtttaggggaagaaagttacatgaccatctcagcaaggaaacagggaatcagaagtaaagaaaatgagtccttcatcctgggagtattgcattggcccaaatacagtagagattcaaatggggctggggtgggagcaacaggccaagagtgacaggagtcagggttcccagacagccctgtgaactattagggtggtgccttgcttggttctactagcacccatctgcctgaggagcccagtgcaaggagctggctgtggtgatggtgggagagattctactccaagggcttctgtcccttccatgttcctggtcctgcttgggggcagagggcttccgcagtacacctgggtggctagacattgctctcatcctctcctccagactacccagaccctgataacttctgttgggagaaatatctggaagaaactggggcctctgctgtccccacctgggccttcaaggtggtgagtcagtgctccctgaccccagagctgagctcagaaagacatggagcactcagctagccaggctggggccctagccttcccctttgggcaggccccagtttccccaggcacagcatttgggctccctctgtggggctcagctctgctgagctgcgccttgccctgaaggcagctgtcccctctgcagcgaccccctcacagcttcctggtcaatatgaagctggaggctgtggaccgcaggaacccagccctgattcgcgtggccagcgtggaggatgtggaggaccatcggataaaggtggctctgggaccctagggctgggaagtggacaggccagttgggcaggaattctgtagactgtttagaggtcaggggcatcatggcatgagagagatgaagccaaagatcttgaatctcattcttgcctcatctgtgacttatttttgtgggcttggacaagtcattttccctctctaagccttacatcatctgtaaaatgggcctaataatcctcgtcccacctaaggattgccagtgggagatgccagtaacttaatgagtgatgcccttggaaaatgtggtggccaagacagattattgcagggttggccccttggttctttcaatccaggatcttgcttctgacaggtcccagggatggggagaggaccttctggctgagctgggctccatgagaaacgcctgacttccaagagcctttcctccccagatccactttgatggctggagtcatggctatgatttctggatcgacgctgaccacccagacatccaccctgccggctggtgctccaagacaggacatcccctgcagcctcctctcggtgtgtacccctagggcactctgatcttttcctttccccccaggttctgacaatcctatagtttgcctacagagctctgactccccatgcccaaatatgacacagagggctctgatgcctaccatgagttccagaatcccccatctgccccacccccggaccatctgctacactaagcagtgcttctggctaccccagttgtcggggtttggggtgttgaggtgcaaaggggcaagctcacttggttgcatgtgcttcagaggtggtcaggcacccagggatttctctcagcatctagcagagccacactgagcgtgcactgtttgctaaggacatgatggcttcctaaagtaaattctgattgtctgtgcaggcaggggttagagttcaggtcactgggctgctcagccccattttcacccttaggatttcccttccttatttccctgctgcaaccgtgtttgtctcacatggggtgttgatccttcttgaatgttctccaagcataggcagagccttaaaaaagttaccaaagtcttggggatgaaaacaagaaaaagaactgagagtgacatgaatctgccagatgtggcttctaaggtatggctacacccaaccagctctgagtggctcttctcccccagagttctctcagagactgagggcatagcctgcaggtttcagcaaagtattaacatatgagagctaagccctccttacccagagaggggcagatatccagtaacacagaatggtgtcacagccaacgcagggccctcatccttggggagtgggtttctagtgctgatctccccagtggaaactgctccttccgtgccccacactccccacccccaggactccatgaggaccgcctcctttctgctcttttaggacccagagagcccagctctgcctcccctgggggctgtccccctctcagctataggagcctgccccacactaggacctccaaatacagctttcaccaccggtgagtgaaggttcctggtgagagaccctcagcgttgttttgcacttactgcatgcaggcgactggggtccaccaaaacacactccagctgggaccagggctgaggagggctcagcggggaccagtggattaaacccaactgaagtctcttcttccccaggaagtgccccactcctggttgcgacggctctggccatgtcacaggcaagttcacagctcaccattgcctctcaggctgcccactggctgagaggaaccagagccggctgaaagcggagctgtctgactcggaggcctcagcccgcaagaagaacctctcaggcttctccccaaggaagaagcctcgccatcacggccggtatggaggccagggaatcagggcccgggcttcctgggggtgtggggccttgtagcctcttggactgggccagacactgattccctgccatggacctggtccgtctttctccagaattggacgccctccgaagtatcgaaagattccgcaggaagatttccagagtaagtctgggttatctgctcctatgtcctccaccacagagtgttcacagcgagtgctctgtcattggtgggatgagacagatttcccagagtgggagaagctagaaggagggctgtgcctcttcgtttgagatactgagagcacagagcagtggcaaaagcagtggaggggccttgagtgaccttgggttccaatctcatgtcccccatggccttgctgtgagtctgtggggagggtacagagcttctcggggcctttggttctcactgtgcagcaagatgatgctcctgctcttctctgattctaggcttcctgggaaggaggccatggccatcactttctacctgtgtgatcttaagcaagtcacttaacatctttgagcttcagttttctcacttgagtaactggataaaacctgcctttccattgtcaatacctgaaataacagtggttactaccactgcttactgagcatctactatgggccaggcactatgccaggttctttacacatactgtgtctaactctcacaagagttctctaacatgtatattgttcttctgtgagaggaggaatgtgagtctcagagggtgatgtcacttgcccaaggtcattcaccttgtaagggggagagctggcattccaactcggatctggcctgactcctcctgctgcatgctgctggtataagagacataaagcacctaacccaaatgtcagttcacttctcactccccttgcactagcgtgcttgctgctgtaacaaaaataccatagactgggtggcttacacaatagaaatttattttccacagttctggaggccagaagtccaagatcaaggtgttggcaggcttgatttcttctgaagcttccctccttggcttgcagatggctgccttcttgctgtgttctcacatggtctttcttctgtgcacaagcattcctggggtcccatgatgtgtccaaagtgtctcttcttgtaaggataccaattgaattggattagggcccatcctaatgacttcattttaacttaatcactctttaaaggccctttttccaaatgcagtcccattcagaggcactgggggttagggcttcagcatatgaattttgcggggacacattttagcccataacatacttcagcgggaggggcatagtggctgagccctcccctaggtggtgaattcatcttacatcttcagccactagtacagggcctgatgcacagcagggacgcctcagttgaatggaatgcatgtcattttaaggctaaaagagaccttgagaaatcacctggtttagtgcaccttggcgagacccaagctgtcccaattcttcaagaacagtctctgtaacctgggcagtaagtaacatagtgataaaaagcatagccctgaagtcagactaccttttacaggctgagagatcttgggtgggtgacactcctctctgagcctcaccttccttatctgtaaaatgctgataataatcgtacccaccgtatgatgtggtgagaggcttaactgagatgttccatgtgaggtgcttagcacagctccctgccagtattattagtctgagtctcttgcctcacttcctcttgctgtcatctcatactgtttcctctttgtgggaacagaagcagtttcttcagcctcagacctgagtgatgagggtcttggccagcacctagaccctcagagtaaggactcctaaggatcaaactgcagtgggcacctcttgtacccatctgtggtacccatggtcaagtccactgcaggaccaagttctgaccaccagagggcacttgcctactgtgttcatcccagaattaggctgtagaattcttgggaagctacatctttccagaggctgagactatgtcacggaactggcaaagaagggctcacccagatccttgaggcacttcaaggatagagcaggggtcattgcccaggtctcacttccacagggcacccctgctcttctagctggcctgtcacccagaagagccactggtcactctgggttttgttccagaggcaacttcttacatactggtgggtagacctccttagtgtaggctctgaggtttgctggtgaacaattccataggaagatctgcccggagaggacagggcttggctgggcttagtctttaggcctaggagtgtcagctactgaaggaactgaggagccatgtctgacctgcaactggatggtctgcagttagataagacactgtaactgctggtaagcactcctggcctgtgctcttccctgtgctctggggaagaaagataaggagaaaagctccctacaaacttgatgttgtctcccaaaccccaccccagggtatgaaacccagatacagggtttcagagagggagtacctgggtgtaccagaggccaaacctgtggccaggtagatgaggtgctagtggtgctagctgtcatgagagatgctgagtgtgccccagacgggccatgagaggagctggctgagcagggagatggggctgtctggggtatgggcaggtattaggatttcgctgatgaacagagagagcagcaggaaggcagtggcacagaagtgtggttggtagggctgaggatggaatcccagaggctttgtgggtgaatggaggtggaaaagccaggctgaaaggctgacactcagggagagagggcaggacaatctgtgaccaacagggagggtctttgacaagagggcacttggaggtgctgcattgatgagcatctggaattagcaccaggagaataaagagccaatgctcctggaccatggacagaggctgggaaaaccccttgggaaagtggccacattgcacaaggccggccaaggctgacagcagtgagtggggccaggtttgtcaaagcagccagagggggatgaagtccaagttggcacgtgccaggccccaccaagggggaggccaagctgagcagcatcggtcatcagctcagtacagctgcttgaggtaggaggttggggccagtgatcccagaggcagaccaggaagcaaagccacaggcaacatggagctggggagtgggtcagggatcaccctctagtgctggcataggcagtagtacagaccgggctggtggaggaaggggaggaactggagcttgaggcaatggcagtggccagaggggtggtcttcagcctggtcagggggactgtgattctgaagcagaatcaccctggctctgagaaagttggtcgtggcccggaaggactcatgagaagaagagtaaacagagtggacttctgacatcaaggctgagcttgtttggatgttaaggacccttttgatggttggcatctagaaaattatgtctttagagatgctgcagcagctccaagagagtatccttgcagggcccagggtggtgcagcctcagagagacggggtgagggtcattccgaatagctgacctgagagtctttaagagagtcactttaccagcaggagtgaacactgtgtgaggagtcaggagatacggctcaccctcttgactctacaggctgtcagaaggggcccggagtcctgtctactctgccagccagtctcctgagtggtgtgggtatgcatgggcttcgggaacagtttagtcatcctcgttggcctgccagcctctgcctctgctttccagccctcacgcccgatgtcgtgcaccagtccctcttcatgtcagccctgtcggcccaccctgaccgctcactctcagtgtgctgggagcagcactgcaagctcctgccaggagtagcgggcatctcagcctcgacagtcgccaagtggaccatcgatgaggtgaggagcgagggcccttctttatccttctcttcctctcctcctccctctcaccataccctggtggaaaggcccaggtcaggtagaacccggtaccactcctggcactacctcttgctcatctgtcctgtgcacagtcccttctagctgcccagtaggggctgactgagacccttcctgataggtccattatggcagagggggcgggggctgtgctgctgtttcagccagaaatccagcaggagaggcaggcttcggtcccaggcctcagaagcaaggggcccaacttggcacatctgccagcatagaaaccctaggatccttttaggctggtgagaaaaagcagcattggcacagctcagaagcacctaggctgtggaggccagctctccctacatgcctaagctctgtcccctggtcaacatgtcatctttggtttccaaggtcttcggctttgttcagaccctgacaggttgtgaggaccaagcacgcctcttcaaagacgaggtaaggtgcaagtgcagagtgggagacagagccggggtcactgtccttaagacggcaggaagcaggtgccctccccagcgtcacttctgctaaggagggacccgtgttgccccaccaggcaagaatagtcagagtgacccatgtatctgggaagactctagtctggactgtggcccagcttggggaccttgtgtgctcagatcatcttcaggaaggaaaaggcatcctggagacaggagtccattcactcctctgctctctacccactcatttgcttgccaaacttagctttgccagtgatagtcaatattaaagtgtacttttttcccctttaatccaatatagttgataattaaagtgtattttgaatgacacagatattgtgatttactgcaaggatcctaacacacacttaaaatcaagagccaaggagtagtgagttgtagataaaaaaagaatgtcagctttggagacagtctgggtttaaatcccagttctgtcaatttgagctgtttactgtctctgagcctacatcttcttgtctgtaaaatggagataaaatgggtttaatgaggtctaccttgcagagccattgtgagcattggaaatgatgaatgaatcataccagaacgtctagtataattacagtcatgcattgcttaacgatggggatacattcttagaaatgtgtcactaggcaattctgtcattgtgtaaacattatagaatgtacttacacaaacctagatgttatatgtatttttatttacatgtatattttcacatgaaataccaaatgtcacagcattattactgaatgtcagtcatttcccctacttgatctgcaatgccaatatcaagggccatgtatcaggtttctgtatatgttccactataatcttatgggaccatggttttaaatgtggaatcattgacagaaatgtctttatgtagcatatggctgtgtatcactagtatataatagagcaatattatggaggaatatgtagatccaatcactttacctatacaaaatgactgctatggtgggaacacaataaacaccagttttgacttttagtgcatagttgtccttaagtaaagaactttgtcggccgggcacagtggctcacgcctgtaatctcaggacttcgggaggccacggtgggtggatcacctgaggtcaggagttcaagaccagcctggccaacatggtgaaaccctgtctctactaaaattacaaaattaactgggtgtggtggcatgcacctgtagtcccagctactcgggaggctgaggcaggagaatcacttgaacttggaaggaggaggttgcagtgagccgggattgcaccactgcactccggtctgggcaacagaacgaaactctgtctcaaaaaacataaaaagaaagtagttggctcttcttgccctggaagagtgtctgtatccaagcccagcacagccagtttcctcctttgagctgtgtgtggtggagctcccaaactcctcccacttccaggtgctttccttgccctctgtgttggtgatcttctcttcatgtacgtgtccagagctgaactccctgttttcgatggcctctggccaacatagaacacaccggggtgctgctcccctagaagtgttttaattgagataaaatgcctatagagagataggcacacatcttgaaagtacaatttcacaggttttatgacatgtctgcccttgaactcaacatttcaatcaaggtacagacatttcctctcgtgttaagtcatacaaaaaaaatttaacaaaaaaaaaaaaaaaaaaagaaaagaaaaagatacagacatttccctcataccagaaagttctttctcagccccttttagtcagtccgcaccccaaaagacaaccacttttctaatttctagcgtcatagatgagctttgcctgttctggaactcatataaatggaatcatagagcatgtactcttctaggtctgtctctgcacagtgtcatgtttttgaggcttctccacgttgttatctgtatctgtagtttgtttattgctgactggtgttccatttcatgagtataccataatttcttgttaatggtcaacattagggttattttctcttcccctagatttgaaccctatttttttgttagcaaaacttaagtttgccctagctttattatagccacatcacactagtttggggttcataaaagcccccaggtggttttcatgtcaactacagtcgaaccaaattttccagtgagtacttgcaccactgagtttttttttttttaataacctcatgtaaaactttacatccaccctattaaatgttatctggttggtttcatagccttgttttaaatcttgattctgtcatctacgatgttaataaggctttccaacctcatacagcttgcacatttgataactaagccttctgtgtctttgtccaagtcttaacatgttttatgagaaggcagaaccacgtggcacgctgtttcaaacctttctgtcggttgaccacaggtcttcgaatgtagttgttcagccagctgcagagccacccaagtttcatcctccagcctatgcttggctttacattctcttcttcttgtgacaagggctgtgtctcccaggaacatttgctgtgtctcttggttcagcatggtctgtgatataaaaaactagtggccaaagggaggtgtactggtagactgccagcattaaatagaatctcagagtggagcaggacctttatggggtctgaggatcaccatctccagtgtctggcccatgtcatcagtttccccatgtaggacaatgctccaggagtgggctctctctggcttaactgatgattgggtattcagggacaccagtcaagatgctctccatctgggacacagaccagccagtagagggttgcttcatgagtgaggaattagagcaaagtgcatagatggtcttatggttgttctgtactggtggccctaaaagtagtctgtccagtcctctctttgtcatctttattgtagccattgtgtatttgtctaattcatcagcaaataattattgatgtctgctttgtgcctggccttgtataaggtgatgtgatactgaagcaggtaagaacaggtccctgctcttaaggttctctgcatggtaggggagacagaattgtaagttgttgctcctggtggagtgtggtaagggccgtgaaagacacatgtgcaggtgtcctgggagcccagaggaaggggaggacagagaggggccagtgggctctactaactgtgcagccagatgtttactggcagcttcctgcttcccaaatgtctgattttcttgggctcctggtagaccacacctttctgctgtgaaagcatagaagtcccagtggggttttgaaagtgccaattaaatcttagcttgacctgtgttaaacattccatgtgtggctctctcaagatctatccagatcacctcaattttaggaaattccctggacctctccacagcactgcaggctgttgcttagggtggattattgtatggcttattttatccattttcctgttgatttcctctaccttcaaggtcagaacatgacccttttcctgatcatatgactcaaaactccccatacccaccagcacacagacaacatcttagattttctgaggtcattccattgttcccttacctagtctcagactgccagaccacagactctggcctttgctttgaagaacctggaacctgggctttggcagttaccgtgggtgagaaatctcaggcgatatacaaggaaccatataccagtgggttctctgaatgataagaactgaaatcctgaccggggcggtggttcactcctgtaatcccagcaatttgggaggccaaggcgggcggattatttgaggtcaggagttcgagaccagcctggccaatgtggtgaaacccagtctctatgaaaaattaaaaaaaattagccaagcatggtggtgcatgcctgtagtccagctactcgggaggctgtggcatgagaatcgcttgaacctgggaggtagaggttgcagcgagctgagatcgtgccactgcactccagcctgggcacagagcaagactctgtatcaaacaaacaacaacaacaaaagaaaataaatgaactcctgtaagaatccatgcttaactctgccaggggtttctttccttcatatcctgaacttcgagatctccctggccaggctttgtgattcaatgggaccatcaagaaggagccccagaggccaggcatggtggcgcacatccgtaatcccagatgtcaggagttcaagagcagcctggccaacatggtgaaaccctgtctatacgaaaaatacaaaattagccgggtgtggtggcacatgcctctggtcccagctactcaggaggctgaggcagaagagtcacttgaacccaggaggtgaaggttgcagtgagctgagatcatgccaccgtactccagcctaggtgacagagcaagactcagtcttaaaaaaaaaaaaaaaaggtggggagctccagagccagaccggcatgaggtgtctgaatctggatgtttctgcacagacacatctgctgggggtcagcaaagagagctcctcaggtccaagggagctgcctcctgggatgaccacttggcatccccctcacagctcccagtgtctcaggcaagcagtatctccagtgcttccccatcgaggaggtgctggagagagaatagagtggcagactccttgagaaagggggaaatgggcttattcagcagaccctggtcttagacctgagaagccgcttttcacttgaggggtcattttagagcattagaaaggaagcttaatgcaggtaatctcatcggtgtgtttggctactagactttcattttcttttgggggaaaggtttttagccatcagaagtgccagttttcagagcctccttggttagtgaattgggaaagatcaggtaactgttttctcagagctgctggggggacagatatatggggttcattcccccactctgtcctgcctccgtttaacctctaaggttgccagcctctctgagatacagtcctgttgtcgccacacctcagagatcctttcattcattctttctggatttactgagcacctgacttatgtcaggtaagcagccccctggtggtcctggaaggcaaatgaagaaatacatacaattcaggggagtttgtggaactgtgtgaactccagacagagtggaaggagtgggcagttctgactgctggggaagcatgctgacagtgggcaggccttcctggcaggggtggtagagggaacagagctgcaaggcagaagacacccagttattggggaagggtctgtagtgcagtctgtggagctaggtgtgaggagggctcacttggaactgtggggcagggccaggcttgggcagcattgccccctgagctgcatgagtcatgtccataggatacccctacccagctctcacagtggttaggaacacaggtcagcacttataagctaggtatatcttgggcaaattctgtagcctgtctgccttggtttcctcatctgtataatcgagataatgctggtattgcttcatagggttattgtgaggattaactgagttaatacacaacaggtgcttaggagcagtgcctggcacgtaagaaacaacatagaagtgttttcattgctatgatgcttgaggggtgagcataggagggatggcgtctcctcaaaaacagcgtcccccagctcagtctcttgacccccacagcctgcctcccagctctcttcattctatcctgtcctccacaactgaccaactgacttccctccttgactctacccatatacctagctactagaattaacaattactaatattttccatatttgtttcacctatatttggatgaagtaattttaagtaaattttagacatcatgacatttcacccctgaggacataacttgcatctctaaaaactaaggactttcttttcataaccacaatattgttatcccactaccaaattgcaagtaactcctttatatcatccaatacccagtctgcattcatatttcccagttctcaggatacattttgcagtttttgagccagaatctgaacaaggcctacataattggttttggtttttatgtctcttaagtttcttctattctagaagagcccctcccatcctttttttccttttttaatgacttttttttttttttttttttgagacggagtctcgctctgtcgcccaggctggagtgcagtggcgcgatctcggctcactgcaagctccgcctcccgggttcacgccattctcctgcctcagcctcccgagtagctgggactgcaggcgcccgccaccacgcccagctaattttttgtatttttagtagaagcggggtttcactgtgttagccaggatggtctcgatctcctgacctcatgatccgcccgcctctgcctcccaaagtgctgggattacaggcgtgagccaccgcgcccggccaattgacatttttaaaagtctttcagagtgtggttttttggatttgtcttgttgctttctagtggtgtcacttaacttgttcctctatcccctgtatttcccatgaactgaaagttagatccaaaggctgggttagacttaggttaaatttctcactgtcactgtctctgtttctctctctgtgtctctctgtctccccctgcccccctctgcttttggcaagactagttcctaggtgatactatgtactttgtactgcctcatgttggaatgcacacagtgtctgcttgtcttgctgttagcagcactaaggttgaccaatgaggtcatgtggggacaacaagagcaggtttctcaaagccagtgtctgtgaggactcaaaagacattttgcggatacaaatgctaaacctcagaccagtcagcagaaagagagaaagagaacaagtgtgtgaacacggggaaaccagtggctgtctttctttccttctccgtccccattgctgtcttccttttttcctttctccctcccttctcctttctcccggtcctttctctccccttctctcctccttccctttctcccgcatatcctttactcctactcccctcccccattccccatgcacacccctccctttccttcacccctgccccgtgaccctttccaccttctccactttccacctccctcccgcaacccctcagatgattgacggcgaggccttccttttgctgacacaggcggacattgtgaagatcatgagcgtcaagctgggcccagccttgaagatctataacgccattctcatgttcaaaaacgctgatgacaccttaaagtgactggcccagggctgggccctcctgcagcccctgcttggcctccctctccagctgatgctttcttcctgacctgaattcctcataccccacacgtccccatgctccacctatatctgaccaggctggtccttcttagagggtgcatgggagctgaggagccctggggagggtaggcacccagccccaagtcctagagctcattcgtcaccaggcatgttggtgagggcgtgactggcaggggcattactcatggagtcagttggactgtggcagcccccacagccccagtggacttttattgtattaccaaagggtctttttcttggcagtggaggagagactagtagagcagcagtccttcaatctgaggcccctttcccttttttggtatctctgtgtacttttctctccttggctcctttcctcctgccaagaagtgaccccaccacaaatgtatttactcctggaggtacctcctctctttctgtctgctggttttgctgccctcattctgctgcttcgtttcctgggcagtgcccccagccagaccccactggctcttccccctgagatatgtgaacctcggaaacatgttttcctaagatcccttggaagtctctagctgcctttctctcttttgcccagaattgagagattttgagccaagatgccttcctgaacttacccagttctggaccagttggcattttagtgtcccacgccaagtccaagtttcagcagaatgagcaggtggtttgagcctgttttatagatggcagaggttgaggttccactgctgttttccatacacccttcatgtgttgagtctgggaaggagtaagcctagcctgccagtagcctaggttaggagaccagcataaggatttgttagacaatctcgggtctttggccagaggggcagctccagcaggcatagtggtgcctgaagttaggaatactgtactctctgtagctttggacctcagccaaggtattgcccatggggtgatggctccaggcctgccaggccttctgccatgagaatgtagcactctgtgtagcacacacccccatgacatcatttaacctgtcccttaaatgttgaccattagctcttgcagcgtcttacaaagacgacttgaagttgggagttaggaaggtgaacttttctatctgaattctccgggtccctgaagccctccttgccgctctccatctgtcttgcactgccagctgggtccctgctggggctctgggacttccacttctcagtccacataggaacccagcttccactgagtcactgccaaacctgcctcccagcctgggtgggaagggggagagccactggtaggagccagccccacatggaggtgaggagccactgccaacctcccgtgtccaggtgctgatgtgggcctgcggagtgtggggctggtgccttcacccagaccccttcaatcatgtgatgtgtgtgtgtgtgcatgtgtgtgtgtgtgtgtgtgtgtggcactctcagaagtgtttgacagggtgcagatgtgaggcttagtgttgggaaaatgccaagggctattatcattaaaatttgaagctttatttttcccttagaagtgggaaacccagagctctgttgatttcctaccacaacccagtaggggcctctctctgccatgggctggacagctttttgaggaagccattcagctcccacagttgagctcccacagggctttaggtgtccattccctctcaactgcttagaggcagctttgagcacagccttcctggaaggaagctaggcaagacctgccacacagcgaaggttgggtttacaagggtgacattggtacccccttggccaagagtaaagaagaacaagtctaagccttgcttttatcttagttgtctgggtggtagcagaactcatcagctccttatcctcagtctgttcctctataaaagatgagagatgttcactgactttgtgcagtgagaaggcagcaagtactcacggctggtgctgtgggacctcacagcttctaaggagaggggctgggagggcctttgccatcagatctgccaagcacctaatgcttgcctgtggtgaaggcaagatggaccaagggccttggagaaaagggctcccaggcttctgaactttgaggcctcagcactttctgcattatcgtcaaactctttggaaagaaaccaaatcattaaaaagtagaaagaaatctgcctcttgtctgccctactgcccctttacccccactctgtccccaaatgatattattgcaccttgacctgggagcgcagagaggggagggagttggcagagacttctggtgccctctgccctcctagcaacagatgccacttatattttggcccctggcagcctcgcccagcccctgatcagcccaggcctagggcagttaggacctttctgtttattttctgaagcagagagaatgatctcagagtttgcaaatgaagccttttttgcactttcattcacatgcactttggtggggttacatttttgtacttgcctcttgtgtgtgcacatgtgtgtatgtgttctttaagagaatcttctggcttaagctaaggtgactcttgaaggagaaaaagttacaaacaaaatgtggtgtgatctgtcagtgtatcaaaacaacataaataaacttgaacaactgatacgcagccagagtctgtttctattttcatgataaaacatccagagaacacaaaatggttatcagtagtggcactactgaagagactaaagtgttctctttgttgttagttaggggtccttatagtttttaaggaaagaaacaaaggataaggataaatgggtatctgtctgcactgaaagtgtaaacagtgggaactcccagagatcggtgtgtaaaagggcctgatccttaacatttgataaatggtcaagggcagaaaattcaatgaaacctgtaatttttaaaataataatatcagctgggcacagtggctcacacctgtaatcctagccactttggagggccaaggagggaggatcacatgaggccaggagttcaagaccatcctgggtaacgtagctagatcctgtctctataaaaaaaaaaaaaaaaaagtattttttatggtggcatatgcctgtagtcccggttacttaggaggctgaggcgggaggatcacctgagcccaggagttcgaggctgcagtgagctgtgattgcaacactgtgctctatcccagtgctcaaataaaaaatgaaaacatcaaactttcagatggggaaatgtcaacctgaacagttagattttgttaagcttcccagagactacaagcaggtgggaaggtggcacctttcccaccttaaagtgtttgatcactttaactgctttctcgtcaatatccttaatttctttgccctgctgctgttccagatcacttgtctagaagctccaaccatggagctgtccgagagcgcatcctctccacaccacaactgggaacctacctgaccgagattggtgccatgatagactggtagaccctggcttcaatgtgaactgaaccctcagggctacccaggaagcacgtagggtctgggggctttagctctgacttcccttttcatgcttctcaaacctcctaccccattgtcttgacagatatccttaccatccatgtcacagagaaagtggaagtcataggaagaaacaccttcaccttcctgccgtctcatctgcatgtctcctcccacccccattcattctgtttctttcctattacagtggaagacttgatgcttccaacttgtcagaagctaatcttctactagccatagctgcaataaaaggaaaagaaacattaagagacaggaagaggcttttggacatttaaaatgggattatggagataaaaattcaacacaagggtcaaaagataaagttgaggacatttcccagtaggcagaataaaaagaaaaagagaggccgggcctggtggctcatgcctgtaatcccagcactttgggaggccaaggcaggcagatcacgaggtcaggagtctgagaccagactgaccaacgtggtgaaaccccgtctctaccaaaaatacaaaaattagccagacatggtggtgcgctcctgtaatcccagctactcaggaggctgaggcaggagaattgcttgaacccgggaggcagaggttgcagtgagccgagattgcaccactgtactccagcctgggtggcagagtgagacttcacatcaaaaaaaaaaaaaaaaaagaaaagaaaaaaaaagaaaagatgagaaatgggaaagaagaaaatatcagaggactagttggaggcccaaatatatgattaatagaaattctaataagagagaaccgagaaaacaaattatatcaaaaacaaacaacaaacttgtatactgaaaacaataaaacattgctgaaagaaattcaagaacacctaactaaatggaaagagatctgtgttcatggctaggaagacttaatattgttaagatgtcaatattacccaaagatatttacatattcaatgcaatccctatcaaaatctcagctgattatttttttcttgcagaaatggaaagacagatccttaaattcctatggaattgcatgaggcctcagatagcccaaacaatcttaataaagtataacaaagttgaagaacaaaccgatttctttctttctttcttttctttttctttttcttttttttttttacagagttttgctctcgttgcccaggctggaatgcaaagccacaataatcaaaacagtgtgttactggcataaggacaaatagaccaataggatggaattcagagtctaaaaacaagtccatatgtccataaccaattgaaatttttttttttttttttttgagacagagtctcgccctgttgcccaggctggagtgcagtggcgcgatcttggctcactgcaagctccgcctcccgggttcacgccattctcctgcctcagcctcttgagtagctgggactacaggtgcccgccaccatgcccggctaattttttgtatttttaatagaggcgaggtttcaccgtgttagccaggatggtctcgatctcctgacctcgtgacccacccgccttggcctcccaaagtgctgggattacaggcgtgagccaccacgcccggcctaaccaattgattttcagtaagaatgccaagtccattaaatggggaaagtacagtttcttcaacaaatgggtctggggtaactggatttatacttgtaaaagaatgaaattggatacctacctcaccccatattcaagaattaactcaaaatggattgatgacctaaatataagaactaaaactataaaaccctaagaagaaaacataaaggtatatcttcatgaccttggaattggcaatgaattcttagctatggcaccaaaagcataagcaacaaaagagaaaatagataaattgaacttcatggctgggcacggtggctcatgcttgtaatcccagcactttgggaggccgaggtgggcagatcataagtcaagagatcgagaccatcctggccaacattgtgaaaccccgtctgtactaaaaatacagaaattagctgggcgtggtggcacacgcctgtagtcccagctactcgggaggctgaggcaggagaatcgcttgaacccgggaggcggaggttgcagtgagccgagatctcgccactgcattccagcctgggcagcggtgcaagactctgtctcaaaaaaaaaaaaaattgaatttcataaaaatttaaagacttttgtgcatcaaaggacattatcaaaaaagtgaaaagcacctacaggatggaagaaaacatttgcaaattttacaagggtttaacatgtggaatatataaagaactcctaaaactaagcaacaaaaagcccagttaaaagatgggcaaacaacttaaatagatatttctccaaaaaaatacatacaaatggccagtgagcccatgaagagttgctcaacatcattagacattagggaaatgcaaattaaagccacaatgagatatcactttctacccattatgatggttataatttttttaaaaaggaaagtaaaacggtgaggctgtggagaaattggaacccctgtacattgctagtggagacataaaatggtgcagctgctatggaagagagtttggcattcaaagcgtgatgtaggctgaaaaaaagagtttggcagttccttcaaaagctaagcatagaactatcacatgattcagcaattccactcctggtatatacccaaaagatttgaaaacatacttgaatgcctatgctcattgcagcattattcacagcagccgaaagatgcaaacaacccatgtcatcatcaacagaaaacaaaatgtggtctatccattcagtggaatcttaattcagtcaaaaaagaataaagttctgatacttgctacaactggatgaaccttgaaaacatgctaagtgaaataaatgaggccgggcgcggtggctcatgcctgtaatcccagcactttgggaggccgaggtgggcggatcatgaggtcaggagtttgagaccagcctggccaacatagtgaaaccctgtctctactaaaaatacaaaaaattagttgggagtggtggcaggcgcctgtaatcccagctacttaggaggctgaggcaggaaaatcacttgaacccgggagggggagggtgcagtgagccgagatcgcaccactgcactccagcctaagcgacagtgcaagactccgtctcaaaaaaatgaaaaacagacacgaaagaacaaatattccacacatatgaaatatccaaaataggcaaattcatagagatggaaagcagattagaggttaccagggactgtgaggaaggggaaatgtggagtcattgcttaataattacagagtttctctttggggtgataaaaacagattttttattaattaaatagataatgatgatgtttatacaacatcatgaatatacttaatgacactgaattgcacactcaaaaaatggttacaatggcaaattttatatttaccacaataaatttccctttaaaagaggaagacataggatccaggaagcaagacacaccaaggaaagagacaaaggggatttgcaggccagtcaccggtggctcacgcctgtaatcccagcactttgggaggctgaggcaggtggatctcttgaggccaggagtttgagaccagcctggccaacattgcaaaacccgtctctactaaaaatacaaaaaagtagctgagtgtggtggtgcgtgccgtaatcctagctacttgggaggctgaggcagaagaattgcttgaacctgggagtgggaggctgcagtgagccgagattgtgcactccagcctgggcgacagagagactcttacttcaaatgaaaaaaaaaaaggcagaggtggggacgggtttccagagtgatgggaaaggaagggccaggttcacctctggacagctgtctaggtgagagtaggaggatgaacggctctaagaaaaatggggggaagaaaacaaactgaaactggtatattaatgtatcaagaggatattttagctttatcagagagttatatacacataattatatataattctctaataattatatatattgaatatgttcaatttctaaaaccaaatgaagcaactataaattcaggaaaagctgaaatgtgtgtttggaggggcataatctaagcattcatgttccatagtaggaaagaagccacttgaaaatgttttaaactgaaaaatggaagaataacagtataaggctattaagatacatggaggtaaataccaaagaaagcagcttaaaaagatgaggaatggggcaaggaactgatctttttcattatttgattttacactttgtacaattatcactttctaaaaatgtttccagaaggcaaactggggcccatatctgggctatgtatgagctctgttgcccaagagtctgttagcccatgtgggtaatagatttttctctggtggccctgtgtctgttattccctttgcctatgggtgaatctgcaggtggggctgggggtgggaatagggctggagccagactaaggacagaaaagtgggctgaggaatgtcaaagtgaagggaatatttctggaggtagatttccattggttaagtctcttgcttttcccttatgcctgagaacatgacttttaccttcatacccaaacaacaaagtccagccagggagggtgggaggggaaagaaggaagagaggaagatgggaaggagacgcatatctgcagtggcctatctacacatatctgcacgagtgaccttggctatttcctgcagtatcactggggggaagggcaagttcagcactgctgctagccacgttggttggcacaacttgttacagtcatttggtagagagttcataattaacccagcactcacacttaacaggagttcatctgtcagaaatactagcggaaggccacaggatattaaagcagagatgtttgctgcagccttgttggaaatattgtgaaactgctaacagtcaaaatgtccatcagaaggaacagtaaatagggaataggggttgtgaaaactccacactatgaagtgtggtgcagctgcttaaaagatgtatatatgaaaaaaagtgaattactgatggcccattttctggaaaaaaaatggatgcagttatatagattaatacatatagattaagattaatatacatatagattaagacatagacaaaaatctggaaggattgtcacccttttttttttttttttgagatggagtcttgctctgctgcccaggctggagtgcagtggcatgatcttggctcactgaaagctgcatctcccaggttcatgccattctcctgcctcagcctcccgagtagctgggactacaggcactcgccaccacgcctggctaactttttgtatttttagtagagatggggtttcaccatgttagccaggatggtctcgatctcctgacctcgtgatccacccacctcagcctcccaaagtgctgggattacaggcattagccatggcgcccagccggattgtcaccctttagttaacagcagctgcctctggaaatgagattgaagatgggctggagggaaagcttttactttttatttgacattcttctgtaagttggaattatttgatacactttatgcaaccaataccagtatgtggcgtgtttgggggttttttaagcagctctggaagagcagaggagagggagcttggtggcacagcagcagcagcagcaggagctctggaaagggcaggaccttgtgcgctgccctgatttgctctgtgcacttgggccagctacctcccctatctggaccagggccagacacatgctgctatgtgtgttggtggaggtggggtgtgtggccatgcagggctcctccggagcacagcagagcagccggtgtttaaggcaccagaattaccagaaagttgttgacattttaatggaaaggcaatggaggaagcagtgtgaaagtcagcctgctcaggaggggtcactgggcagagctttccttacctgtccaggggtccaggccctgcctgtgccctgagttagaacccagggccggccaggcgcggtggctcacgcctgtaatcccagcactttgggaggccgaggcgggcagatcacaaggtcaggagatcgataccgtcctggctaatgcagtgaaaccccatctctactaaaaatacaaaaattagctgggcgtggtggtgggcgcctgtagtcccagctactcgggaggttgaggccggagaatggcgtgaacctgggaggcggagcttgcagtgagctgagatcacgccactgcactccagcctgggtgacagagcgagactctgtctcaaagaaaaaaaaaaaagaacccagggcctgggaagctttgggtcaacccccgagaaagccttccctgttctccagggtgaactcatctctggttcctgagcctcaaatctctgaagggcagagtggggcataggtttcaactcagctgtgattctcccagaacggtgccagggcagtgcttggtcgggtaggctgtgggtggcagtcttcggcttaacacaagaaattgccagaggctggctcagggggaaatgagctgcccagtcctggaagtttccatgaaatgactgaacataggggctggtggcccccattagggaaggggtggaggagggtgttgtgtgagaccaacctttcagttgctggttcactaggttccaagcgaaagggaagatgactcagcggagggaatcagggaaggctgtgtaggagtcagcacttaagctggaccttgagagagtgcggcagttccagtgttgaaagggacttcagaaaccgtccctccagcaggacacaccatccgtcaccaattcacatgaggctcagggagctgaagtcagttgcccatggtcacataacaagttgtgctttaaaaaattcagagagtcccccaggcagggcccatccaggagccagtgtgtgcagccagcttggtaattcaggtccagtggttaattagtaactggaaggccccgaagccagcttccagcaggcagggctgggaggttgaacttgagccggtttgggagccaggagcgagtgggtgacaggtcattcctgactgggaaggttgcttgacaagtcaggattgtgcctccagtcagaaggaccatgaagagagagaagagggcagagccgtgcatggggctgctccccaggacctgagcaggaacctggagttttcaggtgagaggctcacctgtgagcaggatacctgcctgctcgcctattggtctccagattgactagttacctagctaacatctttcctagtacctgtttactttctttccttcctttcttccttggcgacttctttcccttctccctccttcctttccttccttccctcccaactatctgctttctcagctgcctaattttcttcctccttaactaaccaacttacatcctcacttccttcccactgacttcattttttccttttctagctttctattgtcttcctgaaattccaggccgtgggctttgcagtcagatggcctgggttcaaatcctggttatgtcatttattaactgtcttgatcatgtcacttccctgtccttgcctcagttttctcctccttgaaacagggacgatgatagttcctaacccgtggggttgtgggaacaaaataagatcaagttggcacttgaactgggcaggcgtgtaaatgaacaagttacagtgaagacagggacagcagcaggagagggtgcatgggatcggagggtcatctggcttccaggaaaggcaatgagaacaggtgaaaaggtgagctggaaagaccaggtttgttggggaatgttccaaggagagagaactgtgtgacactgtcccacccccacaccccatttggcagggccagggagctgtaagcaggtccatgtaacagtgggacagagggaggcaagtctgggctgtggcaagttaggaaagggacaggcttgaggactcatggaggggcttgagtgggagtttgcggagtctgaagagttaggagaatatattgatgtccagcttctggccagaaaattagaacaccgtggtgcgagagagaagaaagccttaggaactgagggctgcttaggcatgggggtcacagtcaaggtgatgggggagggtgtgatgggccatgggcatgccaggttcccaccaggaactcagtacttgaatattaactcaacagcaatatcttgagaagctttacacaatagtacaaagataaaagttaaaataaccggccgggtacagtggctcacacccgtaatcctaacactttgggaggccgaggcaggcggatcacctgaggtcaggagtttgagaccagcctagccaacatggtggaacctcgtctcgactaaaaatacaaaaattagccgagcgtcgtgacacatgcccgtaatcccagctatttgggaggctgagacaggagaattgcttgaacccaggaggcggaggttgcagtgagcagagattgcgccactgcactccagcctgggcgacagagcgagactccatctcaaaaaaaaaaaaaaaaagttaaaataacctaacctaagaacccgctgtgaccttgggtcatgaccctgcagtctttttttggcagctgtgctcacaaatgtgtacgtgcagacatgtcttttgtttttcttttacaaaattggtacccctacaacacctactattttgaaacttggttttttgcttgatattgtatcacatgtatgttcctgttttggtttatataggttttatatagtttttggttgtgtaattttccactttatatatgtaccaacatttatcaattcatttattgattcattagtcaaattgtactgggcatctactatattccaggccctgtgctcagtgctgaggattcaatagttgaacaggaagtatttgccctcctggagctgatgttctagttggagatagaaaataaaaactaataaatacgtgataaggcatcagtgctacaaagtaaaatataaagtagacaaaatgtatagggaatgagcaggactggtatcagagtgactaaccatcctggttggcccaggactatagcggttttagcactgaaacccatcagtcccagacaaaccaagatgacttgtcacccgtaatcagtacaagcctctccaagaggtgactttaagcagaagcctctatgacgttagtggaaaacagccatgcaggtgcctgggggaagagtgttgtaggcagagggaaaactaagtgcaaggggctggaggccagagagcacttagtgtgtctgagggacagcaagagaaaggagagaggctgagggcagtcaggaaggaggggagtggaagccaaggaggagatggagacagcaagctaggtcatatggatctcataaaccatggtagaggctttggattttttttttttttttttttttgagacagagtcttgctctgtcaccaggctggagtgcagtggcgtgatctcagctcactgcaacctctgcctcctgggttcaagctattctcctgcctcagcctcctgagtagctgggactacaggcacatatcaccacgcccagctaatttttgtatttttagtagagacggggtttcaccatgttggccaggatggtttcgatctctgacctcatgatccacccgcctcggcctcccaaagcactgggattacaggtgtgagccaccgcgcccagctgaggctttggattttaattctaggtgtgttgagaaaccactggagtttttgagcaactaaggcacatgatctgatttacattttaagactcaccgtggcttttcatagagaaagattgtagtgggtaaatggagaagcaggggtcagtggagaagccattgcaataatccattcaagtgacaatgggggctcaggcagggcggttgcagcaatgatggtgagcagcaatggtttctggatatattttgaatggaatttcatgatggagtggaggcggagtgagggtgcaagctttctagaatgaactcaaagttgctggcttgaacttttgagtaggcggtagtgccattattgaggctgaagactgagggaggagcagactggggcagagtggaaggaatatgagtcaagacctttgttttggacatgttaacttcgagataccagccaggcgcagtgggtcacgcctgtaatcccagcaatttgggaggccgaggcaggaggattgcttaagctcatgagctcaagaccagcctgggcaacatagtgaaaccctgtctctacaaaaagtacaaaaaaaaattagccaagcctggtggtgtgtgtctatagtcccagctactcaggaggctgaggtgggagaatagcttgagccagggaggtaaagattgcagagagcctagatcactccactacactctaacctgggctgcagagctaaaccatgtctcaaaaaaaaaaaaaaaaaaaaaaaaaaagattgagatgctttggctgggcacggtggctcacacctgtaatcccagcactttgggaggcaggggtgggtggatcacatgaggtcaggagttcgagaccagcctggccaacatggtgaaacccagtctctactaaaaatacaaaaattagccaggcgcagtggcgggtgcctgtaatcccagctactcgggaggctgaggcaggagaatcgcttgaaccagaaagcggagcttgcagttagccaagattgtgccattgcactccagcctaggcaacagagtgagactctttcttaaaaaataaataaataaataaagattgagatgcctctagacatctgactagtgaattgtcaaggaagcagttaaatatttaaatccagagttcaggagagaatcagaactaggctgggcgcagtggctcacgcctgtaatcccaacactttgggaggccgaggcaggcagatcacttgaggtcaggagttcgagaccagcctggccaacatggcgaaaccccatctctacttaaaaaaatacaaaaattagccgggtatggtggcgggcacctgtagtcccgggtactcaggaggctgaggtgggagtatcacttgaacctgggaggcagaggttgcaatgagttgagatagcaccactgcactccagcctgggtgacagagcaagactctgtctcaaaaaaaaaaaaaagaaagaaagaaaaaaaaagatttgggaactgacaagtatagttggttaaaccactaaaatggtagtgatcaactaaagaacaagtacgtgtagacagaagcccaaagactaagccctgggataggcctgtgtttaaggataaaaagaggaggaaaatccagcacaagagatggaggaagagcagtcagtgagctagaaggaaaaccaagagttcctaaagccaaatggggaacatgagcacaccaaattcttcagagaagttgaataagatgaggatgaggaactcatcactggctttggcacatagaggtcactggtccacggtttcattgaagtgttgggatgagagcccatttggaacgggctcaaaagagaacaggaagaggactggagacaaggagtccagacaactctttcaaagagtttagctgaaaaggggtacaaagaaatgggaccatatctggacacggtatatggtcaagagagggagctcttgcagctggcaagtgttctgaagtgctctgtggtgggacacttaggttactattagcacaattattttgctgttataaatagtgctgctgaatgaaggccacatcaggatcttgtttttgaaaataaatgtccttgttctgggtatgtgttttgtcaacatgacatcctgctgatcatgaattggttccacatttctattttgttcaagatggaaggctttgatactgtgcactcaggttttctctggtcaacacttccagatcctccgcatttcagaacccacagagaacccctgaggcccctgggctcagttccctccctgaccaactttctgggccctagccccatgtgtccctcccctgtagtatactgtagccacacagaaagtttgagaagggcaggggctgtgggcccatcaactcctttattcttgagaacatctgcctacccctcgggatcctggggagaggaagggaccctgtgagaacctaatgaccgccccaggcagcaaggccttcatgagccagggtgctctctgggaccgtttcttacgcagcaggagagtcgtgggccaaccaggcctgccctgaggactgggccagagcccttgaggggcccgcagggaaaggccaaaaggaccaagtgctcattaaagaccaaggcaggctggactgagctagacacccaggctccaggttccttcctctgaaacatctgcaggtttttgggaggcgaagggctctcagctgccatggctgatgtctggggactttttcttcagctccagatggtctacacagggttcgtatacacaggccccctagccgcacgcatgcgtgcatgcacgcgcgcacacacatacacacacacaccccagagtaaattcactgatatacaccactatgaacacacacaatgacttacctatacacacatattaatagacacccatactgctcttaacacacaccttcagacatccacacagactcacactcacccacatacacacacactgacacagcatattcacatacaaagatacacactgatatgtaccacacagagacacgctgaaacacatccatatgcacaccacacacactgagatacagtgacacacacagtcacagatgcacagacatatgctgatgtaaatgtacaaatgtggtcacactgacacatacatgcaatcatctacgcagactcatagaaaccgacacaaatacctgaaatacacagccacagacagacacacacggaagcactctatgcacaaaacactcacacagtacacaccatgctgcacataccctgacccaaacagtctaacaagccctgagggtctccagggctgccctggggctattgcccacccctcccaccgtccccgctagggtgagatggtgttccccagggaacagaagtctccagtcccatcttaagctctgccggatcccgcgtgacatcagctagccccctcgcggctgccgggagctgtgagctctgtgctggggccaggccggcaccaggcacagacacttaggcccttgttgggagaacagagagaggctctcttgtccactgcctgtcttcggttccaactgctggttctcctagaggcctctcctcagactcgcaggtatgtgggaccagggaggccgggtcctggccaaagggccactggggtcagcccaggagagggtgtggcagtgttgtgggccgtttgcaggagcacacacgtctggcattggctaggggcaggctgcgcttccttagcagttctgcagcttgctcttaaggcttggcagggctgggcctctcagggaagcctgggctgggggatcctctcagttccccttcactttctctgttcccaagaaggccatgaggttggtgcctccaggacccccccttgtaaagataggaaatctctactcagagaggctgggctgcagcccaggccccacagtgggccaagactaaggtcttgagatgcgcggcaactgggctttcaggtgagatctctgctctcagcctttgccaagcaaggatgagactgtggggccccaagcaatctgtggcagggcctgggcaccctggccccgtctcccctgcagggtggaagcaaggaagacactattcctggccacatagatcagctggtcacaccttctgttgtttggccccgaatagatattggccagtcttgggtctctctgtggccccagcccaaggcttccagggcagctgcctttcctgaggcattgggcagaattccttgtggcaaggagatcgtagcacagagcccagctgggactgcgcacagtaattcagggttgccattgttcctctatgggagtccggagagcccagcctgtgcttcacaaggctatgtggccctaggaaggtccttttttaggccacaggccttccatctgtgaaatgggggatgggttcagactttatgccctgaaaagatccttccagccctggccatcttggacttctggagctaccctggctcacaggggtcttgttgccctgggtgtccccagttcttgaaaagaatcagcctgggaggggccacaccctgaccatccccctttatcccttctgagatgtttgttaggaagtctgggtccaggggatatcatttcttgttccatccatgcaggggttgcttacctcgggtaggaaaccctcaggcggtggcaggtgcacaggtaggggaggatggagagggcagtggtgcctgaagccctggatgggcggagctgaccccccaacaccaactctctcatgcctgctcctccctgtccccccagagctgcctgatcattgctacagaatgaactctagcccagctgggaccccaagtccacaggtgagtggttcttggtcccccacccatcatcgggggctcacttcttcccgaggctaaggaaatctgtgggtcccagacaatgtcaggggctgagagggttactgcgagcacatagaaatgagccacttgcagggtgaatagagtagagatttgaaatagggcttcaagatgaactggaaaaatcatgagatttgtcatggagacacctgggtcgtatcccaacctggttgcctgtgagaccctgggcaactcctctctgggcctcagtttcctcgcctattcaattagcacaacagccagctgcctcccaaggctgttttgagaagtgggtaagatggtggataagtggatttgtgggtgggtagaaggagggagggagggagggaggcgggcaggcgggcaggtgaaaaaaaaagaaaagaaaaaggcaggcaggcctagtagagttgttggagaagggatcagggcctgggccaggagaaagggaggtagccaaggagtagggatctgctgatcataatcacttctttctttagccctccagggccaatgggaacatcaacctggggccttcagccaacccaaagtgagttctggtccctcaagcacctttcctacttgactcccctcatacctggctccccttgccttgggaataaaatccagattctctggtctagcattcaagactgtctgccatctgggcccaggacctttccccagctctatctcccacaaattccccagcctctgcccatgctgaaccctcttcctgcaatgccacctaaatgtctgcattgttagcaactccccacacttcaggcccttctgaggggctttgggtaccagaaccctgccttctatgcaggccttctgtgcagtatgtctggttttatctctaccctctgcctgttgtttaacttgaatttgagttcccctggggccagggtgaatcttacaagccctctttcggctgggagaacatggggttcttcgggggtgaggaggcatggctcctggaaggctctctgtatttccccattctaaagttaaaaagaagcccaggtttgttctcaggcaccaggtttccagacattgcaaatgctgatccgtgtttttccctcttcccccagtgcccagcccacggacttcgacttcctcaaagtcatcggcaaagggaactacgggaaggtgagtgacttggtgagggtgggaagcctgggtcttcccttctgcagcctcttccagcccctgctgccacttgtatgtatgaagagagagcactcgcacctgcagacaaaagcaggggcaggcgggaggccttgtactgctgttgggaagtccaaagtcacctacagggcctcaaattcatgtttcttctcaggtcctactggccaagcgcaagtctgatggggcgttctatgcagtgaaggtactacagaaaaagtccatcttaaagaagaaagaggtaccagagctcgggcacaggcatttcttcttctgcttctcaagccgcagcctagggtggctttcaaagatgggtcccacctctgacaggtccatgggcctgggtgcagaagtggtcacaacaaagggtagaggggaggtggtacgcaggatgctggcccttctcaaagaaagcaggccaagccatctcaccacagggctttcaggaaaaccagcctggctttgccttcccctgggaaacacaggctccacgatggacaagtcttctgcctgctccaagtgccaggctccccatctgtataatgtggagccccactttattctctctgaagacccttcatgccatcaggccatatggctggagtgcagtagtgcaatcacagctcactgcagcctcaaactcctgggcttaagcaatcctcccgcctcagcctcccaaagtgctggggttagaggcatgagctacatgcacagcacatcatggacttctttttttgttgttgagacagagtcttgctctgtcacccaggctggagtgcaatggcaccatctcagctcactgcaacctccgcctcctgagttcaagtgatctcatgcctcagcctccccagtagctgagactaaaggcacccgccaccactcctggctaatttttgtatttttagtagagatggggttttgccatgttggtcaggctcctggcctcaagagatccgctggcctcagcctcccaaagtgctgggattacaggcatgagctaccacactcagccccatcatggatttcttgatgcctcagctgacctgagttcctttaacacctgactccattagtaggccagagcaggcccagagagaggattgcataggaggttgggggactcagagaaaagagagattaatgttaacaaggtctccgtggggggtggaatgggaggtcttcctgagggaggcagcggtgcagctggccttgatggtgggattctgatggtctgaaaagagggtgcgacatccaggaagaggaaatagcatgagcaaatacatgaatatggatagtgtgtggcttctttcccttaggaactcagttatgtaggcatcacacatgctttgcttttcactccaagggcaagaagctctgatacaggggctagagctgtgcccacatgaactagcttaggatgaggctgaccaccctgagccctgaatactaaggaaggaacttgggcctggctctaagggcaatagggagccattgtgggtgtttgagcaggggcatgagaaagtcctgggtaggatgacccccacccacaagcttatatgggctgagccgggataaaagaggctgttgtgggctgtgacatggacccctctctttgtgactccacagcagagccacatcatggcagagcgcagtgtgcttctgaagaacgtgcggcaccccttcctcgtgggcctgcgctactccttccagacacctgagaagctctacttcgtgctcgactatgtcaacgggggagaggtgggtgggcccacagggaggcttccctgggctggctctcggctgggagctgtccatcccacatgcccactgcatgccaagttctggaatgatctcacttcatcttacaatagacccattttgtagctaaagaaactgaggttcagggaggtaatcatttgctcaaggccacccagcgcatacctggtagagtcaggacttgaattcaggtctgttagactccccaccataatgctttcttgccttcctcattcagagttgcccatagacgcactttgataggcccgggaaaggtcaatgctaagaggagctcgtggtcaaggtttctagtgctcccataggccacagggtgggattgactggtcactgtggtaaacagagacctcaaggccacctggtgacccagaagcacagctgggacaagcagagctccctcctgggcttcactctgtctctctggtcaagatgcaaaatgtagtggagctccagtcagtgaccccagatttaacctgcgtgatctcttgcctttgagaatgatgctaagaggggggtttttgtcctgcatccctaagtgaagggctttccatgccagcaaaatagtccaaaaacattggcccatgggtggatctaacctgagctcagtctgacagccgtatcatcatatcgcctggattgatggaaaagcataatctttgaaccacgcaggttcaaatgccagctctgccaattataagctacatgaccttgggcaagtcgcctaaccattctgacccctcctagcttcctcttacatgaaactagcatgacacttgtaccttgaaggttgtcatgaggattaaataagagatgtggaagggcctgacttggaacctggaacacaggaggtgcttaagcaatgctaactcatctcttcttctgctgactctttggacacccgggactgctgtgtggggcaggggccagcatgcactcttttggtaggaagaatgctgcaggtcagagagggagtgagctcgcagccgcacagggcggggagcaggtgcaccctagccctacagcagccacccaataactcctgtcacactcctcctcccctccagctcttcttccacctgcagcgggagcgccggttcctggagccccgggccaggttctacgctgctgaggtggccagcgccattggctacctgcactccctcaacatcatttacaggtgaggcctgcctgtggctcagagccaggaccaagcccttcttgctccaacagctaggggttgtgtggacactaaatcctgatgaaatcctggtggacttggtcctttgttttgggtggggttggagtctcctcctccgaggtccaagtgcccagcctttctgggctctccttctgcatctctggcaacctccatgaatagttctcctgccaggaccaccccccgcccaggtctccaactctcctcactaaatggctgagacacctcaaggctgttttctcttattttctgcagggatctgaaaccagagaacattctcttggactgccaggttggtgtgtgtgtgtgtgtgtgtgtgtgtgtgtgtgtgtgtatgtggttgcacaggtacactatctgaccatgagtctgtgtacatgggtgtgcatgcattgtacatgtatgcatataggtagaggaggcatttgagcatatgtgtgtgtgcccatgcacatgtacacacatacatatgtgcacatgagactgtacatgtatatgtgtgcatgcatgtacatagggggcaggggtggagccaggtggaggctggtggagtttgtcttagactgggctccatggaaacagactctgagatggagaggaggcagaagctttattggggaacattctcaagagataacacttttaaaggggtaaaaaaacaggattgggcaaaggaagaagctcacctgcattgtagttaccagtggggcctcagctgatcttgccggcagggggagggcctgagctggggtgggtctctaggattgtcccaaaatgagacaaagaggatgggcctttgtgcccctggacatggattgctcctagggacggggcataactttgggtgcgggcaatgttctagcagcagggggatggggataggcatggttcttctgtagcctggtttcagaagagggatccaggcagaaccccacagtatctactcattctaccttcctgcccagctgccacaaggtgtgattgctttctgagtccccagcctctgtctaggggttttctgtccacaagctgccactgtcgtaggggtgggtctgagtttgtgatgagctgtgggcaaacagtggaatgcccacccggccccctgtgctgctcctgacatccagtccaggagccctgtgttggagtggagcctccagcctgtgcctgggcatcagatcccacagctgctgccctggggtgtggcatctgggctttgggggttaggcctggccatacccttggctcataccaccctccagcccatgccctccgtcattctcagggacacgtggtgctgacggattttggcctctgcaaggaaggtgtagagcctgaagacaccacatccacattctgtggtacccctgaggtaagcgtaaacatcccaggagaggggaggtcatgagtgggtgaggccacagctcctgattagagccaacaggttacagtgaaggggactcactcctttgacccaaacacttctcctgagtgggctatacactgaactgtggtttcctcatctatgtaatgggggtaccagctctaggactgctgagacccagccagctagctgctggtgaagctctactgcagtgctatccagtagaaatagaaatagaaacgcaggctgggcacagtggctcacgcctgtaatcccagcactttgggaggctgaggtgggcagatcacctgaggtcaggagtttgagaccagcctgggtaacatggtgaaaccccatctctactaaaaatacaaaaaattagctgggcacggtgacgggcacctatagtcccagctactcgggaggctgaggcaggagaatcgcttgaatacaggaggcagaggttgcagtgagccaagactgtgccactgcactccagcctgggcaacaagagtgaaactccatctcaaaaaaaaagaaaaaagaaagaaattcaaaccacataaacactttaaaaacttccagcagccacatttaaaaagtaagaaagtaacaggtgaaattaattttaatgatgtattttatttaacccaatatatccaatattctcatttcaacataccatcaatataaaactggttgaaatattttattccttttttttttctaactaagtcttgaaaatctggcatgaattttaacacttacagcccatctcaatttggagcagccacatttgaagtgttcgatagccacgtgcagccagtggctgctatattgtacactactgatctgcagggtgaaggccacgtgcaacaagagggcctggcctgagtgttaagacctgggctggcaagtgtaaaccacaggtccgtgtccatcttccagctgccaagagcctggagggttacaatttgcagatctcagcagtcattcagacatgtctatatgtcctgccaaggtctctctgcagccctgaagttaaaacctttctttgggccaggcgtggtggctcacgcctgtaatctcaacactttggtaggccgaggcaggcagatcacctgaggtcaggagttcgacaccagcctggccaacatggcgaaaccccgtctctactaaaaatacaaaaattagccaggtgtgctggcaggcacctgtaatcccagctactcaggaggctgaggcaggagaatcgcttgaacctgggaggcagaggttgcagtgagccgagatcgggtcattgcactccagcctggtggacaagagcgagactctgtctcaaaaaaaaaaaaaaaaaaaactttatttgaactcccaccagtcttggaccttggaccttggacctgaaggggtccccagtggctagacagacgtcagggtgagggttggagggctgaggctacagactgggagactcctccccacctggcatgagacaggacctcagctgctctctttttctccatatgcttgaaaagctgggtcttagatctaatggcctcctcactttagttctagggtagctgatggtcggatgaactctctgagcaggagccatggtctgtgtttgggtatggtgggtggtgtttgctggataaagccagcgccccaaagcctgacagtccagccatcccttccttggacgttgctagggacgggaacaaaggatatggaaccccagctcatgtaggagacatgtggccccaacacatcacctttaccacgactcagccactgccatggtgttggggggcacaggcaagagtagccatggttgctcccattgtttgagggccagcacatatgttagcatcttagaacagcttctagcagggatttggtatcttcacatttttaggatgaaaaaaccagggtctgagaggttaaatgccctgcctgagaccacgtaccaaccacggctcaggtctgtgtgactctgcccttccctagaccccacacagtctctcagagcagcttttcctgttgctgagaccttgcccccgactcggtggcagagacaccaggctaagaagtcagtaagcctcttttttttgttcccaggttctcttcctcatgcaaggcatagagacatggtgtacatttatttatcaatagctcaggggtcaccccctccttcctgaccctctcgtctgaccctagggtttccagcacaaggatatgccacatgtacttttacttacactcacattagtctccacactgccctgtgagagtactcccggggccttccgttcccaggacacggatagccagttgaatgcctttgcaaaaatagaaaaaggcatcccctccgggcagactaattagaaaaagcaccccttgaaacaaaaataaagttgccggataatacctttgaactagtgttgcggcttggtgagtggattacagccatgagtgcagccccctttacccttttggctggtgcttttgtgtggtacacaccatgtaaattgcacaaagcagtcctggctgacctcttctacatccccaacccatggcaaagggccctgcagaaagcaggcctttgctgaatgactgatgcatgaacacacacacagccacagagcacacgtacagcagggtcagctcttggtcatcttcctccaagtgccttatttacagctggggcaactgaggcttaacgacttatttcaaataagtgtgtttccttctaacagtacttggcacctgaagtgcttcggaaagagccttatgatcgagcagtggactggtggtgcttgggggcagtcctctacgagatgctccatggcctggtgagtcaggggtagccatctacaagggccatctggctagggatgggtctgtctctcatgtggtctacacaagctctgtccaggaaaatgagcaagccatctcttcattccagactaaaaaagataacgccaaggtgaatatgcaaattattatttttttcaataatgttagtttaggccaggggcggtggctcacacccataatcccagaactttgggaggctaaggcaggtggatcacctgaggtcaggagttcaagaccagcctggctaacatgatgaaacaccatctctactaaaaatacaaaaattagctgggcgtggtggcgggcacctgtaatcccagttattcggcaggctaaggcaaggagaatcacttgaacttgggaggcaggggctgcagtgaaccgcggtcgcaccaccgcatatccagtctgggtgacggagggagactctgtctcaaaaaaaaaaaaaaaaaaagttagtttacaacacactgtctcaccttgggtgcctcaaaatagcctttggaggctgacacagcaggaaatggagttattcatattttgctgatagggaaattgagaccaagagagatcacagtcctgataggttgtggagccaacccctgaccccagtcctaggctgcctgcttaggtagaggcatgtgtagatttgccctaggccatgctttgctttgaagtggtttcaccagcatagcttggtccctaggaaggaacaggctctgtggattaaggggaaggaacagctggaagaggtgtgggaggaagaatagtaagaaagagaaggggaccctggatatggtttggggcctggctgtcttcctaactgtgccacataattgctctgagccttgttttcttacctgaaaaattacaactctcttggaggatggttatgaggctggggtgaaatgattaaggtgaaagtgcaaatgttgccaaatgcaaagttggtgcataagctagatgaaaagagatgggcctcacgctggtgggaagagacttctgaccttcctagcaactctctccatgtgccggaagcctggagtcctgtctctttccagtctgccatgcgagccattgcacaagacaggggtcatactgaatcctcccagccgcccaccttgctccaagtctccccgagcctgtgttcactttgcatgggtgatcctccagctgttctccctctctccccagccgcccttctacagccaagatgtatcccagatgtatgagaacattctgcaccagccgctacagatccccggaggccggacagtggccgcctgtgacctcctgcaaagccttctccacaaggaccagaggcagcggctgggctccaaagcagactttgtaggtgacctaccagtggagcactggcccccatggggctcgcagcttcctgcagaggcagctcagaagcacattaacacgcatcctgctgccttctaaaaccaggcactgctcacttgttcatttggaaattcactactgctactagctgactactttctccagtctagttctcttagtcaatcaatatttactaagcaccaactatgtgccaggtattgagctaggtgttagggattcaataggctgggtctctgcccttattaagtttggggtgggggccgggtgcggcatacacgcctgtaatcccagcactttgggaggccagaacgggtggatcacctgaagtcagaagttcgagaccagcctggccaacatggtgtaaaccctgtctctactaaaaataccaaaaattagctgggcatggtgttgggcacctgtaatcctggctacttagtaggctgaggcaggagaaccacttgaacctgggaggcggaggttgcagtgatctgagatcgtgccattgcactccaggcagggcaacaagagcaaaactccacctcaaaaacaaaaacaaaaaaagtttgggattgggggcaggcaaaaaacccaaacattatatacaattatcacaaggtatgacaagtgtcaggaagaaaatgaataatgagctgagatagacaataatgggagggggggcaaattaatagcggcatgatcagggagttctctctgaggaggtgacaattaagctgaggcttgacggatgagaaagaggcagccatgaagacagctgggcaaaggctccccagacacaaggcacagcatgtgcagaagtcctgctatgggaacaaggaggagagtggccagttttagggtgttttgagcagaggtctggcatgacctgatttaagtttttagaagattcctcgggcttctttgcggagagtggactgcactgcatctgctttttttttttttttttttttccgagacagagtcttgctctgttgccaggctggagtgcagtggtgcaatctcatctcactgcaacctcctcctcccgagttcaagcgattctcctgcctcagcctcccaagtagctgggactacaggcacccgccaccacgcccagctaatttttgtatttttagtagagacggggtttcaccaagttggccagatggtctcgatcttttgaccttgtgatccgcccaccttggcctcccaaagtgctgggattacaggagtgagctaccatgcttggcctttttttttttttgagactgagtctcgctctgtcacccaggctggagtgcagtggcacgatctcaactcactgcaacctccatctcccaggttcaagcaattctaatgcctcagcctactgagtagctgggactacaggcacccgccaccatgcctggctaattttgtatttttttagtagagacggggtttcactatgttggacaggctggtctcgaacgcctgacctcaagtgatctgcccgcctcagcctcccaaagtgctaggattacaggcatgagccactgcgcccagccagcacttgctttttacaaatatctgagtacttcttccttgccagaccccaggctgggcaaatgggatatagggataaatgattcatagtccattcttagcaaattcattatattcattcattaaagtggcactttaaaaataatcctactttttttattcaacacaaggtaatttggatttacaaaaagaaggccgcaatattttctcaccaggagtttgctttcttttctaacatagtggttaagatgaatggactaggccaggtgcagtggctcacatctgtaatcccaccactttgggaggccaaggcgggcggatcacctgaggtcaggagtttgagatcaacctggccaacatggcgaaacccggtctctactaaaagtacaaaaattatccaggtgtggtggtgggtgcctgtaatcccagctactcaggaggctgagacacaagaattgcttgaacctgggggtgggtggaggttgcagtgagctgagatgggcaccactgtactccagcctcggcaacagagtgagactctatctccaaaaaaaaaagatgaatggactatgaggcaaactacctgggttcagcagatccctccttcactgcttactagttacaggaccttggacatgttgcttaatttctgtgagccgcagtttccccattgtaataacagcacctaacacagctgttttgaagatcaaatggattagtattaatgtatgcaaagtactctcagcagtgtctggcacacaataagtgctttttaagtgtaccaaaagctttacattccagttactgtaaatcgtaacaacagttagggcatctgctgcctattcctggccagcttaaagaataggggcttccgtgaagatgtctcctgttccaagcaaaaatttgtatcttaaaaaaatatgtatgactcttaaaataagttatacattcacatagatcaaaattcaaagggtacaaaagagtatctagaaaaagtccttccagccacccagttcctcaattcagaggcaaccaatgttaccaatttcttgggcattctttcggaggcttttttttttttttttttttttttgagacagagtcttgctctgttgcccaggctggagtgcagtggcatgatctcggctcactgcaacctctgcctcccgggttcaagtgattctcctgcctcagcctcccaagtagctaggattacaggcacacaccaccacgcctggctaatttttctatttttgtagagacgaggtcaaccatgttgaccaggttggtcatgaactcctgacctcaggtgattcacctgccttgacctcccaaagtgctggcactaccagcgtgagccactgcacccagcctcttacggagatattttggatctgggttgttaaccagcccactggggttcctgatatagggaggtggagaataattatttgagaaacacagatagaggatgtgatggaaagaagttggtgccaatgttgattttgattaggaaaggtggtgaatcatgaccagggctgagtcctaaaatctgggtgtctgggaatctgaaggtcttcttgggggctttatttttcaaaccttccctagtgaattgatttagtctacttctctggtttgcatactggaaaactcaagatgtactgaagcagagtgaggggaggggtctccaagctcccactggtactcccccacccccagagcagattctgatgtattattcactgacacccccaaagcctagcaaagggtcggtgcccagagaagatgctcagtaaatagttttggaataaacagatgctgtagtggggagaagggtttggattctggatgatgggagaggcttggctgcaaaactctcttgtcccaggaaactagccagaactgcaagttaatttccagttgacagccagttgcttgtggagctctggaggatgtgggggtgaggtgagagcacccatggggagggctacttctaaccagaaccttttttctgcacttcctgcagcttgagattaagaaccatgtattcttcagccccataaactgggatgacctgtaccacaagaggctaactccacccttcaacccaaatgtggtaagaggtcacagcattctagactctggatttccggggctgggggagcttgctatgcttgccaactctccttatctagatggaaaacttgggggtccaagaagctcagtcatttgtcctaggctacacagtcagttagagacagaactgggcctgactacaggtgcagctcttggataaacagccatgttgctgctcctttgtcttgagcaccaataaataactctggctgcagagacttttacagtttgtgaagtgctctgtttcgcacagcacacccacatagggccaagccctttagagatattttatccttttctatttatagactttttcctgataataaaaatgacatatatccttataaaaagtatgtaaaacactggccaggcacagtggctcacgactgtagtatcagcactttgggaggctgaggcgggtagatcacttgaggtcaggagtttaagaccagtgtagccaacatagtgaaaccccatctttactaaaaatacaaaaattagccagacatggtggtgcacacctgtaatccctgctactcgggaggctgaggtgggagaatagcttgaacctgggaggcaagggtcacagtgagccaagatcatgccattgcactccagcgtaggcaacagagggagacttcatctcaaaaaaaaaaaaaaaaaaaaagggaatgtatgtaaaacagaaaagtttaaagtagcagtggcgaaatgcttattatctcactacttaagggaaaccactggcatatttccttccagtcacttttctatgtgtttttttttgtttgttttgttttgttttttttcttgagatggagtctcactctgttgcccaggctggagtgcagtggcacaatctcggctcactgtaagctctgcctcctgggttcatgccattcttctgcctcagcctcctgagtagctgggactacaggcgcccaccaccatgcccggctaattttttgtatttttagcagagatggggtttcaccatgttagccaggatggtctcgatctcctgacctcgtgatccgcccgcctcggcctcccaaagtgctgggattacaggcgtgagccaccgtgcctggcctgttttgttttgtttttaacctaattaggtcctactttatagtatctatatgtgtgtgtgtgtttattcatctatattatcttcctccttttttggctaaaaactatgttataatttcctcatgtcataaaaaattttataaatacaatttttagtggctgcataatatttccatcttatgttggtaacataatttacttacccatgttcctaatggcaatcttatggttgttactatgttttttctttatcatgatgtgctgatgaacagctttaagtatatgtctttgcccagaattctggtcatttctttaagatggattccatatggggaattcccaatgctaatgttttttagattctttttttatttttattttatttatttatttttttgagacagagtctcgttcgatcgcccatgttggagtgcagtggcacgatctcaggttcaagcaattctcatgtctcagcctcccgagtagctgtgattataggcatgcgccaccacgcctggctaatttttgcattttcagtagaaacggggtttcaccatattggccaggctggtctcgaactcctggccccgagtgatccactcgccttggcctcccaaagtgctgggattacaggcgtgagccaccgcacctggccatttttaggttgttgattcacaccaccttttcactgtgtggaagggagaaccatctacttcctaccagcggcacttgctggagagttctcatcttgcttgcactctgaagcatgtgtggttattgttttttactttgcaaatttggtaagtaaaaaacagcatctcttaattgttttaatttatatttctttgtcttatagtaaagatggttagttttttaaatttatttattttttgagacagggtctcactctatcacccaggctgatgtgcagtggcatgatctctgcctattgcaacctccacctcctggggtcaagccatcctcctacctcagcctcctgagtacctcagcctcctgagtagttgggaggtgggtgccaccacacctagctaatttgtattttttgtacagatgatgtttttctatgtagcccaggctgatcttgaactcctgggctcaagtgatccaccccctcagcttcccaaagtgctgggataacaggtgtgagccaccacacctggccagtttttattttcatttttatttttatttttattttattttattttattgaggtggagtctcactttgttgcccaggctggagtgcagtggcacgatctcagctcatggcaacctctgtcttcttggttcaagcaattctcctgcctcagcctcccgagtggctgggactacaggcatatgccaccacacctggctaatttttgtatttttagtagagatggggttttactatgttggccaggctggtcttgaactcctgacctcaagtgatctacccaccacagcctcccaaagtgctgggattacaggcatgagccatcgcgcctggcttttatttttatatttttgagatagagtcttgctctgttgcccaggctggagtgcagtggcacgatctcagctcactgcaacctctgcctctccaggttcaagcaattctcatgccccagcctcccgagtagctgggactacaggcgctcagcaccatgcttggctaatttttttgttgttgtatttttagtagagacggaatttcaccatgttggccaggctggtcttgaactcctgacctcaagtgatctgcctgccttggcctcccaaagtgctagttttgcaatgttaattggtagtggcagtgtgaatgaaaggagtcctattggaggtgggcgtgtgaagctgtgtggtctacctgtaaagcatggtgccaagccccttccatcgaaacagcctgcatatcaaacactgccaatgttaattcaccatttacatttctcatttgtttaattacctattcatgaacttgtctttgggcactggatcagataggatacactcgggccaggcaccagaaaagcttcttttcgttgggattttaaaaagacagtgaagataatgtcgaacttataccctggagagagaaccatacatggaatactaggcagagatgaatggactttagaatgagacactccggagctggattcctggttttgtcacctaccatttgtgaggtcttcagtaagtctctttagtatcattttcttctacagtcacacaactaataagggccaggatgcacattctgatcttggaactctgagtgctgggctgggactaccttgtcttgtagccttattgagaagctagaaactgtgatctgtttggctccatagcccgacttgcacactaaagcagatttgcaagcccttccccttcctcacctgcttacttcataaaacccaggcctcctccacagagagactgtattggttagctcttggtgtataacaagcaactccaaagctaggtggcttaaaacaacaatcttttggctgggcatggtagttcatatctgtaaccccagcactttatgaggccgagctattagcattgcttgaggccaggagttcaagaccagcctggtcaacatggcgagacccccatctttatagaaaaatagaaaattagccaggtgtggtgctgcatgcccagctactcaggaggctgaggtgggaggctcgcttgagcctgggatgtcgaagctatagtgagctgtgatcatgccagtgcactccagcctgggtgatgggcaaaaaagaccttgtctcttaaaaaaaattattttgttcggattctatgtgtttttttttaagtctgagtcaggccagctggtctctgtggagctctctcatatctgtggtcagctagcgggacagttggcagttgttgatctagaattgcctcactcccatgcctgggagttggcaggcagccagggcaactgagttcttcatgagcctctcatgctccagcaggctagtctggggctgttcacatggtggcatcagggttagaagtacagcaagagagcaactcctgatgtgcaattttcaagcctctgcttgtgtcatatttggtaatgtcccattggcctaaccaagtcatatggctaacttacattaaaggaatggagaaatagactccacctctagatgggaaatggagaatttgtgaacatttttgtaatctccctcacaggtcttcctccaaaatagctaaagcagccccagtcaatctccaccatatcaccctattttctcttcttcataggacctatcaccatcctaagttacctatttgtacatatgcttattatcaatcctcctaccccccacacaatgtaagctccatgaatgcaggggctcactttatcttgttctcctgtgttcccagcgccacgaacagtacctggtaggcattcagtaagtgttatgttgattaactgacttgcctgacgattggtgtggaggcagaataccagggggtgagaggaatcaaatgatcaatgtaaatgcacaggaaagtgacagtcaagtatggatgactgtgaagcatggggcactcacagaggcctgacatccctctctgaggatctgggctcctttggcagctctgaccccggtgttttcttctcatcattggcttttattgacagacaggacctgctgacttgaagcattttgacccagagttcacccaggaagctgtgtccaagtccattggctgtacccctgacactgtggccagcagctctggggcctcaagtgcattcctgggattttcttatgcgccagaggatgatgacatcttggattgctagaagagaaggacctgtgaaactactgaggccagctggtattagtaaggaattaccttcagctgctaggaagagcgactcaaactaacaatggcttcaacgagaagcaggtttattttttccagcacataaaagaaaaataatgtttcggagtccaggactggcaggacaggtcatcagatactcagaggctgtatctctgccctgccaaccttgacaaatggcttccaatgttaggtttgctacaagatggttactggagctctagctgcctattttgtgtttagggaagggaaaatggaggaaaggggagaagagcaaagggcgcttttaaagagctttcccaaaagctccacccaatgacttctgcttccatctcactaaccacccacccctacctggaatggaggctgggagatgtggcttatttgctgggtacgtgactatccctaataacaaaggggttctgacactaagacattaggggagaatgttgggtaggcagccagcactcttttaccagagggcctcctggtgtttggattttgatctcaatgtgtaaaatgacagagatgtaacaagctcatagggtatcaatatctcttattgttctatgttgatgatatttgtctttgttgtgggtaatactggacatttgttattgggtctgggtgcctggtatctgaaccccttcttgtctccagagaaccccctattttatgagacttcatgggggggcaataactacctccacttaagagtacctgaaaatgctagacactgactttcccagcctccccttagctagggccaggcatggggaccagggataaacctgtgccacattttgactcagggaagggatcgggagcgctcttttgtgtggtaactgtgataacagtacccgcaaaattgagttcctggtgtagaagtgacaaggatgcaaactgtagcagttggtgctcagtggcagcaacgccatcagaccagccctgcaatgtcattcctggaagcctcaagtgttttttttttttttaagacagtcttgctctgtcgcccaggttggagtgtagtggtgctatctcagcccactgcaacctccgcctcctgggttcaagcaattctcctgcctcagcgtcctgagtaggtggaactataggcacgcgccatcacacctggctaatggtttgtattcttagcagagacagggttttgctattttggccaggctgttctcgaactcctgacctcaagtgatcctcccgcctcagcctcccaaagtgcgggtattacaggtgcgagccactgcacccgcccaagcctcaagtcttgtctagctttccaaatgatctgagaatttctgatcctttttaacacactccttttttgcttaattggccaaagttagctttagatcgcctgcttatgcttggctagttgctgtactagactcttccatgtctgttacaaattttccatccaaacaaccctgaggtaggaattattactgtcccctttttaccaatgaagatgcagagtcagagaagctgttccttgcctgaaggtcacatagctaatgagggccagagctgggacttggagccctacaagctggctccagggctctcacattgaacttttgtgctgatctgcttctcaccctggctattaggtccaggcagaatgactgccaaaatctctagtgaggagctaagtcaaaagttggctggaacaagccaagtataagaaatggggtattgaagaggagacattgaacgggatgccgctcctggtctgagcctggctgccaggttcatgccgtgctccaccgcacattggggagctcagagctggacagagctggaggctgctgcagacttgatgcctagagcttcctgtccaccatggagctccatatgttcaagattagtcttttttttttttttttttttgagactgagttttgctcttgttgcccaggctggagtgcagtggcacgatctcgactcaccgcaaccttcgcctcccaggttcaagcaactctcctgcctcagcctcctgagtagctgggattacaggaatgcgccaccaggcctggctaattttgtatttttagtagagacagggtttctccatgttggtgaggctggtctccaactcccgacctcagatgatccgcccacctcggcctcccaaagtgctgggattacaggcgtgagccaccgcacccagccaagattagtcatttctaaagataattctgatcggacagaacgtgagcggtaacacctcataaattcagaacaccctgcacttgtgggatggattgtgcttccttacttcagtggaaaagtggttcgtttcggctgggcgtgctggctcacacctgtaatcccagcactttgggaggccgaggtcaggagtttgtagaccagcccggccggtatggtgaaaccctgtccctactaaaaatacaaaaatttagctgagtgtggtggtgcatgcttgtagtcccagctactcgggaggctgagacacgagaatcacttgaacccgggaggcagaggttgcagtgagccaagatcgtgccactgcactccagcctgggcgacagagtgtgactgtcttattaataaataaataaatacgaaaagtggtttgtttttttacaaatgtgtggttcatactcctgggtggccttattagcttttttggttgggagacaagggaaggaactttcttggatcagtgtgtgctggtgattttattgccttttcctcttaattcaatcccactctttcccttcctcaagtcttgttcacccagcctcctgccccaggaatcacggggaagaagtctgggagaccacagaaaaaacaccaatgacactgagctattagagatcaaaactgggtcaggaagagttcatgttaagctttcacatgtgctaagaacgctgaaagatacacactgatttccatcttaatagtgccagataattgacaaatttgggacaagatgagggagaggtcaaaatccccctaacttcccaaagcaaaaaaacaggagtataatgatcagaaacgtaatagtagtgtcagaagcacacaatcagctgtggacggtgaaacatataatggttctatctgttctgagattgtaaaagcacaattattttcatcaggataaaaaataaaaatgaaaaactatgctgttgaatggaacatgctacaacctatgtttattgagcacattccaagttttatatgcattatctacaatcctcactataagccagcatttagaaattatgaacttcagactgggcgcagtggctcacgcctgtaatcccagcactctgggaggccaaggcaggcaattcacgaggtcaagagttcaagaccagcctagccaaaatggtgaaaccccgtttttactaagaatacaaaaattagccgggcatggtggcgggtgcctgtaatcccagctacctgagagactgaggcaggagaattgcttgaacccaggaagcgaaggttgcagtgagcggagatcatgccattgcactccagcctgggcaacagagcaagactcagtttcggcaaaaaaagaaagaaagaaagaaattattaacttcgctttacagataggatacatttgctcagagattatgaaaactgcccaaggtcacccagctggtacaagtcacagcgaggaattgaacttggtgacaactactgattctaaaagtcttactcttgcttttttggggggggaagcggggacggagttatgctcttgttgcccaggctggagtgcaatggcgcaatctcagctcactgcaacctctgcctcctgggttcgagtgattctcctgcctcagtctcccaagcagctgggattacaggcggccgccaccacacccggctaattttttgtatttttatttttattttattttttatagagacggggtttcaccatgttggtcaggctggtctcgagctcttgacctcaagtgatccacctgccttggcctcccaaagtgctgggattacaggcgtgggccactgcacccggccaaaactcttactctttctgcaatctctaacagtgggagaaatgctctgggcaggtgctgtagcaaacactgactgcatatcaggcagaaagatcccaagatttgtcccagccttcaaatgggacggcctactctctcttcagtgagaatacttcatttccattattaccctaactgcaaactgtattcacccaattctgcaccaaaatacagcatccccaagaagagaactttttttttttaagagacagagtctcactctgttgcccaggctggggtgcagtggagcgatcatggctcactgcagcccgaactcctgggttccagcgatcttcccacctcagcctcccaagtagctaagactacaggtgtgtgccaccatgcctggctaattttctttttttatttattattactattattattggagagaaaaggtgttactgttacccaggtcccagactcctggcctcaagcagtcctcccaccttggcctcccaaaatgctgggattacaggcagaagccacttcatctgaccaaagagaattctcaaatcaccctgttctccactttctttttgagacaaggtctcactgtgttgcctaggctagagtgcggcggcaccatgacggctcactgcagcctcaacctcctaggatcaatcaatcaatcctcccacctcagtctcccaagcagctgggactacaggcgcgcgccaccacgcccaggtaatttttcctatttttagtagataccgggtttcgccatgttgcctaggctggcctcaaactcctgggctaaagagatccacctgcctcggcctcccaaagtgctgggattacaggagagagccgctgcgcccggcccgtctccacttttaaaatttccagtgacagaaattgtggaaagcaacacgagttgtatgtgttttaatatcctagattcgaagacaaacataaatgtaaataaaaactgtcagagctctctgcaatcttcagtttgggtcttccaggctgctgcagcgttgttcacaaatccacacacctctaaaggcaggcacagagcgctttcctgggtagtcgggtggcctgttggtagttgcaggcttctggtttcccatcttaatggcgatggcagggcaacctgtattggtggtgcttttgcacaagcagttctttctgccgggaacgcccttccccagcctttgccttaatgaataccactctctcttcaaatctctgctcaacaggggcgcctttttgaccagcttagtcgttagactccctaatacagttcatagttttcacatttttgtagaatctattcaagttctaactccccgccatgctcgccggcgctcaagcctagtaccatggcaagcaaagatgcggagttaataaaacagaattatacggtttatcattctcaacactaaacctgcgcacccttttccgttaagtagttcctaatagtccagcacagccttccgcccggccccgccctcgcctggctccactctgctcctgcgctttgggaatcgaagctggggcgttctccaacccccccgcgctggaagccttcactattctcctccctgtgggtggagcgaagtttgggcacttgggtcctaccgttgttattagtctttactcgtaattgatactaaagaacaaaattaaatgggtttatttttggtgaaaagttaattctccttatgtttggatttgcccctcatgcaccaaatggtacagccccacatcagtcaggctgcctacccctgacgcctgcgacggagaggcgccttccgtgctgtcgtcatcacgtcggccggagctagcgctgcgtcctgggccacgcctcccggcgcaccgacgcgcctctccggttactaagcggccttggatacctggccgcgggatgctgggcggcgtcaggtgagcggtggtcgctgggcctcaggtaaagggcgccaacagtggtgggccggctggggcgttggtgcggcctgggagctggcgagggactcgccgcactcttcgaggccgctgggccggtcatagaacatccagggtcccccggggtgaagtaaactgtgggcgcggacgtagcccgggttcctggcgccccggctgggcgcccatctccacggcctcgggtggtgcaggtgtttagtcgttccgctgactatgaaagagcatgggacgaggaatcgtacagtcttaatctctcttctgtcgtggctgcgacccctcggtattcatgtgggaaaatactgatttgactggtaatgttattgaagagaaagcgagagaatggtttggcagcgttacccaaatatttgttatttttatagttttaaaggccttatactattattaaggaaatgcatttctggctaagtctgacagtacaggaacgcagacctgctactctcaccaggggctgaactaacagaacaaaaaaagatagatgtatcacggtggtgggaccatggagggggcagtttttcaactggacaaaatgatgttaaagtgcttaaagaaggataaatatgtgaaagtagccaggaaaattctaaaattaatgctaataagggagattagctctccagaaccaccagatattataacataaaggtatagcaattaaactagcatagaagatgggtgcagcagtgtgggcccgtagtcctggctacttggtaggctgaggcggcaggatcccttgagcccaggagtcagagaccagcatgggtatcaaaaggaaaccctgtctctgaaaataaataaattaatttaaaaagtttgggactcagcaggagcttacaggtagataaaatatattagaactcagaataagagcgatttatatatagggatttattatataggcgaggtggtactgtatttcaaatcagcattgaagagatgaattggggtcaggcagcttttttagcaatttagaaaataattaaaccagtcgagcgaggtggctcacacctgtaatcccagcactttgggaggccaaagcgggtggatcacttgaggtcaggagttccagaccagcctggccaacctggtgaaacaccgtctctactatggcgcgcgcctgtaatcccagctactggggaggctgaggcaggagaattgcttgaacttgggaggcggaggttgcagcgagccgagattgcaccactgcactccagcctgggtgacagagcaagactatgctttgaaaaagaaggaaaaaaaaaaggaatgaagcccattttgagcaccacaataatttccaaatggactaaaatttaaatgttaaaaaattacatcacgaattagccgggtgtgtttgggcgcctgtagtcccagccgcttgggaggctgaggcacgagaatctcttgaatctgggaggcagaggttgtggtgagccgagatcgtgccactgcactccagcttaggccacagagcagactctctcaaaaaaaaaaaaaaattacatcatgaagtactgaagtaaagcattgttgaatttatttataatcttagaatgacaaaaaactcttctaagtgtttcatgtcatccagaagccaggaaggaaaagattcatacttttaactctataaaatttaaaatctatatggcctgcaaaattcaaccaaaccaaaaaaactaccagaagccaaataaacttatgaaaatgtttgtttaatgatcaattagaaaattatgaaacccgactgggtgcagtggctcatgccagtaaaccagcactttgggaggttgaggtaggaggatcacttgaggtcaggagttcaagggcaacatagcgagaccttgcttctacaaaaaatttaaaaattagctggacactggtgcgcgcctgtagtcccagctacccatgaggttgaagtgggatgattgcttgagcctgggaggtcaaggctacagtgagttgtgattgcagcactgcactcccagcctgggtcacagagtgggacttttatctcaaataataataataagaagaagtttttaaaaagaaaaatttaaagagaaaaatgatcaagagtacctggacaagaaaatcagaagaaatacaagtggcaaaaatctatagcaagagacaactatctcactaacttcaaagtggaaattaaaacagtaatgaggggggttttttggccctttattggcaaacatgacaaagactggaaataggattgtgtggaaacagaagggtgttagtggaaatataaatgagtataactttttggagggcaatttggaaatgatttactcagccattcaatagataagaatctctacaaatatgcaaattgcagaaaaacatgttgtttaacattgatgtttttagtattgttttagaaaatatttgataaaagatgtcagccagtagatgactggttaaataaattatggtagatccataaaatgaatactgtgtagctgtttttgttgttgttgttgtttaaagacagggtcttgctgtgttctccaggctggagtgcagagtggcgtgattgtggctcactgcagccttaacctcttgggctcaagcaatcctttcacctcagcctcccgaatagctgggactacagatatgtgccaccatgccctgctaattttttttgtagagatgtggttttatcatgttatccaggctggtctggaactgctgagctcaagcgatcctcccacctcagcctctcaaagtgctggagttacaggcgtgagccactgcacccagccctgtgtagctgtttaaaagaatatggtagatccatgtgtactgacaaagaaagatgtcaaatatacaaggttaggtgaaacaggtgtttcagaataatgcatatggtaagatcctatttcataaaataaaactgtaagttaatatatgtataaaaagaatctcgagctgggtgcagtggctcacacctgtaatcccagcactttgggaggccaaggcaggtggatcatgaggtcaggagtttgagaccagcctgaccaacatggtgaaaccccgtctctactgaaaatacaaaaattagctgggcatggtgacacgtgcctgtaatcctggcaactcaggaggctgaggcaggagaatcgcttgaacccgggagatggaggttgcagtgagccaagatcacaccattgcactccaacctgggagacagagcaagactccgtctcaaaaaaaagaaaaatagaatctagaagactataccctgcgcttaacagtagttagcagtaatgaatcaggatggaaacatggtcttgggacacaagagcagggtgatggcagggcagagccataggtgtaggctgttgggaggatctgggcaagaggcagaaagcaaaagcgggtaggggagggctgggttggttttggtcttaggtttctgtgctatgcttttgcatttcactctcaacctttgagaattgtaggagtttcctagataggtttcagttgtataccctttcttgataaattagtagtagaaggcaactatttattacttttagggtctttggaatattgtttattgattttctgatcccatctttcttccataaggtaaccatggagaaagagctgcggagcaccattcttttcaatgcctacaaaaaggagatatttaccaccaacaatggctacaaatccatgcagaaaaaacttcggagtaattggaagattcagaggtgactgaccatgtatattgttttcccttctaaatgatattgtcctgctgataaagctgagaagtctttattttcttaggtaacatagattgtttaggtgggagaagctcaatttaaagattattcagaattaggtctggcgtggtggctcacacctgtaatcccagcagtttgggaggctgaggcgggcggatcacgaggtcaagagatcaagactggccggcacggtggctgacacctgtaatcccagcactttgggaggccaaggcgggtggatcatgaggtcatgggttcgagacaagcctggacaagatggtgaaaccccatcgctactaaaaattaaaaaaaaaattagcgaagtgtggtggtgggcgcctgtaatcccagctccttgggaggctgaagcagagaattgcttgaacccgggaggcagaggttgcagtgagccgagattgtgccactgcgctccagcctgggcaacagagtgagactccgtctcaaaaaaaaaaaaaaaaaaaaaagaaagatcaagaccatcctggccaacatggcgaaaccctgtctctactaaaaatacaaaaatcagctgggcatgatcgtgcgtgcctatggtcccagctgctcgggaggctgaggcaggagaatcgcttaaatccaggaggcggaggttacagtaagccgagattgcgccactgcactccagcttggtgacagagcgagactctgtctaaaaaaataaaaaaacattattcagaatgaaataaattcttattaaaacgtctcttgggcaggacgcggtggctcatgcctgtaatcccagcactttgggaggctgaagcaggcagatcactagaggtcaagagttggcgaccagcctggcctacatggcaaaacctcatctctactgaaaatacaaaaattagccagacatgatggtgcatgcctataatcccagctactaaggaggctgaggcacaagaatcccttgaacccaggaagtgaatgcctgcagtgagccgagatcatgccactgcactccagcctgggaaacagagggagactctgtcaaaaacaaaaattaaaaaaaaaatgtctttcgaaatcagcaattaggatattattaaagcagcatattattaagttgttttccaaatcacaagccaaaagattattctaattatacacatgtagctttttaagatgttagaggctttcttcatattttgactcaggtcagtactagggaaaggaaacatgagaattaaatgagaataactttgtgtatgtgcatgtttttcttaataggtgaggatatgtaatcatacaagctaatggtagggctgattgaattagtagttgcagacttccttatgctttagcatggcttgatttgaacaccttgacttactggaagtatttgaacagaggccagatgactctggggcaggcctgtagagggaattctcactttgggagagagactggaccagttacctctaaatcccttcatctctgagcctctgtggcctctgcttccaaatagttaagagactaaaataatacataaattggtttaaattatggacttcatatttgcttttaaaattgtatttccagcttaaaagatgaaatcacatctgagaagttaaatggagtgaaactgtggattacagctgggccaagggaaaaatttactgcagctgaggtaagaaatatccactaaagaaggaatatggtgaaatgattaggagtctgagctttgaaataccggatttgaatcccccttcaccacttactgtgtggccttaaggtagtcacttcatctctcttttcatcatggagttgtgatgattaactgagatactccatgtaaagtaccaaacacatagtgtgggccaattaaatattagccacacttctttttttttttttttttttttttgagacagagtctcgctctgtcgccgaggctggagtgcagtggcgcaatctcggctcactgcaacctccacctcccgggttcaagcaattctcactgcctcagcctcctgagtagctgggactacaggtgcccaccaccacgcccggctaatttttgtatttttggtgcagatggggtctcaccatattggccaggctggtctcaaactcctgaccttgtgatctgcctacctcagcctcccaaagtgctgggattacaggtgtgagccaccgagcccagccagtagccacatttctttgctatatttttgctttgaaaataggaaaattccgccaggcgcggtggctcacacctgtaatcccaacactttgggaggccgaggcaggcagatcacctgaggtcgggagttcaagaccaccctgaccaacatggagaaaccccgtctctactaaaaatacaaaattagccaggcgtggtggcgcattcctgtaatcccagctacatgagaggctgaggcaggagaatcgcttgaacctgggaggcggagcttgctgtgtgccaagatcgcgccatctcactccagcctgggcaacaagagcaaaactccatctcaaaaaaaaaaaaagaaagaaaataggaattcatttaaaataaaagtgtttattattctagttcatggaatggataaagaatgataaatgtaaggcccagaatacaaatgacaagtattggtgagaatgggaagttattggaacccttccacactgatggtgggaatgtaaaatgatgcagtcaccatgaaaaacagtatggtagttcctcaaaaatttaagcataaaattgccatatgatggctctgtgtggtggcccacgcctgtaatcccagcactttgggaggctgagaagggtggatcacttgaggtcaggagttcgagactagcctggccaacatggtgaaacctcatctctactaaaaatacaaaaattagccgggcgtgatggtgtgcgcctgtaatcccaactacttgggaggctgaggcaggagaatcacttgaacctgggaggcggagttgcagcgagcagagatcgggccactgcactccagcgttggcaacagagtgagactctttcaaaaaaaaaaaaaaaaaaaaactgccatatgatctagcaattccacttctgggtatatgcccaaaagaatggaaaaccagatctcagagatagttgcacacctatcttcctagcagcgctattcacaatagccaaaaggtggaaatagcccaagtatccatcggcagatgagtagataagatatggtatatacatacaatggaatattattcaatcttaaataggaaggtaattctgatacatgctacacatggatgaatcttgaggacattatgccaaacgaaaataaggcagacacaaaaagacaaatactgtatgatttcacttatgcaagcatgaggtacgtagagtagtcgaattcgtagagacagaaaatagaagggtggtggttgccagggcctgggggaggtggggaatggagcgttgctgcttaataggtatagagtttcagttttgcaagatgaaaacagttctgcagattgattgcctaacagtgtgagtatatttaatactgctgaactaggccaggtgcggtggctaacacctgtaatcccagcactttgggaggctgaggtgggtggatcacttgaggctaggagtttgagaccagcttggccaacatggtgaaacctcatctctactaaaaatacaaaaattagccgggcttggtggcacatgcttgtactcccagctacttgggaagtggaggtgggagaatcgcttgaacctgggaggcggaggttgcagtgagccgagattgcgccaccgcactccagcctggcgacagagaccctgtctgaaaagaaaaaacaaacaaacaaaaaactgctgaactatatacttcagaatggttaagatggtaaatttaggaaagattaggtgtgttttttcacagtcaataaaacaaaaaacccagaacatagaaagagccattttacagagaatgggaagtacctttgtgctgagagagaatatggggaatagagaggttgaggcagggcaaggccaatgtggtccttagattgaggcaggccaaggtctcctgctgttactctgggtggtgccatggggaagaggtccactggggagcatttctagtgcactttgtttctcaatttgattgcaaagtgaccttcccccgctgggaatggcatggagagggacatgattgtttgatcaggttaattgacagaaggagtagaaattaccattgggaatgtggaggtaaccagcaactcctacccactgagaccctgagggatatgtacacacagagggcagtggcctgcagagcaacactctattgcttgttgggcttcggctccatctccccatccacctagcgaagccaatgagagagttggcctgatgtttgccagggaccaaccagcctcaggaacacaggggcatccaaagagagggtcagaacctggtgcctgggccttttcccaagtggagatgggtgccaggccaagccttagtttgggcttccaggcatggtaggctgatgcatccaagagacacaagtccttcgagaggcaaatttgatgtaactttagcctaataaaacgtcctctcccagaccagtccctgacaccataccttctctttagagttggagtgaggtgggaagaaaagggaaaaaagctgttagctttttttctaggaatcagcattcctttgtgttacagttcttccaatgggctcatgcttgtgagatcactgctttccttgtcattgctgctggcctcctagactgttacccctggagagctgtgtgatgcctttttcatgttgacttccagaaacttctgtgacaggacagacatcatatgtctgatattagatgctagtatcatgctagaaactaggctgaacagtctttccttatttccacctcaactacattgacgcattacactagctttgtggtggtattcagttacgaccaggtaaccacgtggctgagacgagtattttccaaccctaacagaccagcatccacctatattacagatgccaactttgttaccctgaattgaaatgcaaagataatctaacccaccaccattaaaaaagtaaagcaatataacttcctaactttaatgtacagaaattaaaggatgatttataaaagaatatgtgtatttcaaattgtaaatgtttatgcatatatatactagaagaatatacatatttcagtttgttaatgcttggtcatacatgcattagaacacttctttatgtttgacattttgaaataaatgtttaataagtatgtagaactccgatgaatgggataggtacatatgcagactggtggaagtgatgtattggcaattcaaatcatgagccgtgttgctgtcggtgatgtgatttttccaaaatactgactaactcttggtaaagttctatttttttttttttttcctgagacggagtcttgctctgtcacccaggctggagtgcagtggagtgatctcagctcactgcaagctccgcctcccgggttcacgccattctcctgcctcagccttccgagtaggtggtactacaggtgcccaccaccacgcccggctaattttttgtatttttagtagagatggggtttcaccgtgttagccagggtgatctcgatctcctggccttgtgatccgcccgccttggcctctggtaaagttctgttaataaaaagagtataattcttctctcagtttacatggtagttgggtacctccgaattcagtatatgttaaatcgtgcaaaaaatactttgtacagtatttacatagaatttgagctgggcgcagtagcttactcctgtaatcccaggagtttgggaggccgaggcgggtggaacaccagacgtcaggagtttgagactagcctggccaacatggtgaaaccttgtctctactgaaaatacaaaaattagccaggtgtggtggcaggctcctgtagtcacaactactcaggaggctgaggcaggagaatcacttgaacccaggaggcgaagtttgcagtgagccgagatcgagccactgcagcatgggtgacagagcaagacttcatctcaaaaaaaataaagaaattggagttagattttaggctgagcttcttttgtttgtttgctttttcttttttaaacctccgtgactatctgagaagatattcaaatgctgtggaatagttctttactgtgtgggactggtctgaatattgcaggaccttaacttccctgcccttcacccgctaaaatgtccttaaacattaatattatggcattaatattttgccatattaatattaatattatggtgatccagaatacatgctagatggtttaaatgcctccactgagagccactggcctggatcatccagtctcgattacaggaaatacctcacatttgctgccacactaacagtgtgaatgcattctaagccaatttctaaaattcaagtctgcaaaattaatctttcttcctgtttttgccataaagaaataagaaacctccagtttgtaccaaatatccattcttttgttagaagggtctcacttacgtgtatagctggaaactgggtcataattcatgtaagctccttcaacttttgcccacctgtgttattgcacaccacatccttcatgtatctttttcttaaaatgccagatggccaataggacacagtagataccaataactactatatactcattgcatttaggcaacatggacaaatcccagaaccacataatcatgaaaaccaagtcccagtagaatttcccaagcaaaagctatgttctgagaatatatattgcaaactagacctggcttgctattatcagtcatagaacatagcatatatttagggctgtctgggaagaggagtttgagaggaaatcaaaaggaaggaaaaggaagatgaatttagggagagattcagtctgttgttcagggtccaggatcatgcagttataacccatttgttttgtttttctgttgttgttccaaaaaatgtttactaaggatctgttacacacctagtaacaggtcctaggactaacgctagggatcaaagtcaaatagcacatgatctctccactcaaggaaccgatagtctaggggaaatgacacaaatggaccatctaccaataatgatcaatgttctaagttccacatttctacagaaacacagaaaagaggcattggattattgggtccagaggaaatggactttgagctgatttttattttatttatttatttatttatttatttatttatttattttgagacagagtcttgctctgtcgccaggctggagtgcattggcgcattctcggctcattgcaacctccgcctcccaggttcaactgattctcctgcctcagcctcccgagtagcggggattacaggcatctgcccccacacctggctatttgtatttttagtagacacggggtttcaccatgttggccaggctggtctcgagctcctgacctcaagtgatccacccacctcagcctcccaaactgttgggattacaggcatgagccactgcaccccgccttaattttgattttgaaataattcattttttattttgttttgtttttttgttgtgtttcgtttttgagatggaatcttgctctgttgcccaggctggaatgcagtggtgcaatctcggctcactgcaacctccaccacctgggttcaagcaattcccctccctcaaccttccaagtagctggggctacgggtgcataccaccacgcctggctaatttttgcatttttagtagagacgggggtttcaccatgttggccaagctggtctcgaactcctcacctcaagtgatccgcctaccttggcctctgaagattcatttgttttatacagtgtggggaaggcagggggagaggaaaattcagggagcatacaagagcgagagggccgtgctgtggcaaatctagtctgggcagtagtttccaaagtaggatgcatgtgatgaatcagtggggtgccaaaaggaaattatgtttattattcatattttcattacccttaaaacatttcctttttgggagttgttttgaattataaagtacatattttatatagagatacatacatattgaatgtatttatatacatgttcagatttttttctgctggagtgcttgatgaagaaagttgagaaactatttgtctggaccacccaccccagattttctcaggctagaccagcaagatcaaccctagatttttctcccttccccagctttgtgaaaatgagagagcttccaggagataagcagaaaacatgcgtttctctctatggtttggttggtcaatgaccttgaacagaattcctcccaggtgtggtatgaaatgacttcatcctgatatcctctgtgggcagtcaagagaaggcattgtctaaatcagtggttcttaactaggggtgattctatttcttcttctcctgagggaacatgtggcaatctcaagagacatttttggttgccaggggaaggtaggtacaactggcatctagtaggtggagaccaggggtgctgctgaatggagaactgagtgcttcctttagttaagtttttcacttttgacttgctctctagatagtcagctttgaaattgtcaatttactttgagtattttggagctttatgctcaaagacaagcttggagatcctacatagagagtactttttatcttatatacatttatatgtaaatgccttatagatttgaaatatgtatttttcatctagttaaggtcttattcatggtatttcgggcaaaagtctttcaagtatattcatagattgcttttttcctttgtgtagtttgaaatcctgaagaaatatcttgacactggtggagatgtctttgtgatgctaggagaaggtggagaatccagatttgacaccaatattaactttttactagaagaatatggaatcatggttaataatggtaattagtattattattttcagtagaggcagtacttttctatctattatttgatatcatagccctctaggtccagtggcataatggaaaaagccctgggctgtgtgtgcgtgttttaatgttccattctcatcagcagtctgagcctcctaggcttgggctgcttccatttataaagcgagatggattggaaccaagttccagggtgcccttcaggtcaaaattggtatgagtctataatatcgaatttatttctaacctaaaatatacctccttctctttttccctcatagatgctgtggttagaaatgtatatcacaaatatttccatcctaaagaagctctagtttccagtggagtcttgaacaggtaagcatgttgaaagcagaaatatcttggcaaggcatcgtcgctcacacctgtaatcccagcactttgggaagccaaggtggatggatcattttgaggtcaggagttccaaaccagcctggccaacatggtgaaaccccatctccctgtctaaaaatacaaaaaaaattagccaggcattgtagcaggcgcctgtaatcccagctactcgggaggctgaggcaggagaatcacttgagcccgggaagcagaggttgcattgagctgagattgcaccattgtactctggcctggctgacagagcgagacttcatctcaaaaaaaaaataaagcagaaatatccttacacataactctcatttcttctacataaatcttccctcgtctcttctcatacattcttttcactgccctttcttctttcttgcctttttgttttgtgttattataatttattttactatattactactactcattcatcaaattatttttcttcatcttttgaaacttacttcacattcaatttattttttgtttatatatatatgtattttttgagacagagtcttgctctgttgctcaggctggaatgcagtggtgggaacacagttcactgcagccttgacctcccaggcttaagcaatcctcccaccttagcctcatacttgctgtactaatgaatgcagtgtgaaattctcaaattttttttgtttactagattttaatttttcttcttcaagggaaattagccgagctgcaggaaaggctgtgcctgggatcattgatgaggaaagcagtggaaacaatgcccagtgagtgtgttttctgatgccacatgaggaagatgtatcattttggagtcttctttttcaaaatgaaaagagcttttgtttctggttacaaaaataatcagaatttgaacagttcaagaggaaaaaagtagaagctctgcactgtaagtccatgctcctccccctgaaggtagtcttaatatagtatttaggcccagcatggtggctcacgcctgtaatcctagcacttttgggaggccgaggtgggtggcccacctgaggtcaggagttagagacaagtgtaaccaacatggcaaaatcccatctctactaaaaatacaaaaattagccaggcgtggtggtgtgcacctgtagtcccagctactcgggaggctgagacaggagaactgtttgaaccccggaggcggaagttgcagtgagccaagattacgccactgcactccagcctgggcaacagagcaagactccatctcaaaaaatatatagtatggtatttagatttctaggtttttttttttccatgtataaagttataggtgagtacctcttcatttttaatgactggattaaattggatatatcccagtttatctaaccaactccctattattggacatttaagtagtttataatgtttttctttaataataccacctaatgtttgtcaagcatcgactgtgtgacaggcatgtattacctcatttaatccttacaactctggaaagttagagatgagatacagagatgtaattgcccaaatgcacatgactactctgtgtcagaacttagatgcaaacataggcagtctattctagagcctgcactcttaacttctgttccgtattgttgttatagacaattttatagccgggtgtggtagctcactcctgtaattgcagcactttgggtggccaaggcgagtggatcacctgaggtcacgagtttgaaaccagcctggctaacatggcgaaaccccgtctttactaaaaatagaaaatttagctgtgcgtggtagtgggcgcctataatcccagctactggggaggttgaggcaggagaatcacttgaacctgggaggtggaggttgcattgagctgccatcgtaccattgcactctagcctgggggacagatggagacttcgtctaaaaaaaaaaaaattatatttgtcattatagataataaagcacaaatgaacatcttttttttttttttttttgagatggagtctcactctgtcacccaggctggagtgcagtggcatgatctcagctcactgcaacctccgcctcccaggttcaagtggttctcctgcctcagcctcccatgtagctgggattacaggcatctgccaccacacccagctaatttctctatttttagtagagatggggtttcaccatgttggtcaggctggtcttgaactcctgacctcaggtgatccacctgcctcggcctcccaaagtgctgggataagtgaacatctttgtatgtacagttttgtgcacttgtggtagtatttttttttttttaattgatcattcttgggtgtttctcgcagagggggatttggcagggtcataggacaatagtggagggaaggtcagcagataaacaagtgaacaaaggtctctggttttcctaggcagaggaccctgcagccttccgcagtgtttgtgtccctgggtacttgagattagggagtggtgatgactcttaacgagcatgctgccttcaggcatctgtttgacaaagcacatcttgcaccgcccttaatccatttaaccctgagtggacacagcacatgtttcagagagcacagggttgggggtaaggtcacagatcaacaggatc

SEQ ID NO: 61234 - DNA, 477 bp, Homo Sapiens
ttttttttgtattttttgtagagatggggttttaccatgttgggtaggctggtctcaaactcgtgagctcaggtgatccacccgcctcagcctccaaaagtgctgggattacaggtgtgagccaccacacctggccaatgggccatttctttggttgaattttaaaatattattttttatcatttaccattttctagggcattttaagacccaatttattctgccacaatcatgtcatcagaatagtcaaatgaaatgactttcatttgaattctcactattaagatttaaaattgtggaaaactaaagtgggattggagtagactgttaggaatagatcctagatgaaaaatcacttttggatttgcagaaaccctggatacaaagtagttcaattaaccataaaacaaggatcagctgatctctacacgccaccacctgtttcatgtacatgggaagagtaaaaaatgaacccgg

SEQ ID NO: 61235 - DNA, 524 bp, Homo Sapiens
tttttttcagttcaagaaatttatattcaaaaatggtgttaagaatacacatgattttacaagatcattcatcatagcaccaagcctaatattccttaatagaaaacagtcaaataacaaatactccagttaattcccacaggtataaattatgcaaatagccatttatatcttaatttacagtaatcaataagtaagacggcacattcatatattggttataaaaggatctttttttttacaaagcgtcagctatgtatatcctaaatagacaaaaataatccttgtactacaaaataacatttcattgtcctcaatagttttcttagagctctcagtaaaaactttcagacatagtcaattaagccctgcgcaataaggaaacattaaatctgctcaatagaccagactcccccaaaataaaacaatgatcaccacccactacaatatggtctgaacaatctcctgtctccaagtttagttaagtctgtcctgaggatgtacagtagggaacgaccattttt

SEQ ID NO: 61236 - DNA, 341 bp, Homo Sapiens
  misc_feature (32)..(32): n is a, c, g, or t
tttttttttttttttttaaaatcattaaattncattttattttcattttgccctttattttttcattttttagttgtgaaagtagttcgtatatatttagaaaaatgtttacttttaataaactattcatttaataaatgtattaactgagcactaaataatgctcaaaggatcatagatttttttcctccacactaagcccatgggacatgaagaatatctgggtgcttccaggatattaagtaggaatgtgccttttcccactcctggcctttgggtactgtcctgagcatgggatgctggggcaggggctgccttggccatcttgccatctgcatggc

SEQ ID NO: 61237 - DNA, 485 bp, Homo Sapiens
tttttttcggttttgaaatagatatttatttaaaataggtttcacactgatttcaataaatcaggcactccagaacacaatgtatagggtggcaattatatgttgacttcttaatactccaagagataaagatcttttccaaataagcaaaaaaagtagtcattgtgcaatattagcctctaagagcaatttccctttatagactacaatattactgacagtttcatgcacttttgctttataaagaactccacaggaagaaatttccccagtctttcccggtagacacagctacattttctgtcacacacaaaccattgtcacagtacagcatgtccagatccaaagaatcaaggggtttcacaattgcttccccaatgtatgccatgaggttggtcagatttgaaaccattcccgtgacaggatcaatctttataattgtgcccctgccgtatggatggtttgcatttcccaaacaggagtgt

SEQ ID NO: 61238 - DNA, 457 bp, Homo Sapiens
  misc_feature (243)..(243): n is a, c, g, or t
  misc_feature (247)..(247): n is a, c, g, or t
  misc_feature (252)..(254): n is a, c, g, or t
  misc_feature (270)..(270): n is a, c, g, or t
  misc_feature (279)..(280): n is a, c, g, or t
gaactaataaaattttatttcttaaatataaatttgacctaaaatattttctcaaactaattcatgaaacagcaacttttaccaatacctttgtatactctcagttctcattcagtataaataaaattttaaaatcctttcatagttctattagaaataagtagtaaattttgatatattgtacatacacacgtgtgtgtgtgtgtgtgtgtgtgtgtgtgtgtgtgtgtggttgattgtgtncctntggtnnnctcttaggatgacagncactgtgtnncaacacctgggtcaactcttttaatttatatacaaagcaaagaacaacattaatggagatgcacaatgattattcaaacaagctatatatatgtacaaaggcaaacagacacattacagtctctgcagactggttgtatatagtaagaaaagatcaaaagacttttaaacctaaatg

SEQ ID NO: 61239 - DNA, 563 bp, Homo Sapiens
  misc_feature (11)..(11): n is a, c, g, or t
  misc_feature (80)..(80): n is a, c, g, or t
  misc_feature (378)..(378): n is a, c, g, or t
  misc_feature (422)..(422): n is a, c, g, or t
  misc_feature (434)..(434): n is a, c, g, or t
  misc_feature (481)..(481): n is a, c, g, or t
  misc_feature (490)..(490): n is a, c, g, or t
  misc_feature (507)..(507): n is a, c, g, or t
  misc_feature (514)..(514): n is a, c, g, or t
  misc_feature (546)..(546): n is a, c, g, or t
  misc_feature (552)..(552): n is a, c, g, or t
  misc_feature (560)..(560): n is a, c, g, or t
ttttttttttncttatttaaatctttattaaaagaaaaaagatttaaaacaagtaacaacaaatttcattaaatattaancattttaattatcaaagatatttagacaatacgtttctaacatttctgcacagcagaagcacactgattatagagctcagactgtcatgtgctcatgtgagtttatttttggcataaaagtatctaaagtcacatttaaacaaatgtgataatattttataaactgatagtaacttactgatgattgattctcaaagctttcacaaattatcattatatgattgacattctcttaagggtgaatacttttctggactctttctgtaacaaacactgagtaaccaactggaattaattnccttaaaagttagtagtactggtaaaattatttaaaactgaatnggaaattatgtncccgtttatagtagtacaatacaattaacatacggtaagtaaactgntttttttcntaccaaaggttagaaantggaagnggcatatatagaacaggctttggatgaaaatnatggancatttaanagg

SEQ ID NO: 61240 - DNA, 542 bp, Homo Sapiens
tttaagagcaaagcttttctttttattgcagttattagtgaaagttatacttcaaactgaagctaagcaacactaaaaccattaatatttttaaaatcaaggattaaaaacaaaaacaacatagaactctccagtaggcagaatggcagaaaaaagagtagtggttctgtcacagaacatttcgtgacagtttggctcagaaagaatcatgacaatttcttttgttgttgttgttatttgcctcccaacaggaaacaatgacactttctttaacacaaaatattatatgagctgcttaaaaaccagcttcttcaagcttctcagtctcactcataacttgttcgtagtataataatttctgtggggaagatagtttaactgaagtataatattttttgtggggaagatagtttaactgaaaaagaaaatatattaccaaattttaaatactgaaaacaagggcttttgttcaaaaactttatttgccttctgctcattataattacatataatcttcaaggagtttaaatgacaaccaaatc

SEQ ID NO: 61241 - DNA, 438 bp, Homo Sapiens
tactaaattcgcggccgcgtcgacttttttttttttttttgagacagggtcttactctgtcccccgagtgcagtggaactatcttggctcactgcaaagcaaaataaaaagctagaaaagttttctggggagggagctacagttttctatcacattcttaaagaggtctgtagtaaccatcaaaaatggttaaatcactgatacagagatcatggtgcttgacaccttgtagaagctcaatacacatttactgaacaagtgaatggattcaggggaattgcagacaatgttagttgtatagaaccatttgtttttgagagtctgccataaccagataaatgaaacacagtaccacttctatgaccaatcccttcccttgcttatacagactccttctgaggaaactgaggctcagcagggttaagcaacttgcccaag

SEQ ID NO: 61242 - DNA, 478 bp, Homo Sapiens
  misc_feature (2)..(3): n is a, c, g, or t
  misc_feature (7)..(8): n is a, c, g, or t
  misc_feature (118)..(118): n is a, c, g, or t
  misc_feature (164)..(164): n is a, c, g, or t
  misc_feature (358)..(358): n is a, c, g, or t
  misc_feature (417)..(417): n is a, c, g, or t
  misc_feature (437)..(437): n is a, c, g, or t
  misc_feature (450)..(450): n is a, c, g, or t
  misc_feature (466)..(466): n is a, c, g, or t
gnngggnnggtatataagtggttggtggattttaacacaccagttattcctcctgtgaatgcctcagagatggtggaaactgaggctgatgggggaacaactttagctagggaagganggtattggttctcacatttgacccacactcctcctgcccggggttnttcctctctgcctcccttccctacactgctgctgtcctctttttgacatttctatttatttatttttctgccctctcagatcagcaggagagcacctaggtctcagccagctctctatggcaggcctctgcagcagcacttgtgaagtgctagtgattcacttccttctctattgctgacccttctctttcttnggcaggcagtccaggggagtggaaggaagggtcggagtataagcagggaaagccagggnacttcctcacattttcactnggaagcacttctncctcttattggcaggncaagttttttaa

SEQ ID NO: 61243 - DNA, 480 bp, Homo Sapiens
aatgtaaaaagtgtgctgggatatttgtttatcttagtttgagactattaaaattgcatctgagcataaagcataagttagattttttttcttagcatacattttaatgactcagagaatgatttcataaaaccatgaaaatttcacacgattctggaattcttgcttcttcccatgagaaacaaagagtgggaaatggaggccagaagcaattttgcctttctctttaaaaagcaggctcttttttctctgggttctagtaaggtataaggccacgctggccactcctacgatggctgtttactgacttggcacaacacatgtggcacatgatatcttgtgctgcttccgcatgctatgattttgactctatcaactagaatactgaaattggtggaagcagatgaaatcattcttggggaaaaagtcacacacttagtagataattttcatcattagctttgaaatgttgactcttca

SEQ ID NO: 61244 - DNA, 462 bp, Homo Sapiens
ttttcagccaatcaagataatgatgatgatcaaggtgccccaccactgcataggaaaagtctttggcagcaacatggttaagcttaactatttgaacaagtttcacagaagatgaacattgtccaggggttttatttgctcaagctctggtgaaacttattaattcttctactttgcagtgattaatggtcccctagtgcaggggcaggactgggcaatccaggtgcaactgtaattgttacactgaacagaaacatttcctttagacaaacgttcccagaggggttataaatgaaatggacattaccatgaaaagtaagcctccaagtgtctacatctagtgcaacccacttggacattagactatgaagacttagactcccccccactttcctgttacaaactgacaaaataagtacatcaatgctctcagtcattacttttcttcggtggcactttgtt

SEQ ID NO: 61245 - DNA, 603 bp, Homo Sapiens
gttttttttttacatgggtcttttttcctttatttgtaaaattataaagagatgtgtcataaaaatccagcaagaaggtcttatctccctgagtcccactattcgaagcaggctcccagaggagggtatcattttatgtcctggcaagaaggtcttctcttcttgaagctgccaacactgtatcctcaaacctgtattccagaaactgtgtctgtgatgtgctgtggccaagaagtgattctcaaaaaaaaaataaataattaaaaaagtagacatggatacagctctctgatgattctttattcagctaagggggcaccacacggttcctttagcagcatctccagtgattctaattcccttcggggctcccgtggtcgtaagaatgtgctggcaaaagtttctttttccaacaaagaaatcaccaggagtggcttaagggacttccttaaaatttctgggaaccacggttctggacagattggcaatcctctttctggtagatgacccctgtggattcatctcttttttcctccatgatttttactgagatgacatttgtatccatggggtaggggtactgggaagacaggaggcagatgg

SEQ ID NO: 61246 - DNA, 498 bp, Homo Sapiens
  misc_feature (162)..(162): n is a, c, g, or t
  misc_feature (408)..(408): n is a, c, g, or t
caagtttaaatgaacaaagaaaaccttcagaaacaagtgatcaacgtgagagaaatttcatgataattattcatagtaataaagtgtcgtgggcttaattgtatatctggagccagtgtcatccaccaacaatgtgatacaatatgaacttgacagtagttntgggttttgctcatcctttcagccacctgtgatcagtttgttgattaaggacttcttgtcaggccattttttaatatcaaagctgaagcaatatccattcagggatttcatcagttgcgtcacaaaacacggatgataatatacatcactccattttttccattttgagtccttttaaatgtaatgctaacctttacaattaaaaagtcagattcagaatggaaacaaggtcattttgcaaacatnggagctcttttattacaagtctgcttgttaacttttagaactgtaaaaccgctctgattaaactatttaactaacaaaaaaaaaaaaaaa

SEQ ID NO: 61247 - DNA, 465 bp, Homo Sapiens
aactttttaaaagtaagctgtctttaatttcagaaaatctgctattatacaacaaattattttttcattcataaaaaacagtccacagcattcataaaacagggtggcagaagaaataaaaagacacttttcaggtggattctttaagaacagataagttagcaatttaatacagatgaaaacaaatacaatccatataaaaacagaatctgaatgggagtgggagcgaagatgtatcaaccaaagtaaattcagagttttcacacatgcaactcaacacctgcattctcttcgcttaaaaagcaaactaagggccgggcgcggtggctcacgcctgtaatcccaacactttgggaggccaaggcaggcggatcacaaggtcaggcgattgagaccatcctgggctaaaacggtgaaaccccatctctacttaaaatagaaaacattagccgggaatggtggcac

SEQ ID NO: 61248 - DNA, 555 bp, Homo Sapiens
tttcctatctctttcacaagccataggggaacataatcctctttggcataaaataatgcacctttgcaaatgttctggatttctgaaatagctaatacacctaaatctatagcacgtaagcaatttaagtctcagcttgaatacgctcttagactattataaattaaaactgcaattgtaaaaggaaaattagagaaactaagtatttagagtattgtttatatactagcacacattattacagcttttgctcttttactgttctcgttctaattctgacattcttaatacctacattcctcgttgtcatgtattcccattttacttagcaacagatttattacgatacagacttctacatttacatacggtatatttaaatctaattatttaaaccttaaaatcatcagtatgcaactaaaatagtgagctaattttcttcctattatctttagtaacataccaattgacttcttttacataaatgaatactttcttgaactgtttgacttattttttttttttttaatgaaataaattctcctcttctaacta

SEQ ID NO: 61249 - DNA, 661 bp, Homo Sapiens
tgctttttattcatttgtaattatcaataaaatgaaagaaagacctagcatttttaaaactccactgtaaaacataggttaccataaaaatgtatttaatgggttaatatttcaatatttattttttaacagaaaacactcatcacatgcaaaacctgtcacttcacatcttcaagtttcataagttgataatacctaatcaaaaagtacatgtgaaaagaaagctttttcatagttgaactttaagtcattcaaaatcattcaataaaatggatgtagtactggccaggtgcggtggttcacgcctgtaatcccggcactttaggaggctaaggcaggaacgaggtcaggagttcaagaccagcctgaccaacatggtgaaaccccatctctactaaaaatacaaaaattagccgggcgtggtggtgtgcacctgtaatcccagctactcaggaggctgaagcaggagaatcgcttgaacccaggaggcggaggttgcagtgagccgagatcgcatcactgtactccagtctgagtgacacagtgagactctgtcccccccgccccccgcaaaaaaaagatgtatgtagtgctgacaaaaaagtttcatatttggcatatttcttttaccctcccaaatattatcaaaaggtctgattct

SEQ ID NO: 61250 - DNA, 483 bp, Homo Sapiens
ttttttttttaacttttaatccatctttattaaagtgtaactactacttcaatatatgcagaaaacaacatattggatattttcacctctgggataaaggttcaaaaggaagagaacgtcctgtttttaagattttataaaagaaatctatctctagtaccaaataccatattgagattataatattcttgcagtctaaatttaagctattgtttaaacttttgcattgtaaaaagaaaagttcatgtgtgtgtgtgagatgtcaaagtgtatcatagataatcctaaaacaatataacaatcatttaacccaaagtcaatgccctttaaatggaatgtatctttttcattatttggttatgaaatatacagaaggtactggggaagcaacaatggaagaggcagaagcattcttggccctcaaggagcttacactctacagggcaatactaacactgaatgagcaattacaagtccaataca

SEQ ID NO: 61251 - DNA, 481 bp, Homo Sapiens
acacagaaatacccttttatcttaaagtatatcagctatgattctcaaaggtatacgattctcaaatattggtccacttgcacagaaaagaaaaaggaaacaaaaaatatttcctcacatataaaatgtaggtaggaaagtatatggattacatttctttacttgcatcatggatacatagttcaattcagttcaaatcaaaaccattcaatacatatttactgagtcccttctgcgtgtcaggcactgttttaggcacttgtgatatatcagtgaaaaaaacaaaggcccctgcccacatggagcttacattatagccaggggaaacaacagtaaacaataaacacaaatatgtgaagtatctagggtgataggtaatatgaaaaacatagagcaggtgaaaggggtatgggatttctcgatctggaaggtagacagctgcagtattaaatagtatggacaggataggcttcagtaagaa

SEQ ID NO: 61252 - DNA, 416 bp, Homo Sapiens
tcattctaacacaagaaaacgcaaggcaaggatgctaaatcaaacaaaccatgagaaagtggtagaggaggtaacagggtaggggtacaatgcctcatatggccatttctacaaaatatatgactggcttaatcatattttttcattcttttctagtattagattttattcattttctttgctttttcatttatcttatacaagagcctatgaaacagcatacttcttaggccaaccctccattcatgtaaagaaataatacaagaatcaaagacattttatattgaaaaagaaaatatacttatattgtgttaggcgttgttatcatttatgaaaactaaacatgacaaacagagtcagtttctactcatcagcattacaatcagggatttagaaaacgttcaattcccagagta

SEQ ID NO: 61253 - DNA, 451 bp, Homo Sapiens
gcgatgagataaacatgtatttgttgacatggaaagaggttcacaatgtacagttaagtgcaaaagcagattataagaaaacagtgtgcatagtaggataccacggtggcaaaatctatattctatatattcatagaaaaaggcctagaagaaaatataacagtattcaccccagagagtgggatggccaatgagtcttctttctgcttctattttctaatctttctacaatgtttgtgtagtcagttttcctggtttgctttttttttttttttttttttgagcacaggtgggtcatgggagtcacgctctcatgctgcctgtcaagagcatggtacttgctacaggggctactccccagcagctctgcttaagaagattctgggaatgtcttgagtctccagaacaaggaacaagcacttcctgtgcccagggaaccagcagcttccca

SEQ ID NO: 61254 - DNA, 717 bp, Homo Sapiens
  misc_feature (570)..(570): n is a, c, g, or t
  misc_feature (590)..(590): n is a, c, g, or t
  misc_feature (618)..(618): n is a, c, g, or t
  misc_feature (626)..(626): n is a, c, g, or t
  misc_feature (654)..(654): n is a, c, g, or t
  misc_feature (685)..(685): n is a, c, g, or t
tttagagtccacaactttatttagttccattacatataacttttatagttacctagtatttatggcaagtgatacctccttttaaggacatgatataaagttttcatttttaagttatttttatgtcagacttttaaaaaatgagtacacaatatggataatacaaggacagagtaaaaatcatgaaggtggcatggaatcacccctgtttgggagaacatttccacatcaggaatgtgggaatcttatcctctgaggtctgtgatctgtgcccttctccagtgaggggtataggagaggtcagtgcatgtcaaatcagtctgagtctttaacatcctcaagtatcttcttcggcccactgctaaacatcacattttccccacagtgggcaggcaccacaagctttctcagctgaggcaggcagagtacagctgtccctaccagtaagggtgtaatttctaccctgacagtggagaacatgcatcttgcaaactgtcagaggcagtatccttttgcttctctcatcttgagcacatacatccaagggaggtccacattcgtagggcattntacaaacacattcttgattnctgagtttctcccagcgctgacatttangcacctgnctgtgtaaacggatttcttttgacacangcggcattcttcatctcagggactcacttanggggctgagcacagagaaatgctgaaggacct

SEQ ID NO: 61255 - DNA, 575 bp, Homo Sapiens
tttttttttttttaatgttcttacttggcaaaataaagaactggcaatcctatgctggccaccagcattctgaaggaaactttactacccagaaaaatcagaattctggtccagattgcctttctttgacttctcctgtattcaaatatacctattttggtatgtaaaaggcttaagacacttgaatttgaatgatggaatatatagattaaaaagcagttcttgtagcattattttaattcaaaaggcaagtgacaagtaatgacaggggcacacttaaagaaaatcagtttcactaataccataggataattatgtcactatcttcacagggctgtaacaaggaccaaattctaaaacgaggaaagggctccatcatgtctgacctttatgtgtgtgagccattagtattttcaacaaagcaaagtcaatctaaacctgaaagtaagctaaggaacagacagaaagatagttaaaaagaattcacttgcagcccttggccctgaccacttgctgagcagctgtgccacagcaggtaaatttctacctctctgagacttctcgtcctcatctgt

SEQ ID NO: 61256 - DNA, 1525 bp, Homo Sapiens
ggaattcccagcccagcaaacagcagcactcagctaaaaggaagactcacagaacacagctgaagaaggaaagtggcgatggacctcatcccaaatttggcggtggaaacctggcttctcctggctgtcagcctggtgctcctctatctatatgggacccgtacacatggactttttaagagactgggaattccagggcccacacctctgcctttgttgggaaatgttttgtcctatcgtcagggtctctggaaatttgacacagagtgctataaaaagtatggaaaaatgtggggtatctcttccctgtttggaccacattacccttcatcatatgaagccttgggtggctcctgtgtgagactcttgctgtgtgtcacaccctaatgaactagaacctaaggttgctgtgtgtcgtacaactagggaacgtatgaaggtcaactccctgtgctggccatcacagatcccgacgtgatcagaacagtgctagtgaaagaatgttattctgtcttcacaaatcgaaggtctttaggcccagtgggatttatgaaaagtgccatctctttagctgaggatgaagaatggaagagaatacggtcattgctgtctccaaccttcaccagcggaaaactcaaggagaaaagacatcacaaaattcattacaaaatgtcacttactgctccatgctggagaaagccatatccttctgggacttgagtctgcacatttaactacagcatctttggggcctacagcatggatgtgattactggcacatcatttggagtgaacatcgactctctcaacaatccacaagacccctttgtggagagcactaagaagttcctaaaatttggtttcttagatccattatttctctcaataatactctttccattccttaccccagtttttgaagcattaaatgtctctctgtttccaaaagataccataaattttttaagtaaatctgtaaacagaatgaagaaaagtcgcctcaacgacaaacaaaagcaccgactagatttccttcagctgatgattgactcccagaattcgaaagaaactgagtcccacaaagctctgtctgatctggagctcgcagcccagtcaataatcttcatttttgctggctatgaaaccaccagcagtgttctttccttcactttatatgaactggccactcaccctgatgtccagcagaaactgcaaaaggagattgatgcagttttgcccaataaggtgaggggatgacccctggagatgaagggaagaggtgaagccttagcaaaaatgcctcctcaccactccccaggagaatttttataaaaagcataatcactgattccttcactgacataatgtaggaagcctctgaggagaaaaacaaagggagaaacatagagaacggttgctactggcagaagcataagatctttgtacaatattgctggccctggttcacctgtttactgttatcacaataatgctaagtaaaaaaaaaaaaaaaaaaaaaaaaaaa

SEQ ID NO: 61257 - DNA, 503 bp, Homo Sapiens
  misc_feature (4)..(5): n is a, c, g, or t
  misc_feature (381)..(381): n is a, c, g, or t
  misc_feature (399)..(399): n is a, c, g, or t
  misc_feature (409)..(409): n is a, c, g, or t
  misc_feature (443)..(443): n is a, c, g, or t
  misc_feature (449)..(449): n is a, c, g, or t
  misc_feature (472)..(472): n is a, c, g, or t
  misc_feature (484)..(484): n is a, c, g, or t
  misc_feature (494)..(494): n is a, c, g, or t
  misc_feature (502)..(502): n is a, c, g, or t
gatnntttaaggaaccgagctttattggagcaaagagtgtggacactgtttacaacaaaacgtttccgggaaaacttggatttcccaagacccgaagactcctccaagttctcactgttagtaaggtcaatttgggggcagaacaggaacatgccttagctgctgtcaggaaatagaagagcagagcagagttgggcatggaggctccagctcagacttgggaagatggagaagagccatcccaagtccagagtgaataggtttcatagcacccatctcctctatttgaaggaagcaggcccctaaagggaaacacaggatgcccaacttcataagaatcagactgttatgagagtcctttgatatcatgtgaaaaccatnatggggagagagagactnagggtgcagnccaccttcccgggccatttttaatttaggggaantttttnttttaggtccaaaaattgttttncctttttttggnttcccaaggncatcccant

SEQ ID NO: 61258 - DNA, 298 bp, Homo Sapiens
ttttttttttttttttttttttttttttttttttttttttttggcaacataaacacttaagcatttagggataaaatattaaaagctagaggctccaaatccaatgagtacaagttgctgatatagcatcatataccaaggaaaggggtcaagcatgctaaaatatgtctgtagcttaaacattaggggccctactcttcccctaatatgcttgccttgttcctactggccacagttaaatgcacacatcagcactaaaatgcatccccttaaaatctagggaggaaattcaacacat

SEQ ID NO: 61259 - DNA, 532 bp, Homo Sapiens
cctgcgaaaagattggaggcctctcattcccagccagtttaatactccgaccctccttttccagagtctgtcatgccctcctgggcagccccttctccaagtgtcagctgtcctgacctggccagtcctcatctatcagtgaccagacatatggtgcaagcaggtctccagcaaaactttcctcaactccagcacagccagtgtcttgcactcgattttcaatttcaccttgtggagcttggccatggaacaaaagacaggaacaagtgatgctattactaaatggaaggagtgttggaagagttaattgatgaaattaactcctcttcctcctccaacagtgcaggagcaagtatctgcttagtgtgatcatacatacacgcttctcttcacaagcttatacctctgggactcagagagtgaaactcagaaagcaaggtccacacgtgccaccgccaccctttaaggcaggtctcacaacaacctctctcatgcatcctggacactcacaggaaagtacgggagggaaagg

SEQ ID NO: 61260 - DNA, 530 bp, Homo Sapiens
  misc_feature (1)..(1): n is a, c, g, or t
ngaagttctttaaagtattcctttgcccaggctcactcctgacccagaggtgaggcacagacactttttccctcactgttctctaggtgattctaacccacaaccaaggttcaataccactgccctacaggaaaagaaaaacaaagacctatccccagggggttcccctttgagccccttgaatgccaaagccccaatatccctgtgaacagctggaggccacagcccagctgagctgtgacagacactgctctttgcctgccagcatccgttcttctcatctgcctcactaacaagaatctggattttgtccagggacagcagtgcgcccaacgctttccagattaccacccacctagtggtcacgtgacctgcctctggccaataggctgcaagcggaggtcgaccacaattgctgggttttgctttcccgatgcaggtgcgttgcttgtccctgcctggactgaggctggaggtgaaggactatcacagtatcctgggatcctgagctgccttcagaataacacagc

SEQ ID NO: 61261 - DNA, 494 bp, Homo Sapiens
tttaacattacagataacctttataactcctttctagattagaacctgttgtaagccactttatagacaaagtagaaaatcagacagtcaattaagtttacagtatattatcctaaaataaccttattttgatcccactgtgttagaaacccattttaggaagctgtaacacttggagacactaatttccaaaatggtttattaggacttctcccacactcaaagtcaaacttccaggactgttctgaaatgatgaaagcttcttttcgataatcaatataaatgttgttaatccaaaatagaaactaagaccctgcactaagtgacctaaaaagtcttgtcctgatggaagtggccaaaactgctcgtcccgcaaccaagaaatcctaggggtataagctaaaacccacaaatatattggcaagtccccgattctttccaaattaccactaactttatcaaatccaatggcaagtacgggacaacagaatatt

SEQ ID NO: 61262 - DNA, 199 bp, Homo Sapiens
  misc_feature (5)..(5): n is a, c, g, or t
  misc_feature (23)..(23): n is a, c, g, or t
  misc_feature (35)..(35): n is a, c, g, or t
  misc_feature (64)..(64): n is a, c, g, or t
  misc_feature (68)..(68): n is a, c, g, or t
ttttntttttttttttttttttntttttttaaatnctggacaactttttaatgctgttttaccncagngagaaagcaatgaacaaaagcatattaacatattatcatttaattaaaatgtattcaaaccaactttcaacttgtactaccagtatgtcttaattttataaatcaatcattgaaaacaatgaatgtaatag

SEQ ID NO: 61263 - DNA, 448 bp, Homo Sapiens
ttttactgtacaaatgctttatttctattcaatatttagaagacagttataaacaagatgcattcaatagcatggtggcagatgaacatcaggaaggaacatccatgagcttccatccacggaacctcaccatggatacgcttgtgatcaagggcctggtctcccctcaagacacggtcacagatcagaggccacaccatcctagcagtggagcaggaccagctgggacagggtccttctgtgacacctgctgcatcaccaggctgggtgaacggacacaattgccagaactcacagaatagaagtatcagcaccgaaacctcacaggaaaaatggtaagttctaagtttctccattaatagtaactctcagattaatctctgtcatccatcgcttctccaagaaatgactttttagggtgatgtgccaggcgccatgttggagggct

SEQ ID NO: 61264 - DNA, 589 bp, Homo Sapiens
  misc_feature (546)..(546): n is a, c, g, or t
ttttgtccataaatcaagttttattggaatatagcacactcattttatttacatactatctgtggctacttttggagttaagtagccttgacagacaccatatggcccacaaagccgaaagtatttaccctctggccctctgtggaaattgacatctgttctataaagtaaaaatactggtatttcaataattgcacttatttaaaagatgattgtcagtgtagggctggaatcctaacaattttctcactttagaaaccaaaacccacagtgttaagcataaaattacgtacaattttgataatgtttacagtaatagcagcaacatgatgctttaagaaccttgacttccacctatagaattgaagtaatcacaaattaaggaacccttggggaccaacatcaaacattccttacctcgtttatttcattagttcttctcccttcaaagccagcaaacacagcactcccttccttgctaggagtcagagggataggtggagatgatctgctattgccaggtgtctcttccaaagaaaagatganttattcacacagcaactgaattaaggactgcctcgggcctgta

SEQ ID NO: 61265 - DNA, 569 bp, Homo Sapiens
  misc_feature (476)..(476): n is a, c, g, or t
tttttttttttttttttaaattagttattgtcattcttaaaaaatcaggaaattttagatgtaagtgtggaatcgccagcaacaatgggcccacatttcaggtacatcagaactgacggcctctgttagagagggcatgcctgctcctgttccctcagaatcaatccttacccatcacattgtcttacattagggcccacttgactcatttaaataggtagctgcctggttcttgagtctgaaatccctgtcttaaaggatgatgaaaacaatggtttacgtctattctactttcttattaggcctcaccgatgtgcagtataaaacacctctctaatcttttcccatgtaatgtatcaccatttcaaagtgagatctctgcaggcttccatcagcttatgctatcacaccctatttaaaattaatacagcaatagctcaagagccaggctgaagaataagactggtggctttcanggatgtgaggaaagaaccctccactattatgaattactattgcattatgtttcctcttcaaagaccaaatatcagaaatgaaaggctgatatt

SEQ ID NO: 61266 - DNA, 540 bp, Homo Sapiens
acattccatttatttttatttgtacaaatttacattaattttactacatacatatatattttaagcgttcataacaaacttagaaaatagtggatgaaatccagtacaccaatcatctagtcttagcaaatactattattttaccataattattccagatccttctttaaaaaaaaaatgttactaacataactaaagtaaccaaacataaccaccaaaccactgtctcaccccaatgctatccacttcctgccttattatactaacaatatcctgaagcgtatagaacttttagttaatatttttatattttaccacacatgtctatgccattaccaatatagataatgttctttggagtttttaacttacataagtgagaggatactgaccatgttcttcaacagcttgcttttatctcccaactctgttttcaagattcattcgttagtacatttataaatttcacttatttatgcagtattttatatgaacatattacaatttatctattccttcattgacagacatttagaggat

SEQ ID NO: 61267 - DNA, 561 bp, Homo Sapiens
tttttttttttttttttaaatgttctaaaaatatttattgatatgttgataatgattccagtaatagtgattgatatcatcaatgttagcatcaacattgttcagtaacaataggatctggtcaaatgtgatatctgtgttatgaaaagctatacatgcatacttcagagatagtgtgaggcagttccagaccaaagtaataaagcaaatattacaataaagtaagtcactttttttagtttcccatggcatataaaaattatacttaggctacattttagtcaagtgtgcaatagcattatgtctaaaaaaacaatgtacataccttcattaaaaatatgttattgctaaaaaatgctgtcacagaggcaggaagtgagcatatgctcttgcaaaaatgatgccaatagactcactcgatgaaaagttgccacaaatcttcaatttgtaaaaaaacattcttcgagaagtgcaataaaatgaagcgcaatgaaacaagtgtgtatggtgtgtgtgtggggtggtgtgtgttcagaaagataggagtgtgcaatggcaagg

SEQ ID NO: 61268 - DNA, 265 bp, Homo Sapiens
tttttttttttttttttaacttttaatttctgatcgagtcacagaaggatttgttgagtagcttcagcacttcttcctttgtcatttttttctgtctgataagtcatgccatggacttacccatttttatcccagaggcctcttacgttgacttgaaaagacggactatgtctttcagagatcttgtgggtatcacatcaatcttgacaaattttctaccctccaagtcatgatcctaagaacagcttgcctccccctcgtgccg

SEQ ID NO: 61269 - DNA, 552 bp, Homo Sapiens
atgagagagtacaaagtggtggtgctgggctcgggcggcgtgggcaagtccgcgctcaccgtgcagttcgtgacgggctccttcatcgagaagtacgacccgaccatcgaagacttttaccgcaaggagattgaggtggactcgtcgccgtcggtgctggagatcctggatacggcgggcaccgagcagttcgcgtccatgcgggacctgtacatcaagaacggccagggcttcatcctggtctacagcctcgtcaaccagcagagcttccaggacatcaagcccatgcgggaccagatcatccgcgtgaagcggtacgagcgcgtgcccatgatcctggtgggcaacaaggtggacctggagggtgagcgcgaggtctcgtacggggagggcaaggccctggctgaggagtggagctgccccttcatggagacgtcggccaaaaacaaagcctcggtagacgagctatttgccgagatcgtgcggcagatgaactacgcggcgcagtccaacggcgatgagggctgctgctcggcctgcgtgatcctctga

SEQ ID NO: 61270 - DNA, 6537 bp, Homo Sapiens
gataatctccatttttgtcatgggactgttaaaaacgtttggaagttccaattctggtcttgatttcccagttaaagatgttctttcacccgaatgcagtctttcctgttggtaaaataagacaaccatcaacattgcctgtttgtctgcttttgaatctcttaaggatggatgtttgtaagatgttgcttaatacagtctggaatactctgtccatttgttgaattgtaaatgactttcaaatgtgcaagttctgttaaatacaaagagaacctctatgggtaacttttgtgttgaagaagtcatttgtcaaccatggtaaaacttgcaaacccactttatacagagtggattcttgaagctatacagaaaataaaaaagcaaaagcaaaggccctctgaagagagaatctgccatgcggtcagtacttcccatgggttggataagaagacagtctctgaacagctggaactcagtgttcaggatggctcagttctcaaagtcaccaacaaaggccttgcctcctataaggacccagacaaccctgggcgcttttcatcagttaaaccaggcacttttcctaagtcagccaaggggtctagaggatcatgtaatgatctccgcaatgtggattggaataaacttttaaggagagcaattgaaggacttgaggagccgaatggctcctccctgaagaacatagagaagtatctcagaagtcaaagtgatctcacaagcaccaccaacaacccagcctttcagcagcggctgcgactgggggccaaacgcgctgtgaataatgggaggttactgaaagacggaccgcagtacagggtcaattatgggagcttagatggcaaaggggcacctcagtatcccagtgcattcccatcctcgctcccacctgtcagccttctaccccatgagaaagaccagccccgtgctgatcccattccaatatgtagcttctgtttggggactaaagaatcaaatcgtgaaaagaaaccagaagaactcctctcttgtgcagattgtggcagtagtggacacccatcctgtttgaaattttgtcctgaattaacaacaaatgtaaaggccttaaggtggcagtgcatcgaatgcaagacatgcagtgcctgtagagtccaaggcagaaatgctgataatatgcttttttgtgattcctgtgatagaggatttcatatggaatgctgtgacccaccactttccagaatgccaaaagggatgtggatttgccaagtctgcagaccaaagaaaaagggaagaaaactacttcatgagaaagctgcacaaataaaacgacgatatgcaaaacccattggacgaccgaaaaataaattaaagcaacgattgttgtctgtaaccagtgatgaaggatccatgaatgcattcacaggaagggggtcacctggtaggggtcaaaagactaaagtctgtaccacaccttcatctggtcatgctgcatctgggaaggactcaagcagcagattggctgttacagaccccactcggcctggtgccaccaccaaaatcaccaccacctccacctacatttctgcctctacacttaaagttaacaagaaaaccaaagggctcattgatggccttactaagttttttacaccatcacctgatggtcgcagatcacgaggtgaaattatagacttttcaaagcactatcgtccaaggaaaaaggtctctcagaaacagtcatgcacttctcatgtgttggctacaggtaccacacaaaagctaaaacctccaccttcttcacttccacccccaacccccatctccggtcagagccccagttcacaaaagtccagcacggccacttcttctccctctccccagagttcttccagccagtgcagtgtgccctccctgagcagccttaccactaacagccagctgaaggcactctttgatgggctttctcatactataccactcagggacagtctcgcaaaaagggacaccccgagttatgcaccacccaaacgtatgcgtcgtaaaactgaattatcttccacggcaaaatctaaagcccacttctttggcaaaagagatattagaagtcggtttatttctcactcctcctcctctagctgggggatggctagaggaagtatttttaaagcaattgctcacttcaagcgaacaactttccttaaaaagcacaggatgctaggcagattaaaatataaagtgacccctcagatggggaccccctcaccagggaaggggagcttgacagacggaaggattaaacctgatcaggatgatgatactgaaataaaaataaacatcaaacaagaaagtgcagatgtaaatgtgattggaaacaaggatgtcgttactgaagaggatttggatgtttttaagcaggcccaggaactttcttgggagaaaatagagtgtgagagtggggtggaagactgtggccggtacccttctgtgattgaatttggtaaatatgaaatccaaacctggtactcctcgccttacccacaggaatatgcaagattaccaaagctttacctgtgtgaattctgtcttaaatatatgaaaagtaaaaatattttgctaagacactccaagaagtgtggatggtttcatcctccagcaaatgaaatttaccgaaggaaagacctttcagtatttgaggttgatgggaatatgagcaaaatttattgccaaaacctttgcttgttagccaagctcttcctggaccacaaaacgttgtattatgatgtcgagccattccttttttatgtccttacaaaaaatgatgaaaagggctgtcatctggttggatacctctctaaggaaaagctttgccagcagaagtataatgtctcctgcataatgatcatgccccagcaccaaaggcaaggatttggacggtttctcattgatttcagctatttgctttctagaagagaaggccaagcagggtctcctgaaaagcctctctccgatctgggccgtctctcctacctggcatattggaagagcgtcatcttggagtatctctaccaccaccatgagaggcacatcagcatcaaggcaattagcagagcgacgggcatgtgcccacatgacattgccaccactctgcagcacctccacatgatcgacaagagagatggcagatttgtcatcattagacgggaaaagttgatattgagccacatggaaaagctgaaaacctgttccagagccaatgaacttgatccagacagtctgaggtggaccccaattttaatttctaatgctgcagtgtctgaagaagagcgagaagctgagaaagaggctgagcggctaatggaacaagctagctgctgggagaaggaggaacaagaaatcctgtcaactagagctaacagtaggcaatcacctgcaaaagtacaatcgaaaaataaatatttgcattccccggagagccggccagtcacaggggagcgagggcagctgctggagctgtctaaagagagcagtgaagaagaagaggaggaggaggacgaggaggaggaagaagaggaggaagaagaggaagaggatgaagaggaggaagaagaggaagaagaagaagaagaagaagaaaatattcaaagctctcccccaagattgacgaaaccacagtcagttgccataaagagaaagaggccttttgtactaaagaagaaaaggggtcgtaaacgcaggaggatcaacagcagtgtaacaacagagaccatttcagagacgacagaagtactgaatgagccctttgacaactcagatgaagagaggccaatgccacagctggagcctacctgtgagattgaagtggaggaagatggcaggaagccagtcctgagaaaagcattccagcatcagcctgggaagaaaagacaaacagaggaagaggaaggaaaagacaatcattgcttcaagaatgctgacccttgtagaaacaatatgaatgatgattcaagtaacttgaaagaaggcagtaaagacaatcccgaacctctaaagtgcaaacaagtgtggccaaaaggaacaaagcgcggtctatctaagtggaggcaaaacaaagagaggaagaccggatttaaactgaatttgtacaccccgccagaaacacccatggagcctgacgagcaggtaacagtggaagaacagaaggagacttcagaaggaaaaaccagccccagtcccatcaggattgaggaggaggtcaaggaaactggggaagccctgttgcctcaagaggaaaacagaagggaagaaacatgtgcccctgtaagtccaaacacatcaccaggtgaaaaaccagaagatgatctcatcaaacctgaggaagaggaagaggaggaggaggaggaagaggaagaagaggaagaagaggaaggggaagaagaagaaggaggaggaaatgtagaaaaagatccagatggtgctaaaagccaagaaaaagaggaaccagaaatctccacggaaaaagaagactctgcacgtttggatgatcacgaagaggaggaggaagaggatgaagagccatcccacaacgaggaccatgatgccgatgacgaggatgacagccacatggagtctgccgaagtggagaaggaagagctgcccagagaaagcttcaaagaagtactggaaaaccaggagacttttttagaccttaatgtgcagcctggtcactcgaacccagaggtcttaatggactgtggcgtcgacctgacagcttcttgtaacagtgagcccaaggagcttgctggggaccctgaagctgtacccgaatctgacgaggagccacccccaggagaacaggcacagaagcaggaccaaaagaacagcaaggaagtcgatacagagttcaaagagggaaacccagcaaccatggaaatcgactctgagactgtccaggccgttcagtctttgacccaggagagcagcgaacaggacgacacctttcaggattgtgccgagactcaagaggcctgtagaagcctacagaactacacccgtgcagaccaaagtccacagattgccaccacgctcgacgattgccaacagtcggaccacagtagcccagtttcatccgtccactcccatcctggccagtccgtacgttctgtcaacagcccaagtgtccctgctctggaaaacagctacgcccaaatcagcccagatcaaagtgccatctcagtgccatctctgcagaacatggaaaccagtcccatgatggatgtcccatcagtttcagatcattcacagcaagtcgtagacagtggatttagtgacctgggcagtatcgagagcacaactgagaactacgaaaacccaagcagctacgattctactatgggaggcagcatctgtggaaacggctcttcacagaacagctgctcctatagcaacctcacctccagcagtctgacacagagcagctgtgctgtcacccagcagatgtccaacatcagcgggagctgcagcatgctgcagcaaaccagcatcagctcccctccgacctgcagcgtcaagtctcctcaaggctgtgtggtggagaggcctccgagcagcagccagcagctggctcagtgcagcatggctgctaacttcaccccacccatgcagctggctgaaatccccgagacgagcaacgccaacattggcttatacgagcgaatgggtcagagtgattttggggctgggcattacccgcagccgtcagccaccttcagccttgccaaactgcagcagttaactaatacacttattgatcattcattgccttacagccattccgctgctgtgacttcctatgcaaacagtgcctctttgtccacaccattaagtaacacagggcttgttcaactttctcagtctccacactccgtccctgggggaccccaagcacaagctaccatgaccccaccccccaacctgactcctcctccaatgaatctgccgccgcctcttttgcaacggaacatggctgcatcaaatattggcatctctcacagccaaagactgcaaacccagattgccagcaagggccacatctccatgagaaccaagtcagcgtctctgtcaccagccgctgccacccatcagtcacaaatctatgggcgctcccagactgtagccatgcagggtcctgcacggactttaacgatgcaaagaggcatgaacatgagtgtgaacctgatgccagcgccagcctacaatgtcaactctgtgaacatgaacatgaacactctcaacgccatgaatgggtacagcatgtcccagccaatgatgaacagtggctaccacagcaatcatggctatatgaatcaaacgccccaataccctatgcagatgcagatgggcatgatgggcacccagccatatgcccagcagccaatgcagaccccaccccacggtaacatgatgtacacggcccccggacatcacggctacatgaacacaggcatgtccaaacagtctctcaatggctcctacatgagaaggtag

SEQ ID NO: 61271 - DNA, 589 bp, Homo Sapiens
aatgtcgttgggtttggtggactgactgcagttgtctattttgatttaaaagatccttttacttcttagaagagggttcatcatgatacccacacaaacttcggacaaacagcagccccagtgatctctcatctttgttcagcagctacacaggcttctgtctggacttcagaatcaagaatcctatgggctgaaaggaattttacgcaggtgggaaatcttaaacaaaagctcaatccagtctctaaataaacttatctcttagagttcaacattttcactagcctgaaaagggcattatttcctatttggaccccaattctgaatgtatcggcttcatcagaaacgccttgcgtccctccaggcctggaggcacaaattccagcttatggcgcctgctatggcagagcccactgctggggccccagctccacccagtccaggtttgtcccaccagctccactgaaagcaggaaaaggtgttatgttcttggctgttttctgattagaatcagattcgggtaagatgtaatttactttcatgttcactctggcatatacccatttgtgcagaccataaatatgtgtgt

SEQ ID NO: 61272 - DNA, 3041 bp, Homo Sapiens
gccagtcagggagcggccgtggcccagacagtgaggaagcgcgaaggcggagcaaccgaggaatcctccggagaagaatcagagccgtcgctaccgccactaccgccaccaccatggaaggagcaaagccgacattgcagctcgtgtaccaggcagtgcaggcgctttaccacgacccagatcccagcggaaaggagcgcgcctctttttggcttggggagctgcagcgttcggttcatgcatgggagatctcagaccagttgttacagatccggcaggatgtggagtcatgctattttgctgcacagaccatgaaaatgaagattcagacctcattttatgagctccccacagactctcatgcctctttatgggactcattgctaacccatatccagaacttgaaagacttgtcacctgttattgtaacgcagctggctttagcaatagcagatcttgccctacagatgccttcctggaagggatgtgtgcaaacactggtggaaaaatacagcaatgatgtgacttctttgccttttttgctggagatccttacagtgttacctgaagaagtacatagtcgttccttacgaattggagctaatcggcgcacagaaattatagaagatttggccttctactctagtacagtagtatctctattgatgacctgtgtagaaaaagcaggaacagatgagaaaatgcttatgaaggtttttcgctgtttgggaagttggtttaacttgggagttttggacagtaacttcatggctaacaataaattactagcactcctttttgaggttttgcaacaggataagacctcgtctaacctacatgaagctgcttcggactgtgtatgctcagctctctatgccattgagaatgtggagactaacttgccattagccatgcaactttttcagggagtgctgacattggagactgcctatcatatggccgtggcacgtgaagatttagacaaagttctgaattactgccgtattttcactgaactatgtgaaacttttcttgaaaaaattgtttgtactccaggccaaggtcttggggaccttcgaactctggagctgctgcttatctgtgcaggccatcctcaatatgaggtagtagaaatttcatttaacttttggtaccgactgggggaacatttgtacaaaactaacgatgaagttattcatggcatcttcaaagcttacattcagaggctgcttcacgccttggctcgacactgccagctggaaccagaccatgagggggttcctgaggagactgatgactttggggagtttcgcatgagggtatcagacctggtaaaggacttgattttcttgatagggtctatggagtgttttgctcagttatattctactctgaaagaaggcaacccaccctgggaggtgacagaagcggttctctttatcatggctgctatagcaaagagtgttgatccaaagaagccctttagcaatgctgcgtgtcatcacagcctgttatttggccagaatataacctctgaaatcagtaactgtgagtacttaccgcctgtactcagggaaaacaatccaacacttgtggaagtcctagaaggagttgtccgcctcccggagaccgtacatacggctgtgcgatacaccagcattgaattggttggagagatgagtgaagtcgttgatcgaaatcctcagttccttgaccctgtgttgggctatttgatgaaaggcctgtgtgaaaagcccctggcttctgctgcagccaaagccattcataacatttgctctgtctgccgagatcacatggctcagcactttaatggactcctggagattgcccgctccctcgattccttcctgttgtctccagaagctgctgtgggcttgctaaaagggacagcacttgtcctagcccgattacctttggataagattaccgaatgtcttagtgaactatgttctgttcaggttatggcattgaaaaagctgttgtctcaagagcccagcaatggcatatcctcagatcccacagtgttcttagatcgccttgcagtgatatttaggcataccaatcccattgtggaaaatggacagactcatccgtgtcagaaagtcatacaggaaatatggccagttttatccgagactctaaataagcaccgagctgataatcggattgtagagcgttgttgcaggtgcctgcgctttgctgttcgctgtgtaggcaaaggatctgcagcactgctgcagccactagtcacacagatggtgaatgtgtaccacgtacatcagcattcctgcttcctgtaccttggcagtatccttgtggatgaatatggcatggaagaaggctgtcggcagggactgctagacatgctccaggcactgtgcatccccacctttcagctcctagaacagcagaatggtctccagaatcaccctgacactgtagatgacctgttccggctagccaccaggtttattcagcgtagccctgtcaccttgctgcggagccaagtggtcatccctatcttacagtgggccattgcctctactaccctggaccaccgggatgccaattgtagtgtcatgaggtttctacgagacctcattcatacaggggtagccaatgatcatgaagaagactttgaattacggaaagaactgattggacaggtgatgaaccagcttggacagcagcttgtcagccagctgctgcacacctgctgcttttgcctccccccctataccctaccagatgtggctgaagtgctctgggagatcatgcaggttgacagaccgactttttgtcgatggttagaaaattccttaaaaggtttgccaaaggaaacaaccgtgggagccgtcacagtgacacacaaacaacttacagacttccacaagcaagtcactagtgctgaggaatgtaaacaagtttgctgggccttgcgagacttcacccaggttgtttcgatagctcacactccctgcacttgtgccctgtcacccaggaatgtcttttttaattag

SEQ ID NO: 61273 - DNA, 591 bp, Homo Sapiens
  misc_feature (568)..(568): n is a, c, g, or t
tggttttcagttcattgtatgaaacattttttaatggttccagtaacagaacagaccacctttcaaaatggtgaatgtaatagcaatcatatcagaatgtaacagaaaggattccactgtggtggtcttccttttaaagtacagattttaaaaatgaatctctttgacaactcatgagtcaaagttatacacacacaagcatctagaggaaaaaatgaggtgataaagtagccttgctcagcaccctcgttatatctgctataagcgatcaagaggggcctcatctagaagaaaatgccctgaagctggcctgggcgctgacgggccccatcttcccttattccatttgtgagcctcctcctcagcttccagtcttcagtccagcttcagcttggcctgtccttttgtccactcctgccttctatcttggctctcctttctggctcacacctgcctccctccgtgtggcagctccaagtcagatattgggaagccatgactccttcccatcctgccctttggctggacaccttcctgggcttccaaacttcctcgagccaggcctggnttcatggctacccagacaggaag

SEQ ID NO: 61274 - DNA, 258 bp, Homo Sapiens
atgatatatgtatctacgggggcctggggctgggcgggctcctgcttctggcagtggtccttctgtccgcctgcctgtgttggctgcatcgaagaggaggcccagggctcctcagagcaggaactccactatgcatctctgcagaggctgccagtgcccagcagtgagggacctgacctcaggggcagagacaagagaggcaccaaggaggatccaagagctgactatgcctgcattgctgagaacaaacccacctga

SEQ ID NO: 61275 - DNA, 467 bp, Homo Sapiens
  misc_feature (432)..(432): n is a, c, g, or t
tccaaacattagttctgattacgttatttaacaaatacatttttaaaattggacctgatatatcaagacaattataaattatagaaataccacactaactgataacagactaaactcatctgttaagaattaaccagcagtcaaacaataatatagtttaatcacttattatttgccaggtcttagctttcatatattactaaatctttgattctcacaacaattctatcaggtaagtaacaatattatgcccattttgatgatgagggaatagatgcacagagtggttaaataacttgcccaaggtcacataactaggaaatggcagagcttgggttccacccttgcaatctagttccaaaccccagagctcataaacatatttaaggccttctggaaatgggccaggctagaggtatcactctcgcaganggcaactatcatctctcagttaaaagctgcatcct

SEQ ID NO: 61276 - DNA, 474 bp, Homo Sapiens
  misc_feature (388)..(388): n is a, c, g, or t
  misc_feature (452)..(452): n is a, c, g, or t
agctctttacaaatggagaaacccttaacaaaaggcgggctgcagtgtgcccagccctgctttctactcagcagagtggagcaagtgagcagggtggaggcctcctgactcatgcgcggacctgcggctgctgcaggacaaaggcccagcgcctccaaggagcttctgtgagcacctcggctactgcagaaacgtgaaaggaggtgacgtgtcggaaacccccaacttcattttcttttccagtcgcttctacacctggggccacaggacacagtaaagggtgagacagcacctgcgtcagcacaactgaccgttccttgtcgccaggaagtagctgtcaggactaaatgccagcattcctatgccgattttcgggtttgctctgtcngtaacaggtttcagtgtctgtaaggagactgggacagaggcgatctcatctagaacaccaacangaagaacacgccattgtcaccc

SEQ ID NO: 61277 - DNA, 463 bp, Homo Sapiens
  misc_feature (9)..(9): n is a, c, g, or t
  misc_feature (223)..(223): n is a, c, g, or t
  misc_feature (346)..(346): n is a, c, g, or t
  misc_feature (439)..(439): n is a, c, g, or t
  misc_feature (448)..(448): n is a, c, g, or t
ttatagatnttaaatttatgaaaattataaaatacaacacttacaaggttatagggagaagtatacagtgacagtgtaaattagtacatttgttggaacattgtctgataatctgtaataataatcataaaatcgtcatattcttttatctaaaaattccaattctgacagtttcttaaaaacaaaacaaaacagaggcaggagaattgcctgaggccagggngtttgagaccagcctggggccaaccatagcaagaccctctactctaccaaaaaatttttaaaattagctggggcatagtgggccccacaccctgtaggtccctagcattccttagggccagcntgagggcagggtcactttgagccccagagtttccaagggttccaggtgagcctatggatccagggcccacatgcacctcccagcatgggggtnaggagagtnaggccccctgtcctc

SEQ ID NO: 61278 - DNA, 151 bp, Homo Sapiens
tttttttttttttttttttttttttttttcctttttaaactcctcaaactaccttcccacaaagccatttaagttaaatggtacatttacagactcacctacatgaaggatataacttaaaacatctgcttaaacacatacgttctgttca

SEQ ID NO: 61279 - DNA, 584 bp, Homo Sapiens
tttggagacgccaccatttttattttaggttgcatattctagataaaagactagaaagaagatgtgggatatagtgttaggaatcagttggaagaaacaatgagattattagcaaagatgttagtgtggatccagcaagtaccattaattgaaaaattataaatatttgtcattatgctaagactcctcatatttaggtagagaaaaggataatgatctttcttaaaagttgtttatataacaaaaatacaattttcaggatatataattctggtgggaagtattgtttttttccaattcaattaaatctgaaaattattttctttttaataaaaatagaaaagaagaaactcagaaattaaaacctgtaccttatatttaaattatctaaatttctcacattcaaaactgttattaagcagtttttgtgggggttagttagatactgccacggcattttgtgccctggacaaagtagccgcattagtagttggtgactggaagagcataggaggagatataaactgtatgtcctgagaattgctcattggggaggagaaagaaaaccccagccttatcttatg

SEQ ID NO: 61280 - DNA, 536 bp, Homo Sapiens
actagatttttacttgagacacagattcacagtcttcaacttcaaagctaacccaacaactctatgcttagatagtcagtttcctaacaggagatacgcttctttagtgaagggcctaccccttattcacctttaaatcccacctcccccaatcccccccaatgcttatacagaaaaaatcattcacttaatacaaatctgtggaaggggaagggaggtcagatgaaccttaagggcagggactgaactgataataaaagctttcgtggcactgaaaaatatctgagaagcagcagcacaataactaatgatttttttaaaaatgttacaacacgtcaaaggtgatttcaataaattttatacatctgcaaattaacttatctagttatttggaactaataagaaaatgtcagtcttctattttgctctcatatataatagcaattaaaaggccaattacctgtaataaaataaataataaagaaaaaaatctatagactagttgaagtccaaactaatagtgatatagtatccta

SEQ ID NO: 61281 - DNA, 1433 bp, Homo Sapiens
ggccgcgcggggcatcacggccctggtcgtgccaggcctgcggtggcaacctcggctttccctgctcaggagcctcgtgtctttctccgcagcgctttgccagccggccggctttccccttccaccacacacctccacctggtcacagcagataacccagcagccaactggcttcatgcgcgctccactcggaaaaagcggtgcccctatacaaaacaccagaccctggaactggagaaagagtttctgttcaacatgtacctcaccagggaccgcaggtacgaggtggctcgactgctcaacctcaccgagaggcaggtcaagatctggttccagaaccgcaggatgaaaatgaagaaaatcaacaaagaccgagcaaaagacgagtgatgccatttgggcttatttagaaaaaagggtaagctagagagaaaaagaaagaactgtccgtcccccttccgccttctcccttttctcacccccaccctagcctccaccatccccgcacaaagcggctctaaacctcaggccacatcttttccaaggcaaaccctgttcaggctggctcgtaggcctgccgctttgatggaggaggtattgtaagctttcattttctataagaaaaaggaaaagttgagggggggcattagtgctgatagctgtgtgtgttagcttgtatatatatttttaaaaatctacctgttcctgacttaaaacaaaaggaaagaaactacctttttataatgcacaactgttgatggtaggctgtatagtttttagtctgtgtagttaatttaatttgcagtttgtgcggcagattgctctgccaagatacttgaacactgtgttttattgtggtaattatgttttgtgattcaaacttctgtgtactgggtgatgcacccattgtgattgtggaagatagaattcaatttgaactcaggttgtttatgaggggaaaaaaacagttgcatagagtatagctctgtagtggaatatgtcttctgtataactaggctgttaacctatgattgtaaagtagctgtaagaatttcccagtgaaataaaaaaaaattttaagtgttctcggggatgcatagattcatcattttctccaccttaaaaatgcgggcatttaagtctgtccattatctatatagtcctgtcttgtctattgtatatataatctatatgattaaagaaaatatgcataatcagacaagcgtaatgcataatcagacaagcttgaatattgtttttgcaccagacgaacagtgaggaaattcggagctatacatatgtgcagaaggttactacctagggtttatgcttaattttaatcggaggaaatgaatgctgattgtaacggagttaattttattgataataaattatacactatgaaaccgccaaaaaaaaaaaaaaaaaaaaaa

SEQ ID NO: 61282 - DNA, 500 bp, Homo Sapiens
tttttttttaaaaaagaaagctaccctaaggcacatatgggccatttcttatggaagagaaaggatgactcagagggcagaatcacagccaggcagacaaaactggatcttaatcaaagtgtatcttttgaccctggggcagtgatgaccggtagataccagaatttctacagatggtgactaccatgtgcctcctactctaccccactcctttttgagtaagactatctattgcattattcctcaagcaccattttacaatgtgagggagatgagaggatgaggtggctgatagataacttgagtttttagttcacaggtcttaaactgtagaggaaatgtacttgataatctgttcccaacaaactgcacccgaggagcctcatctgcagctaggcctgattcagaagatgtcctggatttttgagccaatgtagtaattagatgagccttggaattatttgttaagaatagaacactttggaagagtagaatggact

SEQ ID NO: 61283 - DNA, 546 bp, Homo Sapiens
  misc_feature (407)..(407): n is a, c, g, or t
  misc_feature (415)..(415): n is a, c, g, or t
  misc_feature (419)..(419): n is a, c, g, or t
tttttttttctcatacctctcaggaatgaatgaagtttttgattataataactgtagtagcagaaatagtgacaacaaaagtagttgctgggctaacatttatcaaatgtatcttatctcgtttaattcttattgcccttcctgtctgtgttcatgaagtatttttatatttggaaacctaaaacaagtttaagatggcattattggaaacttcattactaaaatcatcctttgccttaaatttctagaaatagatggaccatagttaacatcacacgtttggagtaagatatgctgtaagtcactgtaatgattaaaccttcaagttttttttttaacagtgaactggtaagtttaaatgtgttactccaggagtttctttcttttctttttttctttaccacatntccaatcncccnccttgcctcctcccatccttcctttctttggaggggctccactatttccaagggtctcactgtgtttgccccaggttgggcctgaactcctgggcctcaactgattctcccgccttggcctcccaaa

SEQ ID NO: 61284 - DNA, 2976 bp, Homo Sapiens
gacgattaacagaacaatagccaagaccacagacatctcaactggttcaaaattgaagttgagcaagctttccactcgatgggtgccaaaaccgttgtgcccagatcagctgcagacaagagcagagctttcaatggaaattttaaacaagtggcatcaagaccctgaagcatttccttgaattataacaggagatggaacaggactttaccagtaccatcctgaagacaaaccacaatcaaagcaatggctaccaagaggtagaagtggcctagtcaaggcaaatgtggacaagtcaaagtaaggtcatggcaacagtttcttgggatgctcaatgcattttgcttgttgactttctggagggccaaagaacatttttttttttttttgagatggagtctcgctctgtcgcccaggctggagtgcagtggcacaatctcagctagctgcaagctctgcctcccaggttcacgccattctcctgcctcagccttccgagtagctggagtagctgggactagaggtgcctgccaccacgcccagctaattttttgtatttttagtggagacgggacggggtttcaccatgttagccaggatggtctcgatttcctgacctcgtgatctgcccacctcagcctcccaaagtgctgggattacaggcgtgagccaccgcatctggccacaataacatcttattatgagagtgttttgagaaagttagccgaagctttagcaaaaacacacccaggaaagcctcaccagtgtctttctccacgatgacaatgctcctggctcattcttctcatcaaataagggcaattcttcaagagttttgttgggaaatcattaggcatccaccttacagtcccgattttgctccttctgactttgtttcctcattttaaaaaatctttaaaagcactcattttttcttccgttaataatgttaaaaaggctgcactgacatggttaaattcccagagcccgcaattctttagaggtggactaaatggctggtgtcacagcttacaaaagtatcttgaccttgatggagcttacattgagaaataaaaatgttgttttgttgttgtcattgttggtggttttaagagagaggatcttgctctgttgtccaggctagagtgcagtggtgtgatcacagctcactgcaacctcaaactcctgggctcaagtaatcctcctccctctgcctcccaagtagctgggactacaggcatgcactaccaaacctggctaatttcttgaactcctggcctcaagcagtcctcccacctcagcctcccaaagtactgggattacaaacataagccactgtgcccagccaagaaatgaagtttttatttttttatcatcttttacttcagtatttccacaaattttttaaagtcccttcgtataatgactggtaatttcattcactgaagagacagttctgaggctcatacaaagagctttttattatctgagacagacctgagaaattaaggaacctgcctaaaacatcatttccaggcagggaaacaaacagctcgcagctggggttctgaacggagaggcaaggtgggaatggctaagaatcaacatattttctagttgcacccacagtcccctcattcaagtagtgagagtcgtgtgactgtcagcactgggcctcttgtccatcttcctgcaggactgtcagcaactggagggcacagacggtttgaccattgagtgccggtttcaacaaatgtccaccaacgaaatgaagggaatgtatgagataaaatgactctcctagtgtcattcaggaagggccatattttctgttgagtaaagcaagccctcatttttttctgcaatccccttttatacactgactgttactcagaacacttcaactaaaaatacagcagcatgaagctgaaagcttaaaaaaacaaacaaaaaaaaccccataaaggcaggctagctcaagggccagcaaacttgctattctggaaagggccaaacagtgagtattttcagccctgtttgtccctttcagtgggcctgtggtctctgtcacaactattcaattctcccgtcgcagcctgaaagtagccaagacaccatgttaaaaaaacagctgtgactgtattccaagaaaatttcacttagaaaaatgggcagagtgccggactgggtctgtggttgcagcttgccaatcgtggactagactatatgctctgtgagactagagactgtgtccacggaaatctctgttgcattccaggaactagcccaggccctggaaaagggagggcacttcatctcagttgaatgaatgagtggatacaattctgctacagttagttgtgctggcttgttttggagagaaaatccatgaagctcaatatcccaaaattctaaggatattaccattccaaatacaatcttaagaaacacaggactgcaagccggtcgtgagcacagctaagcaagaactgtggctccctcctatcctgtgcgcaaccctttctacaccaggatgacactggccagggctgctggcgagggagagatgggtgggccatggaccccacctcctctgcagcctcacgggcactgtccctgaccagcactcctgggcactctggaagcaggctgttctcacgggaacaagcgcacagctaccgggtaagaggacaccaggaagagcgtgcacagaggctgcggccaaggcaacccctcagggctgcccaccggctcctgcattctggcaccacttgaacacgagacctggaaagtcatcaccatggccatgatcagaactgttgttgtaagaattacatctccacttccctggagccctgtctgtggttaaggtgaaatttcaaatgctgcccaagtatgggctctagataatggaccacaaagaatatgcctgttttcttatcctaaaaataaaaagccagtgtctgccagcactag

SEQ ID NO: 61285 - DNA, 500 bp, Homo Sapiens
aaaactttttttttttttttttttttaagagatatggtcttgctatgttgcccaagcttccacctcagcatcccaaagtgctaggattataggtgtgagccaccacacctggccagtggcaattttcaaaaatgttttcaagcaagaaaagcctctttaataaagaaaataatgtgtttacacttacctgtaaccattctatctattctgtctccacttctttaactataaaaataaatgtcatcataagctactcttgacccaaggcactcatggctttcaatgctaatggttctgactattctcaggtgaccagaaaatacataacacgtgtcatttctaattctgtgttagcagtgactgaatcgccattaccaggcagttgacaaagtgttaaccacacactccccatttcccatttgattatcgtcggtccccacaagttgacagtggatacaattactccccttttaaggatggaggaaagtatgctgtgaagt

SEQ ID NO: 61286 - DNA, 2915 bp, Homo Sapiens
ggtcgctggcagagtagaagacgacatgggagaagaagccaccagcagaacccttggttcagactccgtgattctgaagacaggtctgactcccgggcagcacagcccgctcacgattccggccacggtgatgacgagtctccgtcaacctcgtctggcacagctgggacctcctctgtgccagagctacctgggttttactttgaccctgaaaagaaacgctacttccgcttgctccctggacataacaactgcaaccccctgacgaaagagagcatccggcagaaggagatggagagcaagagactgcggctgctccaggaagaagacagacggaaaaagattgccaggatgggatttaatgcatcttccatgctacgaaaaagccagctgggttttctcaacgtcaccaattactgccatttagcccacgagctgcgtctcagctgcatggagaggaaaaaggtccagattcgaagcatggatccctccgccttggcaagcgaccgatttaacctcatactggcagataccaacagtgaccggctcttcacagtgaacgatgttacagttggaggctccaagtatggtatcatcaacctgcaaagtctgaagacccctacgctcaaggtgttcatgcacgaaaacctctacttcaccaaccggaaggtgaattcggtgtgctgggcctcgctgaatcacttggattcccacattctgctatgcctcatgggactcgcagagactccaggctgtgccaccctgctcccagcatcactgttcgtcaatagtcacccaggaatagaccggcctggcatgctctgcagtttccggatccctggtgcctggtcctgtgcctggtccctgaatatccaagcaaataactgcttcagtacaggcttgtctcggcgggtcctgttgaccaacgtggtgacgggacaccggcagtcctttgggaccaacagtgatgtcttggcccagcagtttgctttcatggctcctctgctgtttaatggctgccgctctggggaaatctttgccattgatctgcgttgtggaaatcaaggcaagggatggaaggccacccgcctgtttcatgattcagcagtgacctctgtgcggatcctccaagatgagcaatacctgatggcttcagacatggctggaaagatcaagctgtgggacctgaggaccacgaagtgcgtaaggcagtacgaaggccacgtgaatgagtacgcctacctgcccctgcatgtgcacgaggaagaaggaatcctggtggcaggtacttgaggaaggaaggggaagttccaccccatcaaatactgtctctcaggggcgatcccagcaacttcagcagcagagggaaaagttaccccaaaacagaactgaatcaaggggagtgtggacagctgggtggggagactaggagggaagtagaattagattatattagtaatcaggagtgtaaataaatgtccaccaggtggacagcctcatcccatgtcagtgggcaaacgtcacttcagaaacaggcaggtggggaggtcctggggagcctgggtttggagtttgagtggatttcatcaggccagcattattccaccacgcaactatcttatccaaaaacttgggctccctgttgtctctactcacatttccaccagaggatgctgagaaaagaagttatggtcattgtaaagattcttggccccggcccggcgcggtggctcacgtccgtaatcccaacactttgggaggccaaggagggtggatcacgaggtcaggagattgagaccatcctggccaacatggtgaaaccccatctctactaaaatacaaaaattaactgggcatggtggcacctgcctgtaatctctcagctactcggaagtcagaagcaggagaattgcttggaccaggaagtcggaggttgcagtgagccgatatcacgccactgcactccagcctggcaacagagcgagactccgtctcaaaataaataaataaataaaaaagatttgtggcccctttactaccatccctgtggctccatgatctgcagattaggagcagctatctggccactaagccccctggaagggagttaccagttgattacagatgatggtggctatagcgtaatcagacagtgtgcaggctcaatgctttcacactgaaatagtagctgctgacactgcagaatgtgttctcagtcttcaagaattgtcacctctactggtattcctatagaaagggcttataccccatggaacatttttgtggctaggaagcattactttgttaggacattcatagacttatttactattctcatcaacaccaggacttcgcctcctttttaagtggatttttcacctgtttttatcacagaagagctcttgtgagctggatgatagagagagctcagccttgctgagaggcagatgcaggtagttaccagctgcagtaataaactgcagccgggattcagcttcagccaagatagcacttctggtcttagagccacacaagtgatcagaatcacaaatgtgaaatccatgactgcccaaggcctgtcctcttctcctgctgaaggtctccagtagtgtatatcatgtttctgggctgctgtaacccatgctgttgtgtgtcacagtcctcagaactggagccctgaagacttaaaccggtcctaggaactgaagcattaaaccagaaagagctgtggggagagttgtcaacctagcccatccccaggatgtaatgactttgacagatcttttactataacatgaaaagatcaggccaggtgtggtagctataattccagcacttagggagcttgaggccaggagtttaagaccagctggggcaacacagcaagaccctatctcaaaaaaaaaaaaaaaaaa

SEQ ID NO: 61287 - DNA, 542 bp, Homo Sapiens
tttttttttttttcgagtcatcataaaaacgttttattaatcaaatatatttacatttcttggtcaatgatctctaaatgtgtacctgttttttcatttaaatacaacttaatcctggtagattccatcacaagaatacagcagcatgcatgatctcattggtcctttgcagttattttttcattaaataatgtgaagttaaataaagttagaaaactttattaagttttacccattcttactgtgggataatcattcttgtcatatcagtggcccttacagcaaactacacactccttatcacccacagggagattcttctcattctcttaactgacttgtttaagctttccaaactccaaaaggcagatgtgaaactgggcattcactctaaccattttatttggtggaaagttggagagagacatatttctattccagtagggaacatttacagtcctaaacttaaaataaccacattaaagaaatgtatacaatgtcctaatagcatctaaatatcacacttctattagcatcctaca

SEQ ID NO: 61288 - DNA, 2682 bp, Homo Sapiens
ttgagcaacaataagaaattgagtgaaaatacgcaaaatacgtcattatgttctggaactgtagttcatggtagacgttttcatcatgctcatgcacagataccagtagtaaaaacagcagcccaaagcagtctggaccgaaaagaaaggaaagaatacccacctcatgtccaaaaagttgaaattaatcctgtaaggttaagtcggctccaaggtgttgaacgtataatgaagaaaacagaagagtccgaatcacaagtggagcctgaaattaagaggaaagtacaacagaaacggcactgtagtacctatcagcctactcctcctctatctcctgcttcaaaaaaatgtttaacccatttagaggatttgcaaagaaattgcagacaagctattactttgaatgagtctactggaccattattaagaacgtcaattcatcagaattctggaggacagaagtcacaaaacacaggattaacaaccaagaagttttatggcaacaatgtggaaaaggttccaattgatattattgtgaattgtgatgacagtaaacgcacttatttacagactaatggaaaagtcattttacctggggcaaaaatacccaaaatcacaaacttgaaagaaaggaaaacaagtttgtcagacctaaatgatccaatcattttgtccagtgatgatgatgatgacaacgacagaactaacagaagagaaagcatatctcctcagcctgctgattcagcatgttcttcccctgcaccatccactggaaaagtagaagcagcgctaaatgaaaatacttgcagagcagagcgtgaactacgaagcattccagaagactcagagttaaatacagttacattgccaagaaaagcaagaatgaaagaccagtttggcaattctattatcaacacacctctgaaacgtcgtaaagtgttttctcaagaacctccagatgctttagctttaagctgccaaagttcctttgacagtgtcattttaaactgtcgaagtatacgagtaggaacactcttccggctgttaatagagcctgtaattttttgtttagattttatcaagatacagctagacgaaccagaccatgatcctgtagagattatattaaatacctctgatctaactaaatgtgaatggtgtaatgtccgaaaattacctgtagtgtttcttcaagcaattccagcagtttatcaaaagctgagcatccaactgcaaatgaataaggaggataaagtttggaatgattgtaaaggagtaaataaattaacaaatttagaagaacaatatataattttaatttttcaaaatggccttgatcctccggcaaatatggtatttgaaagtatcattaatgaaattggtataaagaataacatctccaatttttttgcgaaaattccctttgaagaagctaatggcagacttgttgcctgtacaagaacctatgaagagagcatcaaaggaagttgtgggcaaaaggaaaacaaaattaaaactgtatcatttgaatctaaaatacaacttagaagcaaacaagaatttcagttttttgatgaagaagaagaaactggagaaaaccacaccatcttcattggcccagtagaaaagttgatagtatatccaccacctccagctaaaggaggcatctctgttaccaatgaggacctgcactgtctaaatgaaggagaatttttaaatgatgttattatagacttttatttgaagtaagttaattttccactgatcttttattaaatctttaacattccgtcatatcttatgtctttgttttccagagtcaggctttttgagttttaaattccatctctgccacttactgtgtgacatttggggagttattttttctgtttctgtctttgcacattttaaaaatgagaattctatctaaaaagttgtgaaaattgggccagggagatatctggcttatgtctataatcctgacactttgggaggtcaaggtgggaggatcgcttgagcccaagagttcacgaccagcctgggaaacaaagtgagaccttgtctccacaaaaaatttaaaattagccagtcatatacctatagtcccagccacttgggaggctcagacaggaagattacctgagcccatgagttcgaagttgcactgagccatgatggcgccactgcactccagcctggtcaacaaagcaaaactctacccccacacccacccccgaaaacaggagttgtgagaattaaatgagatcgtacatatcaagtagtaggaaaaatgcctagtacagtgttagaagtttatggtcttgtaggaagcacaaatacagaattaaagcaatgatagaagcattaacatggttcagtcctagcagatgagagaatgcttcattatctttggaggttgggagatatgagggaccaggaagctttcctggaagagcttacattatgacccaatatacattatgacccaacataacacatgtatacacctatgtgcaatgtgtttatacatttatcaatttgtatgtttttactggtttgtgatataaaatggacatgtatatgaaataaaacagaacttagcatcagtatgcatagttctctgtaatattttctagtttcttatactgtgtttcattaaacaaaacaaaacttttaaaaatt

SEQ ID NO: 61289 - DNA, 1170 bp, Homo Sapiens
tttttttttttttttagaaaaaaaccagtttattaagtaatatcatataaataactggttacaaaaattggatttggcaaaaggcatatttactcttggtgagaaatcactttttaaattggcattcttttcaaatttataagtctaagaaaacaaaaccaaataaaagaagccatttcaaggagtgcgtatttggccattggactggcaacaaaaggcccggccacactgagctaaaaggtaatactctcgaccccattcttctaacacagaaaactttctcaggtaaacgggggggttatgagaatccccctaactagaaatggtggatggggaactggagcattggcgtggctttcatcaggtgtccttggtggccaaagacttggaacggatactggaggaaaacggacaagatgtggaggcattcccgccagtaaatcttcaaggggtgggcatccggtgttcaatttatacttgggaagtattttaaattaaaaacaatcaataccaaaaagctttaatttggggggtttaaaagtcacaaatcacagggggagaatgccaaatggcgtttagctgggaactactgaagacgcacatagcatttattataagggcctactcttaggcagttcactctcaaagcaatgaaaataatctcaaaccaaacattacaggtgggttgtgaagcgttcctacgtatcttccgagcagggtcagttttacattgtgctaccacagaattcccaagaatgcctggtaattcttatacattggatctttaataaccctaaactattagatcctagaaaacataaaggattagaagaggcggctcccgaacattttccgtaaataaggtagactcaagaaagaccagatctcttagggggaggggctcttccccagggggggtgcagtgcccccattggtgggattacccccctgggagggaaataggtgtggtggtgacgtggggttttgagacaacacaacacaacaggggggcgaaaaaacttagaggacgagacagacacacttataagagcacaatagtaaaataaaagcggcacagatgtgagaacaatatgaaacatgatagagaaacaaaatagttagtgttcacttctgtacgtcctggctattgaagtagtggcagcgaaatga

SEQ ID NO: 61290 - DNA, 813 bp, Homo Sapiens
cagcggaggtggcgctggctaatctcaagaacaaatatgaaaatgaaaaagcaatggtgactgaaaccatgacgaagcttagaaatgaactgaaggctttgaaagaagatgctgcaaccttctcatccctgagagcaatgtttgcaacaagatgtgatgaatatgtcacccagttggatgagatgcagagacagttagcagctgcagaggatgagaagaagactctgaacactttgttacgaatggctatccagcaaaaactcgccctgacccagaggctggagggcttagagtttgaccatgagcagtcccgacgcagcaaaggcaaacttggaaagagcaagatcggcagccctaaagtaagtggggaggcatcagtcaccgtgcccaccatagacacttacctcctgcatagtcagggcccacagacacccaacattcgggtcagcagtggcactcagaggaaaaggtatgcatgcagcgatcttcatagtacggtgcagtggccagattttagttaactgcaaaaataaatgtgctcttgttgtggaggatggaggaggggaagcaaaagaaaaaatgggagctggcatataaatggtcttgctaatgtggctctttccagatcaaaacctttttgataattgtgtttatgtagtcctttctaaccccctgcccaatccctcctcttgattaatcgtaatataattttcaagygtctgttaatatttttgctactctttgtatgtgtaaatatgcctctcccttacctccaacctgagaattggtagataaaggtggatattaagaatg

SEQ ID NO: 61291 - DNA, 524 bp, Homo Sapiens
aaacatgtaagtcacattttagtagtctaaacaaaagtaaacaaagtcattctcaaactaaatatcagttttaacaattaaaacactttcccaaataaagtctccattcagatgaaaaataaaaactagaaaaacctatcaacattgtacaatatgtaactctaaaatctgcatatttaaaacttataaatgtcattttaggttaagtctaaacaaaattaagaatttatttttcctctgctttgcacaaattatgaattttacatgatcatacagaaaatttgatacttattaaaagcaactttacaggaaagtttttaaaatcttaatagttaaaaaactatttcttaataatccttagtaacatttagtttttctttctacatctaatgacatttaagaattaagggaattttttttttccagagacaatgccttgtaataaaataggcttttataaattggcaagtaatgggtcagaattttaacagagttcataaaactaattcaaaatatattcttta

SEQ ID NO: 61292 - DNA, 2401 bp, Homo Sapiens
aaatcagttgtcttagtttaagctactataacaaggtactgtagactgatggcttataagcaacagaaacttatttctcagttctgtagtctggaggtccaagatcaaggtgacactgtggtcaggttctgatgagggccctcttctgggttataaactacggacttcttgtatccttacatggcagaaagagcgacagagctctctgtagtcccttttataagctcactaatcccattcatgagggccctaccctcatgacccaattacctcccaaatgcccctcctccaaacaccaccactttgggggttaagatttcaacagatgaattttgaagggacacaaacattcagtccatagcatcacttatcaagctagtatttaatacctcttaggccccgtggaagggaaaatagataggaacctgccctgaaagatgcttcagttggggagaaaaggtgaaattccattgttagacaatttgtttaagacaatacatcttgcttgagaaggaatagaagggaaatgaaatggggggagggagtggtaggagatggaggctttgaaagaaaataaccagatttagaaacatgggtatagaaagcatcctccagtacttctgtaacaatttatcaagacctacaggaagtcagttttggatttgctcctccgagatttgcgagccagaggaaaatacttagactatcaggttggaaagttcacacttggaccaggaaaagaccaagcagttgctatagtctcctggattgtgactaatctggaggaagcaagtccctgtatccttggcaaagcttgaaaggcaggcaaatgtcttctctgtgttttctgacaggtggttgggtggtgggggttggtctctgtacctcctgttctttaccttgcttaccaagcccttccaccgactcactcctgcctccccagctaaaaattggctgtgttgcttttaccacagttaccaaggtctgagttttataaaatccaggatcacatctgacctcacctggtagatatctaggccaataaagtctaaagggctaaaaagaaggtacctctccatcctgtctcctcgaggccaggcagcacatgtgcagttaagaggcctcctggatccattgtcctcctgttgcttttcgttctaagtgatccaaactctattgctgatagggaataaaagcagggcaggctagtagtgggcaagtgctttgatggagcgtatctccaagcagggcccaagtttaggaggaggaagacctgatacaatgaatgaacagtgcgtcctcccaacccaaccaagaagtgtaattgtgttccgtctttaaccctggcatggaatggggagggaagaggcatggacatttattacatagtgcacattatctacattctctgcatgtgacccagatgtcagcccttccgcttcctgcgaaggttacctctaatgcacgttgccccaggccctgctgagctagttcctcaccgcagctacttaactcaccatgaattcctagaaccctcagcctctgagagtgctgggatctggcgggagaacaggcagtacttccctcactaacctacccgcacgccataccatcattgtgcaaagctgcctcatgctggaaggtctggtttacgtaaaagtgacaagttggaattgagcgtccgactctcgggtacctgccccaggcatttctcatcagccccatttcccacacagctctctcctaggcgcagccctccttcaccaccaccacccccaccccaatcacctttaggtattttctcccctaaagcctcacctgttggcattttacatctttttaagaccttattttgtattttaaatgtatgagaaaaattatggaggatgatgcaagatgagtgagtccataatggtaataattggacactaaaaacaatgaaaacttgtctcaagtatttgtgttgaaatctcaattaactgggcgactgctcccgttccattttattctgtaaaatatgtggcatcctttgtgttgaggcggcatttactaaacacccccaaggtgcaaggctgcaagagaatcgagcgccgcaaggcgagcttatcttccacacctggtacagtgcccaggacagagaaggtgtttagcaagtttctgctgaatggaagagtgagcgagaagggaaagtgcatctaaaaagcacagggaacctacaaaatatttgggaaagggtttcatcagttcgggtgaaatcttgaacgtgcaaagcaccatgggggtggctggacaggcttgttggagtcgtataatgcaatgaataaaaacttacggctgccttaaatgcaaatgtcaagcccttaaataaaatttaacaaagtcaaaaaaaaaaaaaaaaaaa

SEQ ID NO: 61293 - DNA, 5577 bp, Homo Sapiens
cagaagggtcttgtttcccaaaaaaacctggttgcctgcccagatctgaggaggcagtagtaacagcctccaggaaccatgagcaaactgtgctgggtcccctgtcagggaacctcatgctcccagcacagccgccccatgaggggagtgtggagcaggtgggaggagagagatgccgagggccacagtcatcaggcccagtcgaggccaagcaggaggacagcccgttccagtgccccaaggaggagcggccagggggagtgccgtgtatggatcagggtggctgtcctctagctggcctgagccaggaggtacccacgatgccttctcttcctggaactgggctgacagctagcccaaaggcggggccgtgtagcaccccgacttctcagcacgggagcacagccaccttcctgccctctgaggatcaggtcctgatgagttctgccccaacactgcacctggggctggggacccccactcagagtcacccaccagaaaccatggccaccagcagtgagggggcctgcgcccaggtaccagatgtggaggggcggaccccaggtccccggagctgtgaccctggcctcatagattccctgaagaactacctgcttctgctgctgaagctgtccagcacagagacaagtggagcagggggagagtcccaggtgggggcagccaccggaggtctggtgccctcagccactctgacacccactgtggaagtggctgggcttagtccccggacatcgaggcgcatcctggagcgtgtggagaacaaccacctggtgcagagtgcacagaccctgctgctgagcccctgtacctcccgccgcctcaccggcctcctggaccgtgaggtgcaggctggccgccaggcccttgctgctgcccgaggctcctggggtcctggtcccagctccctcactgtccctgccattgtggtagacgaggaggaccctgggctggcctcagaaggagccagtgagggtgaaggagaggtttcccttgaggggcctggcctcctgggggcctctcaggagagcagcatggctggtcgactgggggaggcgggtgggcaggcagcccctggacaggggccctcagcagagagcatagcccaggagccctcccaagaggagaagttcccaggggaggctctgacaggcctcccggcagctacacctgaggaactggctctaggggcccggaggaagagatttctccctaaggtcagagcagcaggagacggggaggcaaccacacctgaagaaagggagagccccacggtttccccccgggggcccaggaaaagcctggtgcctgggtccccagggactccagggcgggagagacgctcccctacgcagggcagaaaggcgagcatgctggaggtgcctcgggcagaggaggagctggcggcaggagacctgggccccagccccaaggccggcggtctggacacagaggtggccctggatgaaggcaagcaggagacactggccaagcccaggaaagccaaagacctgctgaaagccccacaggtgatccggaagattcgggtggagcagtttcctgatgcctccggtagcctgaagctgtggtgccagtttttcaacattcttagtgactcagtcttgacatgggccaaggatcagcgcccagtgggcgaggtgggcaggagcgcaggggatgaggggccggcggccttggccatcgtgcaggcctcccccgtagactgcggtgtgtatcggtgcaccatccacaatgagcacggctcggcctccaccgacttctgcctcagccctgaggtgttgtcaggattcatctccagagaagaaggtgaagttggagaagagattgagatgacccctatggtgtttgctaagggtctggctgactctggctgctggggggacaagctctttgggcgactggtaagcgaggagctccgagggggtggatatgggtgtggccttcggaaggcctcccaggccaaggtcatctacgggctggaacccatcttcgagtcgggccgcacgtgcatcatcaaggtgtccagcctgcttgtgtttgggcccagcagtgagacttctcttgtgggcagaaactacgacgtcaccatccaggggtgcaagatccagaacatgagtcgggagtactgcaaaatcttcgcagcagaagcccgggccgcgcctggctttggggaggtgcctgagatcatcccactgtatctgatctaccggcctgcaaacaatatcccatatgctaccctggaggaagacctgggcaagcccctggagtcttactgttctcgggaatggggctgtgctgaggctccgacagcatctggcagctctgaggccatgcagaaatgccagaccttccaacactggctgtatcagtggacaaatggcagcttccttgtcacagacttggcaggggttgactggaagatgactgatgtgcagattgctaccaaactccgaggataccagggcctcaaggaaagctgcttccctgccctgctggaccggttcgcctcctcccaccagtgcaatgcctactgtgagctgctggggctgacacctctcaagggcccggaggcggcccacccccaagccaaagccaaaggctctaagagtccatctgctggcaggaaaggctcccagctgagtcctcagccccagaagaaaggcctccctagtcctcagggcacccggaagagtgctccaagttccaaggccacccctcaggcctcagagccagtcaccactcagttgttgggacagcctcccacccaagaggagggctccaaggcccagggcatgcggtagcctctgcagaggctgggggcctccacccagcagcagaccaaccaggaagcagcttgaactggatggagactttccaaatatggaactaactggagaaggtgcacgaaggagacaccacttggggacctctctgagcaggctctcgtgaatcagctcgtcatcagatggctttggtgcatggcacatagcccactggcctcttctggtgccactgtcacccagggctcccgggcctcaagcagtccccacctccgagtgcctggcaacctaggccctccttgaagtttacactttgccactgctggaggctcccctgagtcctctgcatgagttctgcaccccaagcccttgccccagcccagtccagcagcagatgttacaatctgagtgaggacatgcaggccaacttttaccctcctgcatttgcctggccctgatctcgcctgtcctcagggatccagacttcctctgctggtctggcctggtgactctcagggtatcttctccttccagctactttcgctcactgatctcagcttatcctgcaactaaccatccttgagcccagatggggctcagggcccttccagagcctgtcatgtccttgtgcagtggcctttgatgtgtgttcacgctcttcccccttcactcactcgcctgcttcccatgctcccttgtaccccctcgccacatccctgtcttggggcccagctgcagcctgctgcctgcccttcatggctctgcacatggccctttgcttgagggctccccactccctgcccaccaatacccaggtgaggaacagaccctctggcctctcaccccacttcagtgctctcttccccaacttctctcgggctctttgctcatgaggtgagagctggtgtgagggttgtgtcagcagctgtagccagagagaggtgttgactctgagagaccttgcactccatactgaaaggaggtggggtcacagtgaatttcacatcccctctcaaccaggagtggagggctaggtcccttccccatggggagtacacttgggtgttctaggagggatgcagtctatccatgcacttgggtggaggggagtctctgtgcctgggaattaggacccctgctccaaccatcgctcttgatcctggggccccagctctgggtcctcatgtatgggctcccaaggacccagcagcctggatccttccagagcatccctcctggaggcctgggatggggtaggtctgcagctagcctactccctttggaatgcaataaaggcagcattgtgtgccctgcttgccctcatctggtgtggttggaggtctgtggagtcaaggtccccctctcccaggcaggctctctgagggcattctgtagtcccaggcccactggaaaaatgaatctatattttggttcctggaccgaagttcagtcgcagccttctgtggccacagaaagacagcttgtgctgcttgcacaactgagctgctggtgtgtaccccttagcagggtgtctggggacttacgcctttggaattgctcttcattcagaagaggaacacaaaggaagccacccaggaaggaagcacagagctgggggctctggaaacgccctgtgtctctggctacagcaagaccagcccaggagcccaccagcacctgcctctcagctacttgctgaccatttcctgcttctcaagctgcagagaagcttttcattcccacccccacccggaacctccccttgcctaacatttcccctctatggtaacatctctgacttctctacctcctctgtgctcaggtgactccacatcttctgccccagtgtgtccccacctctcccagcctgtatacccagattactttggtgaactgagagctggagtactgttcattcatttattcattcacccactcattcagcagaccttggcattttcacatgatttatctcccactctgattcacatatgtttgaccaaggcactgggcagctgccaatttcccgtcccttctgtagtcccagatgaatggatacagacctctttggggaaggctgcaaggaaggttcacaacatgcatctaagtgttaaaataagtttttccttcaaaaatacatttgacttcctctccatttaaggtctggaaatcaagtgggagatcttgactttaccttggcacttgagacagaactgttggcccagaagtctttagttaaggtcattactaggccatatcttaggggcgtctggcctttttcattcctgggacccacagctcgaggtctggtttccatgccctatcccttacgatgagcgccctattttgttccttctgtctatctctgttgctgagatcagggagcccacgttcacagcagctctttcaagcagcctcccaggcctagagaggaaaatcagcagagcctcgtgaatgtatttctcgtggcaagaagggagctcatcttctgggtcctgccagagggcagtgagggggttgatgggctgggtgcatgccagggacccaatcaagcatttttatcttctgaaatctttgaattcctgcctttcttggatgtttggtcttttgatataatttagcatgggccaacatttggtccagatttgtattagccaagccctcctaaaatagtaataacagtatctggcgatttgagcttttacgtagaatgtagaatctctggtgagtgaacatatcaataaagacaacctgaacc

SEQ ID NO: 61294 - DNA, 1010 bp, Homo Sapiens
ggctggtgaattaccagatctccgtcaagtgcagtaaccagttcaagttggaaggtgtgtcttttgaatgcagaaaacaaagtcgtggacaaccaggctgggacccagggccagctgaaggtgctgggtgccaacctctggtggccgtacctgatgcacgaacaccccgcctacctgtactcgtgggaggatggtgattgctcacaccaaagccttggacccctcccagcctgtgacctttgtgaccaactccacctacgcagcagacaagggggctctgtatgtggatgtgatccgtgtgaacagctactactcttggtatcgcaactacgggcacctggagttgattcagctgcagctggccgcccagtttgagaattggtgtaagacatcacaatcccattattcagagcgcgtatggagtggaaacgcttgtagggtttcaccaggatccacctctgatgttcagtgaagaggaccggaaaagtctgctagagcagtaccatctgggtctggatcaaaaacgcagaaaatacgtggttggagagctcatctggaattttgccgatttcatgactaaccagtgtgtcagtttcttggtcgggaatgaaaatagtgccaacctgtgataccttcactctaattttactttctgaggaagttttctgtaatagttatttggtgataattattaatactgatgtgaatttcttcggagtaagaaatcctcagaggaaattacccagtatattcaaagctacaagggatttgttgacataacggtctgttttcaaggcagtttccggaaacagtgaccctgagaaggcttcctcctgagtatgcataaacattcacagcttgcatgcgtgtgtgtgtgtgtgtgtgtgtgtgtgtgtatgtttgcttgcactgcataaaaacaattgcaacatcaacagaaataaaaattaaaggaataattctcctccgactctgccgttccatccagtgaaactcttcattctggggga

SEQ ID NO: 61295 - DNA, 498 bp, Homo Sapiens
tagtagctcatcagctattgttagtgtagtttatgtgaggccaaagacaattcttcttcttcaagtatggcccagggatgcaaaaagattggacatccctgatttaagaaaacccttggtttttccaaaataaccaaataatctatagtgactctatcactgcagacaagtatatcataagcactcactaaactgaattattcagaaaaaaaatttcattttagtcagaaaaaccccatccattcaaatttctctatttaggatttatcatttcacagacacaatagatataattctaaatgaataaaactgacttcatttcagggtccactgaatattttatgatacaataatatgaagtctaaattattgtgaattatatttttcaatgactgcagttttgaatatttgtccatgtttgttcatcttttaatggtatgtgagggcatgaaactactatttcctttttaaaaaactgctttagtattcccacaacta

SEQ ID NO: 61296 - DNA, 1523 bp, Homo Sapiens
gcgggggccacatggggccagtttattgcagttaaatacctctctctctattttttttttgtcaatttttccataaagaaaattaaaacacacacacacacccccaaaggggagcagggacccagaaacaagaggtggggtgggacgtggcctccctgcataggtccaggccccgggtggccccccaaaggctcccctccttcccatcagcaccctgtctcagtacctccagagagcaggaggcagcgggacgtggcagggcctctgtcccctccctcttgcctccaggtgagaccactagaagtgccggggcttagtgagggccgggagaagggcgacagacagacggatgggcagggaggataccgtttccaagtggaggagggcggtgggcactgtatccacagaaatgcattatttctccccgttttttgttaaaaatctactataaaaaaacgcagctgggggaggggcatgtgtccctctctgtgctaagggctggggaagggggcagcagaggccggcgtgggcggcggcggctgcgtggtggtggcgggcgtcactgccgggtgccctcgcccaccatctccaggttgtgctgctgcagctgggctcgaagcagggcgttctcattcttcagctcctcgatctgctgcctcaggagctcgttgtccatctgcagccgctcggcctctttgaaggtctcctgcatgcgctggttggtctggcgcaactcccggatgtaatcgcaggccttggacaggatccctcctttactcgctcccgtcttgctgttgtctgcgttacagtctggaatgattttcgaaagctggacgatccagttgttgatcttgtccctccgcctccgctccacttcgttgtgctgggctcttctcctctcatctcggggtgttctggttccatcaatttttggagagtaagggtgtgtccggggggcgatcgtcctctgtgttcctgtctgaagcacatcctggggcgtcatcatgacgtagaactggcctccagcctgcaagctctggtctgtggtctgtacggacacagccgtagtatctcccacactggacgctgggaaataggcaaatcgtgcctccccgctgacagcctcggccgccggactgccaccattgctgaagggattttggatcacagcctgtcctccatttgtctctgtgcggaactggtactggatgttgtggtcgccgaacgccgcctgctggacgctggtgatggccaccgctgtctgctcctccgctcctgggccgtccccgccttcctgcagctcgacgccctcctccgcctcgggtcccttgtcgtggctggcggcggcagcagcggtggccgaggcagcgggatccagacccgggtccagcatgtccatggggggggcgggggcggggggggcgcggggcccgggggggaggggaggggaggggagggagggaagggagggggcgggcggccgggggggccccgagcccggcgctcacgccgcgcggcaggag

SEQ ID NO: 61297 - DNA, 539 bp, Homo Sapiens
tttgactcaattcctaatagctaaagggaaggctttcaggcggactgcacacctgcttcaagccaggtgctgcagggaccacggtgactttgtcttcacagacacaccaagaggcagatgcaagggctgggctgagagaggcaagaggctgcactgcacctgcagattcacagccccagggggccagctgggccatccctgcctgtggggcccctccactcctttactgtggccccgtcggggccccctcccctcccttccatgggccagacctgcatggtggtcgcacattcgctttatccttcaagggtgttctcctggtcacatccgattctgccttggcacctgcttggaggccccctgcaggtcaacctgctcatgtggcaggagctcagtgtcccggctcccagcagagggcatgcctggggcaagagtggaggctggcttggctcattgtggaggggacagaaaggacaggggtgcctttagggaggggcagaaagggcctggacatgcctagtgtggtgacgtgcaggctg

SEQ ID NO: 61298 - DNA, 904 bp, Homo Sapiens
cgtgacttcagtaaagggaacccggggctctcgcagccagccctcctgcccatggaggacagtttccttcaatcttttgggaggctgagcctccagccccagcagcagcagcagcggcagcggccgccccggccgcccccgcgggggtacacctcctcgccgccacagctttaggaaacacctctacctcctgcgaggcctcccgggctccgggaaaactacactggccagacaattgcagcatgactttcccagggccctgattttcagcacggatgattttttcttcagggaagatggtgcctatgagttcaatcctgacttcctggaggaagctcatgaatggaaccaaaaaagagcaagaaaagcaatgaggaatggcatatcccccattattattgataataccaacctccacgcctgggaaatgaagccctatgcagtcatggcacttgaaaataactatgaagttatattccgagaacctgacactcgctggaaattcaacgttcaagagttagcaagaagaaacattcatggtgtctcaagagaaaaaatccaccgaatgaaagaacggtatgaacacgatgttacttttcacagtgtgcttcatgcagaaaagccaagcagaatgaacagaaaccaggacaggaataatgcattgccttccaacaatgccagatactggaattcctacacagagtttccaaaccggagggcccacggtggatttacaaatgagagctcctatcacagaaggggcggttgtcaccatggatattagaggcctatcttacagccaggcagaattttcctaagttggaatcagatttaatgtgagatcatgatagacaagaccacagaggacgtatgctctatttcttgttggccaacagcttctttc

SEQ ID NO: 61299 - DNA, 465 bp, Homo Sapiens
aatgttttgctattttttaatacacttcaaatgatttttctttagtcacaaggtcattagtttttagaagtttaaagtaaaccatttttttattacaattcagacatttaaaaaattctcagaactgtcagactttttcaaccagcctttaaaaatttaattaaataattttcttcaatacaagtcagatattttaagatttttcaggagcatcagacttcttcaatcagaagaacaatgttctaaaaacatgtatgagatccatgtgtgtaatcgttcttgatataacaacattcaccttttcccaagcagagaaacctttcgtacttttccttctcctttcaggtgaatgacaaactgtaataacaatattataaacaatgtgtatatagtacatagacaatatgcatatgtacattacacacaatgtattaaaatatgttatattatcttttacttttaaag

SEQ ID NO: 61300 - DNA, 1602 bp, Homo Sapiens
cagaaaaacactcactcacgtattcagccacgtatggtctggagtgctgctgtagaacagcccgaagtgtacaccatgtctctgcacttgaagctcatggaatgtgttggaggagactcaagctccatgtgggaacagtgtggcccaagagccagcatggaggagggctgtgtgagcagactgctatagaatgctaaagttataatcctagctggtgtctcgttctgtttaaaaaaatcaaatttctgtatgtaattgacgtattggtccttatagtcagtaccatcaggtcttagattgttaagtcattttgctgccaccagaccagtgagagtcactcacttatttgtaatgattcttgggaagtttagtcaagagaatatccttgaataaagaagtacatgttttaagtattttcatcgtagtctagatgggctgtaaaacccatttccacacgagtataaatttaaaacagaaacatcaaggtgtcagcaatcatgattttgttttgcttgttcacaagtttgaaaaggtgcatgaggcaccaatcagtgacactggaatgctttaaggatggtttgtgactttaccccattgtgccttatcatttgtcagcaaacttactgggccaaacacaaatggctgagacactcctggcccatttcttgtcatcgctgccatccccaaagacagactctgggaaacaacttgggaactgcttcaagtccatgccaggtcatggcttcgtccgcctcccagcatgtacctggacttcctttgggtgccggcttttctgctggactaagagattcatggaaagaaccccagggcaaggtgaggagaagcagctggtacagactgatgacgaaggagaggaccagaaaagctgcttgggtgtggtggaagtttcagtgtaatgtgattcctagtaggcacatctgtgactcccttaaataaaaagggccagagatgaggggacgcctggtgaaaatggtgtttgttgtaacatcttggtatcattgtgggtaagtagaacaaatatttacatctgttatgaaaagctacctttagccgtagataaacattaaaaggaagactcagccccagagtatatttgatctattggttaactcatctgtcagcaaatggttaagtaagtaaaattaatttttccatttggtgtgtatttcacagggtaacaatgaagtgctccaatctgcttgtgagaccagttagattagtagttgcagttgagaccattcctcctgtatgtctttacaagcaaattgaaacgacatgctcttctttgtactatacagaaggacacaccacagatcctctttttaaagcaggtaataaagtagctttttccttttgaaacatcattgtaaaacagtgctttttaaactatccatggtaaaggatgagttttaaaaattctaatcctttgcaggttggtagttttataaatacgataaaaatatagcaccaagattagattgttataaaagtttctaaacactttcagtttctgtacttaatcttgcagtgtggtaataaagacttctacactttagtagcactaaaaaaaaaaaaaaaaaa

SEQ ID NO: 61301 - DNA, 488 bp, Homo Sapiens
ttctgttgagttcttaataaaggctcctattttataggtttccatggtcaagattcaaaacaaataaggtgttggaagaaacctgattggccagacaactgacttattattttactgaatctgacataaaataaccaggtgcaaagaggtttatcataaatgcaacctgcaaagcaaattgtgtcaaataaaaacacacatatgatgcttttcaacatccagaaacacttatttcagacattagttgttctcgttttcatgttgccattttccataactgtttcacaggcaccaaaacgaagatactcctacagcaatatactgcattcaagaagagaagcattcttctagtttctctttaaaaataaaaagaatctaagctcaattctagcgaaccattttctgtcaaaattttgctctcccgtattaaggaaaacaaaatttgaccaaaaatgcatactagccatcattgattttacacgtaaata

SEQ ID NO: 61302 - DNA, 505 bp, Homo Sapiens
agagttttaaacattttattttgcttttattttttctttttgaaatacaaaatgtgcacattgagtttacacaaacacgtgatggcaaatttcagtgtacatgtattgtactactcttaatttctacactggtgatagcagggcagctttcaacatcctatctctacaccagaatagatacctgatttattgttgcaaagacagttgcaaatttcctccttctgtagcctcttggtctttgtgatatttctacaaaacagggacgatgtgtgtggctttagtaatgtggcaactttacagttttggctaagatgattgattaaaaataatctgaattatgatgagctaaatcatactgtaatctggattagttgtcgagcacttattttctactaaatcttggtagtagttgtcaatgtaatggaaccactggtgctttcaaagtgaattttgcttgctgtttgttcttagtagacagtggggtagtcaaggtttctttctttgt

SEQ ID NO: 61303 - DNA, 110096 bp, Homo Sapiens
gatcctatgagcccaggaagtcaaggcttcagtaagccatgatcacaccactgcactccagcctgggcaacagggtgagaccctgtcttgaaaaatgaaattaaaaataataaagaataggccaggtgcaatggcttatgcatgtaatcctagtactttgggaggccaagatgggtggatcacttgaggtcaggaattcgaaaccagcctggccaacatggtgaaaccccatttccactaaaaatacaaaaaaattagttgggcgtggtggcacatgcctgtaatcccagctacttggaaggctgaggcaggagaattgcttgaacccgggaggtggaggttggtgtgagccaagatcccaccactgcactccagcctgggcaacagagcgagactctgtctcaaaataataataataataataataataataataatgattaatagtaataaataaacaattctgcagcatttagtaattcaccatgctgtacagccattagatctatgtagttgcagaacttttttatcacccccaaagggaaacctcacacccattacacactccctcctcattcctccctccctgcagtccctggcaaccactaatctattttctctctctgtggaattgctttttctggatatttctttttttttttttttttgagacagaatttcactcttgttgcccaggctggagtgcaatggcgtgatctcggctcactgcaacctccgcctcccaggttcaagcaattctcctccctcagcctcctgagtagctgggattataggcatgcgccaccacacctggctaattttgtatttttagtaaagacagggtttcaccatgttggtcaggctggtctcgaactcctgacctcaggtgatctgcctgccttggcctcccaaagtgctgcgattacaggcgtgagccacatgcctggcctttttctggatatttcctataaatgggatcgtatgctctgtggcctcttatgactggcttatttcacttaacataacgtttctgaggtttatccatgttgtagcttgtgtcactgcttcattcatttttatagccgagtaatattccattgaatggtagatgcattcatccactggtgaacattgggttgtccatctttcatctgttgtaaatagtgctcttatgaatgtgggtgtacaaatatttggctggacaactgctttgagttatttaggatatacgtctagaggtggaatttcttggtcatatggtagctctatgtttaacttatagaggaatcctgcatgggctttcgagcaagctaactggctgtatgtgttaatggcagctcagcatggggaaaattgccaattctattcccaggccagccacactttggcagatgttccagatgtctagtggagagtcctaccccaatggccacacatgtgttttctctgaactgcctagtatttttcaaaaatttgggctgggcctgatggctcacggctgtaatcccagcactttgagagactgcggcgggtggatcacttgaggtcaggaagtcgagaccagcctggccaacatggtgaaaccctgtctctactaaaaaaatacataaaattagccaggtgtggtggtgcccacccgtaatcccagctacttgggaggctgaggcaggagaactgctggaaccagggagacaaagattgcagtgagccgatatcaaaccactgcactccagcctgggtgagagagtgagactccatcttgaaaaaaataaaaatagataaataaaagaagcaaaatataaaaattgaaagatttttgcttcaaaatctgggtttgggccttctcttgaaaaatcagaagttctagggctgggtgtagtggctcatgcctgtagtcccagcactttgggaagccaaggtggcaggattgcttgagcccaggagtttgaaaccagtctggacaacatagcaagaccctgtctctacttaaaaaaaaatagaagaagaagaagttctaataatactgtggtggaaccagctgagtgggggtggtcctgtgatattgggtacctgccccttcgtcatccatggcctccaccctggtctactggcccctgaagacgcttaagtttgtaatctttatttcaaattgtgtctatacagtcacacagatatatacacatacctttcctttatgtatatatttaaaaggaatctcacaatatatgccatttgtttaattttttgaataggtaatggaatgacatcactcaaaatctaaaactctaaaaaaaggtatttatctctcattgtttgtaggattctgttattccttttaatcaaacttgttaattgagtgattcaaatcttccatctccctattcatttatcttgcctgattaatctaatagtttctgagagaaatgtgaaaccttattttaagcaaattctccttgtaattctgtcaattttttttttttttttgccattttggtttttatttgattataggtaagagttccatacaatagtgtgcgaagtattgcaaacaataaaggaaaaatacagcataagatacctcttacactctgcccaattctgtcaatttttatgtcagatatttttaggctacattctttggagcatataagttcaatatttttatatatcatagatctttttatgtaatatctatgtaataaatctctttgtccctaagaaaaatcaaaataattttcaagaaagatatacagtgaaaaaaatcttactcctaccttttttccccattgccctatagccctgaaatatgattacatagttttattttgccacttttttttttttttttagacaaagttccactcttgttgcccaggctggagtgcaacagtgtgatctcggctcactgcaacctctgcttcctgggttcaagtggttctcctgcttcagccttccaagcagctgggattataggcaaccaccaccacgcctggctaagtttttgtatttttaatagagacagggtttcaccatgttggccaggctggtctcgaactcctgaccttcaggtgatccacttgccttggcctcccaaagtgctgggattgcaggtgtgagccaccacacctggcctttgccacatttttttgcacataaacgtacaatacatattgcctattgcatttttacacttaataaaatagaggactttctaaatccatagacagagagtttcctcattatttctaacagtggcacaatgtttctttatctaactaccccacatgtgtttgtttggctaatttaacgtatggattattatttccaatctcacaatgagcaagatagtagatataccatttttcacatgtgcaagtatatctgtagcataaattcaaaagtaaaattgctgagtcaaagggaacatgtatttgtaattctgatctgtatcaaacagtaatttacactcccaacagcaaagtatatatgttcacctacatatttgcccatagaggatatcaggttttggagttttttctcccaatctgctaggtgaaaaatggtattttgtggtagttataatttgcctttctgttattgtaagtgagattgagaattttttttttttgagatggagttttgctcttgttgcccaggctggagtgcaatgccacgatctcggctcaccacaacctctgcctcctgggttcaagcgattctcctgcctcagcctcctgagtagctgggattacaggcatgtgccatcatgcccagctgattttgtatttttagtatagatggggtttctccatgttggccaggcttgtctcgagctcctgacctcaggtgatccaccagcctcagcctcccaggtgatccgcccgccttggcctcccaaagtgctggggttacaagcgtaagccactgcacctggccaagaatcttttttttttttttgagacagagtctcgctctgtcacccaggctgaagtgcagtggcatgatctctgctcactgcaagctctgcctcccgggttcacgccattctcctgcctcagcctcccaagtagctgggactacatgtgcccgccaccatgcctggctaattgtttcgtattttcagtagagatggggtttcacagtgttagccaggatggtctcgatctcctgaccgcatgatccgcccaccttggccttccaaagtgctgtgattacaggcgtgagccaccgctccaggcccgaatcttttagtatgtttaagagctgtaactctggctgggtacagtggctcatgcctgtagtccctactctttgggaggccaaggcaggcagattgcttcagcctaggagttcaagagcagcctgggcaagatggcaaaaccaaaatactaaaattagcctggcatggtggcatgtgcctgtggtcccagctacctgggaggctgaggcaggagaatcacttgagccctagaggtggaggctgcagtgagcaccactacactccagtctgaatatcagagtgagaacctatctcaaaaaaaaaaaaaaaaaaaaaaaaaaaaaaagctctaactgtaatttacttacctcacccacttttttctcttcaattgttaggcttttgttattgatttttgggaactctttatatatttatatattaggatgactattttgttggtttcctgctatcttttctagtggaagaagatgagaatatgtcttcagagtcagtcttgggttcaagtcctaactttctctttcattatggcacttggatgaaggactctttcattctgtgcctcagtttccccatgtgtaaaatgaaattaaaagcatcctgctctcatgatgatgatggtggtgtggtctccatctttttcctgaagggccgcagcagcaaggccaagaaaccgccgggggagaatgacttcgataccatcaagctcataagcaacggtgcctacgggtgagccacccggggctctggcggggggagggtggcggaggccgggtgtctcggaggtgacggccggtcctcgctctctccccctgcagcgctgtctacctggtgcggcaccgcgacacgcggcagcgctttgccatgaaaaagatcaacaagcagaacttgatcctccgcaaccagatccagcaggcctttgtggagcgcgatatcctcaccttcgccgagaacccgtttgtggtcggcatgttctgctcctttgagactcggcgccacctctgcatggtcatggaatatgtggaaggtgtggctgcctgcggggctgcagggaagatggggccgtgctcactggtcagggctgcggggtggcctgcctgagccgcagtctccatattgattagtcggcctgtatgtttatccatctatttatttctccagtcattgatttgtccatccattctacctatatatttattcagtcatctattggtttatttgtttttcatttcattcagcataaaaacattcagtctgacccattatccatccatctatccttctatctactgatgtgctaatccatctgtttttccatccatacatccatgaacctgtttttatttatttatttatttattcatttattcatttatttattttttgagacagagtcttgctctgtcacccaggctgcagtgcagtggtgcaatctcggttcactgcaacctccgactcccaggctcaagcgattcttatgcctcagcctcccgagtagctgggattatgggcctgtgccaccattcatgggtaatttttctatttttagcagagacaggatttcgccatgtttgccaggctagtcttgaactcctgaccttaagtgatctgcctgcctgggcctcccaaagtgctgggattacaggcatgagccactgtgccaggcctattttattttatttatttatttttgagacaagatctcactctgttgctcaggctggaatgtagtggtgcgatcacagctcactgcagcctcaaatgcctgggctcaatcaattctcccacctcagcctcccaaatacctgggattataggtgcggaccaccacactcggctaatttttgggaggccaaggtggggagatcacaaggtcaggggttcaagaccagcctggccaacatggtgaaaccctgactctaccaaaaatacaaaaattagccagatggcacactcctataatcccagctactcacgtggctgaagtgggaggattgtttaaacacaggaagcagaggttgcagtaagccgagatcgtgctgctgcactccaggctaggctgagatcatgccattgcactccagccctggcaactgagcaagaccctgtcccgcaaaaaaaaaaaaaaaaaagttttttgttttttgtttttttttgttcgtttgttttgttttttatgcagtctccctgtattgcccaagttagtctccaactcctgggctcaagcaaccgtcctgcctcagccttccaaagtcctgggattacaggcacgagccaccgagcccatcccatatacctgtttattaatccacctttccatccatccctcacatcccgcaatttgtctttgtggttgtccatctgtttatccatccgtatgtctgtttaccattatacacctatttttcttttttttgggggggacggcgtcttgctctgtctcccaggctggagtgcagtggcgcaatctcagctcactgcaagctccacctcctaggttcacaccattctcctgcctcagcctcctgagtagctgggattacaggtgcccgccaccatgcccgactaattttttttgtatttttagtagagacggggtttcaccgtgttggccaggatggtctcgatctcttgacctcatgatccgcccacctcggcctcccaaagtgctgtgattacaggcgtgaaccaccacacccggcttatacacctatttttcctttttctttctttctttttttttttttttttgagacagagtcttgctctgtcaccaggctcgaatgcagtggcgctatctcggctcactgtaacctccaccttccaggttcaagtgattctcctgcctgagcctcccgagtagctgggattacaggtgtgtgccaccacacctggctaattttttgtatttttagtagaaatagggttttcaccatgttggccaggctggtctcgaactcctgacctcaggtgatcctcccacctcagcctcccaaagtgctgggattacaggcgtgagccatagcttgcggcccatatattgtttttaatccatccgtgcatgtattcacccaaatgttaatccatctattgtccaaaaccacacatgctgtggctattatgacacatacatgatccctggggcctcagctgtgcctcctccaagccttccagtcaaccatccagtcactcaacgaacacctcctcatcatctccctcgtgtcacatgctgtgctaggtgccagtgacacagaggagacccaggcacagacatctccccgccatggagattccattctggtctgtatagacagacaataaacaagcagagcaagccaaagagataaggacatttatttatttatttatttatggagtctcgctctttcacccaggctggagtgccgtggcgcaatcttggtgcacagcaacctccatctcccaggctcaaggattctcatgcctcagcctcctgagtagctgggactaaaggcgcgcctccaccatgcccagctgatttttgtatttttagtagagacaggggtttcaccaggttggccaggctggtcttgaactcctgacctcaggtgatcagcccaccttggcctcccaaagtgctgggattacaggcatgagccaccatgcccagccagggcatttcatagtgaggacatgaggtccatgaggctggaggaggtgatggggaggcaggcagggagcttctcagaggcctggattatgatggaataagtgacctgctagtacaaagtctcttaggtgacaatttagatttggaggagtggcaagcaggcccatggagccgaaggcaagtgagcaagggaggggagatgaggatgaaggggcgctgatgaggagggtattccagagactggaatggcattggatttcattctgaatgcaacagaaggtcactggagcattgttgtttttttctttttctttttctctctttctttctttctttctttctttctttctttctttctttcttttttgagatagagtctcgttctgttgcccaggctggagtgcagtggcgcatcctcggctcactgcaacctccgcctcccgggttcaagcgattctcctgcctcaacctcctgagtagctgggattacaggtgcccgccaccacgcccacctaatttctgtatttttagtagagatggggtttcatcatgttggtcaggctggtctcaaactccacacctcatgatctgtctgcctcggcctcccaaagtgctgggattacaggagtgagccaccgtgcctgcctttttttttttttttttttgaaatggagtctcactcacgctgtcacccaggctagagtgcaatggggtgatctcggattactgcagcctccgtctccaaggttcaagtgattctcctgcctcagtctcccgagtagctaggattacaggcgtgtgccaccacatctggcaaatttttgtacttttagtagagacggattttcaccatgttggccaggctggtctcgaattcctagccttaaatgatccatcagtctcggcctcccgaagtatggggattacaggcgtgaatcactgcgcccagccttgttttgttttatttttagtgcattgtccaggctggagtgcagtggtgtgatcacagcttactgcagccttgaactcctgggctcaagcaatcctcccacctcagcctccaaaagtagctgaaactacaggcaggcaccaccatgtccagctaatggagggttttaagaagatttgatatgatcagatttatgttttaagaaaatccatttggaggcccattatagtagcttacgactgtaatcccagcacttacagtgggagaccaaggcaggcagaacacttgtggtcaagagtccaagatcaacctacccagcatggtgaaaccctgttgttgttgtttttttcttttcctttttttttttttttttgagacagagtttcgctctggctaaactcgttgcccaggctagagtgcaatgacgtgatcttggctcaccgcaacctcctcctcccgggttcaagcgattctcctgcctcagcttcttgagtagctggaattataggtatgcaccaccacacctggctatttttgtatttttagtagagatggggtttctccatgtcagccaggctggtctcgaactcccaacctcaggtgatgtgcctgcctcggcttcccaaagtgttgggattacaggcgtgagccactgtgcccggccaatgaaaccctgtttctactaaaattacaaaaattagccaggagtggcggtgcacgcctatcatcccagctactcgggaggctgaggaacaagaatctcttgaacccgggggcagtgagtgggcagaggttgcagtgagccgagatggagccactgcactctagcctgggtgacagagccagactctgactcaaaaaaaaaaaaaaaaaaaaaaagagaaaaagaaaaaaattaagaaaagataatccatttggctcttgtggagagagcagaatcaggagactaggaggtagatgactgctctagtccaggttcattgcagaggaggaggagagaagggggccaaatcagtatctctatggtgggtctgtgtgcacaatagatgtgctcaaatgcagattcctgggccccaccctcagagagtttctgaaaccagcaaaatctcgcagaaaagagaacagaaaaaagaaagaaatcattagctttcttggtcattggtgattgaaaaaccaatattaccttcaggaatggctggatgtaggtgctcaaaccattccatcaggaaactctccatctcttggctctgtactcccacatgtgggcttccttctagacaagccctcatgtagcaaggttgccatctagcagatctcagcttacattctatgagcttagcaattcttacaggaaaagagtgaaaattccaagggctaactcactggagcaacttgggttacatactgccccggttgctgcacatggaaggaaatctagcctttgtaggataaaaaggaaatagatattgagaaactgaaataccaatgccaattacagtaaatctggcagaggggcagaggcagtggccaacactttgggaagctgaggcaggaggatcctttgaacccaagagttggagaccagcttgggcaacacaatgaaactcgtttctacaaaaaacttttttttttttttttttgagacggagtcttgctctgtcacccaggctggactgcagtggtgcgatcttggatctctgcaacctctgcctcccaggttcaagccattcttctgccttagcctcccgagtagctgggattacagccgtctgccaacaagccaggctaactttagtattcttttttcagagatggggtttcaccatgttgaccaggctggtctcgaactcctgacctcaagtgatccacccgccttggcttcccaaagtgctgggatttcaggcgtgagctaccatgcccagccttgaacaattttttaaaaatcagctgggcatggtggctcacatctgtagtcccagctactcaggaggctgaagcaggaggattgcttgagctgggaggttgaggatgcagtgagctgtgatcttgccaccgcactctagactgggcaatggagtaagaccctgtctcaaaaaaaaaaaaaaaaaatctagtgaagaccaagaatctgcatctaaggcttccagctccaaggttcagacaccaggagatagagggctgtgcttccagatgcagttgataagtgggtagcctttgttccccaactaaacctcacctctaccaacaactgcctgcatgacccatcctttctttgagtctccatccctttgtgtataagatgagctgatgacaccaactttggaggatggctaagaggacaagaagaacccagtagaggacctggagggagggaggcccctctcagagcctcagtttcccttatctataaaacgggtacaacataacatgagaagttggtgctatggtgcatgtccagagagaggaatgcctccctttttatgcgggcccatttcctggcctgcaggcggcgactgtgccaccctgctgaagaatattggagcgctgcccgtagagatggcccgcatgtactttgctgagacggtgctagccctggagtatttgcacaactatggcatcgtgcaccgcgacctcaagcctgacaagtgagctttgatctttcccatcactccctctgtccctcgggaggccaggaggcagaatggacgggcctcatccctgagatccccacctgtgcctacagcctccttatcacctccatgggtcacatcaagctcacagatttcggcctctccaagatggggctcatgagcctcaccaccaacttatatgaaggccacatcgagaaggacgcccgagagttcctggacaaacaggtgtgtgtgcgggcatgggggtcgctgagggtggagtgaccctgcaggacctcgggaacccagggcctggtggggggcacagctctcccttgagggccctcctctggctggggcgtgggctgacagcctgcccccaggtgtgtgggaccccagagtacatcgcgcccgaggtcatcctgcgtcaaggctacggcaagccagtggactggtgggctatggggatcatcctctacgagttcctggtgggctgtgtgcccttcttcggagacacaccagaggagctatttggacaggtcatcagtggtacgtggcttggcagtgtacaggggcagagtgtggtgtgcacggagagatggacaggctcagggttccagggatttcaaaagcgaccccccagaggatcgcttgcactcaggaggtcaaggctgcagtgagccatgatcgtgccactgcactccagctgggtgacacagtgagatcctgtgtccaaacaacaacaacaacaaaaaccgcccctaagttccgttttgttttgcagatgacatcctgtggcccgagggggatgaggccctacctacggaggcccaactcctcatatccagcctcctgcagaccaaccctctggtcaggcttggggcaggtaagtccgccatgcagaggagctgagggcccactgatagagagcaggcctccaaaaccccaggcccagcctgtgctgtggccccggggcggaagacatggggggcggggctgggctgctgggttggccatcagctgtggctggaatcccttccgtcccaggcggcgcttttgaggtgaagcagcacagtttctttcgagacctggactggacagggctgctgaggcagaaggccgagttcatcccccacctagagtcggaagatgacactagctactttgacagtgagctgggacaccaggcacgacctgggtcgaggggtgggatccgggaagagggaccctggggtaagtaaagcctgggatagggcctggctaagtaccaagatgtgatgcctaggtgcgaaggtggtattttggtgggggcggggccaagtggggcggggctgacatacaggcggggctcaggctgaaatgtaggtaagaacctgagattgggctaggtgtggggcctggcctgggtgagttgtgagtgtgggcctggaactgaactagagagaggtactagcgctcagaatggcctggggtgatgccagggtgcagagcactgtaggtggagcgtggcctctttggaggcggggctagacggtgccactgagaatggggcaaggaccttgcctgggagcggagcctaaattaaatacactaatgaggcaggggcgtggcctgacctgaagacttgtaaacccgtcttgaaccaggactgggctcctgtggggatgtgatatgaggaggaaccccgtaccctcagtcacagcccatacccgctccccagcccgctcagacaggtatcaccacgtgaactcctatgacgaggatgacacgacggaggaggagcccgtggaaatccgccagttctcttcctgctctccgcgcttcagcaaggtgggccaagtctgggtgtgggacagggcgagaccccaggagggatggggcttggagagacagtgagaaacaggttccctggtgcccaaggtctcaggagcgggaagttattgatggggcgggagtctggaaggtggtaaggccacgcaagaggcaggttcgggagtctatgggacgggcctttggcactgagtggaatctaacaggaatcaggacagttgtgcagattgaggccatggtggggcggggctaggtgtgggtggggcggggtcaggacgtgggaatgaggccagcagcgaaggcggagtaaagcccagcgaagtcttgcttttatttatttatttttattttttctaataacgggcagagaagccataggccttgctttgagaagcaacttgtagaggcgtgcagggcctagcctgggctaaggagacataaattaagggggttgctgggaagatggggctgtgtagagagcagattggtcagggcatcgtcggggcagagcctagaataaaacgcagtgcctaactttgtggtgtggggcctgaactgaagaattgtaggttgggggatcatgcacaattgggcggagcaggcctcggagggtggagtgcgttttgcgggggatccactgccaggaagctgattagctccggagtgaaagtggaacccgggctggacttgcctcccaccaccacctacaggtgtatagcagcatggagcagctgtcgcagcacgagcccaagaccccagtagcagctgcagggagcagcaagcgggagccgagcaccaagggccccgaggagaaggtggccggcaagcgggaggggctgggcggcctgaccctgcgtgagaagacctggagagggggctctccggagatgtgagcaggggaatggcggagtttgggggcggggtcgaagggggcgtgtcttccataaccacgccccctccatgcagcaagcgattctccgcgtccgaggccagtttcctggagggagaggccagtccccctttgggcgcccgccgccgtttctcggcgctgctggagcccagccgcttcagcgccccccaagaggacgaggatgaggcccggctgcgcaggcctccccggcccagctccgaccccgcgggatccctggatgcacgggcccccaaagaggagactcaaggggaaggcacctccagcgccggggactccgaggccagtgagtgccctatcgtgctgccttccccaatcttccccaatgtcctactggtcatatagtgagcatcccacgagcctggtgctgtttatgaaagatctcaggtcctattcacattgcaatttgggatttttttttttttttttttttttgagacagagtctcactccatcacccaggatggagtgcagtggcgtgatctcggctcactgcaacctccacctcccaagttcaagtggttctcgcacctcagcctcccgagtagctgggattacaggcgcgcgccactacccccggctaatttttgtatttttagtagagacagggtttcttcatgttggcaaggctggtctcgaactcctgacctcaagtgatctgccttccttggcctaccaaagtgctggggttacagtcgtgagccaccacacccagcccaatttgggattcttaacattagaaacaccccaataccatggtcagtcagtgatacagaccgatacagactatgtctctatatgaggagcagtgaggcatgcaggttacctgctcagatgaaactcaccatccatcaagggtaaaaagtggaaagagcattccaggcagggaaacagtatgtgggaaatccctggccttggactaattcctaacacacttgctttctgttgcagctgaccgtccacgcccaggtgacctctgcccaccctcgaaggatggggatgcatcaggcccaagggctaccaatgacttggttctgcgccgggcgcggcaccagcagatgtcaggggatgtggcagtagagaagaggccttctcgaactgggggcaaagtcatcaaatcagcctcagccactgccttatctgtcatgattcctgcaggtaatgctgggccccacctggcaggggaggggctgccccccatttgaggcaggacagaccaatgaaaatgctgcattttccctgtccaccgtgattggctccaggctggaccaatgagaggctgctctgccactgccttgggaggagggaggagcagatacagggagatgtctatcttcttggttctgatttctgaccatggttgtgtgtctgtagtggacccacatggaagttcaccccttgctagtcccatgtctccacgatctctgtcctccaacccatcctcacgggactcctcacccagccgggactactcaccagctgtcagtgggctccgctcccccatcaccatccagcgctcgggcaagaagtatggcttcacactgcgtgccatccgtgtctacatgggtgacacggatgtctatagtgtccaccacattgtctgggtgagtactcatgggtggagtctccatcacagagtggagggtggtggggaaaaggcccctccagctcaaaccagttagcctgggtgagacacctctgtgaccctctatgcctcttccctctctaaacctgtttcttttttcttttacttttttattttaggcggagactcactgtgtcgccaggccggagtgcagtggcaggatctcggctcactgcaacctctgcctcctgagttcaagccattctcctgcctcaaccttctgagtagctgggactacagacaggcgcgcgccaccacgcccagctaatttttgtatttttagtagagacggggtttcaccatgttggctaggatggtctcaatctcttgacctcgtgattcacccacctcggcctctcaaactgctgggattacaggcgtgagccacggtgcctggccgagactgtttcttcatctgcaaaatggggagaataggccaggcgcagtggctcaggcctgtaatcccagcactttgggaggctgaggtgggcagatcactggaggtcaggagtttgagactagcctggccaatatggtgaaaccctgtctctattaaaaatacaaaaattgggccgagcgcggtggctgtaatcccggcactttgggaggccgaggagggtggatcatgaggtcaggagatcgagaccatcctggctaacatggtgaaaccccctctctactaaaaatacaaaaaattagctgggcatggtggtgggcgcctgtagtcccagctacttgggaggctgaggcaggagaatcgcttgaacccgggaggcggagcttgcagtgagccgagattgcgccactgcactttagcctgggcgacagagcaagacaccatctcaaaaaaaaaaaaaaaaaaaaaaaaaatggccaggcgcggtggctcacgcctgtaatcccggcactttgggaggccgaggtgggtggatcacgaggttaggagtttgagatcagcctgaccaacatggtgaaaccccatctctactaaaaatacaaaaaaaattagccaggcgtggtggcagatgcctgtaatcccagctactcaggaggctgagacaggataatcgcgtgaacccgggaggcggagcttgcagtgagccgacatcgcgccactgcactccagcctgggtgacagagcgagagactccgtctcaaaaaaaaaaaaaaaaaaaattagccggaggtagtggcgcatgcctataatcccagctacttgggaggctgagggaggagaatcgcttgaacctgggaggcgggtgttgttgcagtgagccaggattgcgccacagcactccagcctgggtgacagagtgagactccgtccaaaaaaaaaaaaaaaatgtggggggaggaataataactatttcacaaggtgttatgaggattctaatgcatgcagagctaagtgtcctgcatataagtttaggagctttccttgttaccaatcccactaaccctgtccctatggggtgctcttttcccagcatgtggaggaaggaggcccagcccaggaggcaggactctgtgctggggacctcatcacccacgtgaatggggagcctgtgcatggcatggtgcatcctgaggtcgtggagctgatccttaaggtgagtgcagggaaggaggcaccctgggcggagggtgggggaggcctgagcagcccctagcagagcattttcccgcattcttcccccagagtggcaacaaggtagcagtgaccacaacgcccttcgaaaatacctctatccgcattggtcccgcaaggcgcagcagctacaaggctaaaatggctcggaggaacaagcgaccctccgccaaggagggccaggagaggtgggcacagccgtaaacagcctggtctttgagcagtgggtggaacttaggcgggaggggcacagatgaggatggagaagggaagagcacgggaaaggtggcgggaacaaatgaccaacaagcaaagggaagaggacaattaagaggggctgcgggctgggcgcggtggctcacgcctgtaaccccagcactttgggaggccgaggcgggcagatcacgaggtcaggagtttgagaccagcctggccaatatggtgaaaccccatctctactaaaaatacaaaaattagcctggcatggtggcgctcgcctgcagtcccagctacttaggaagctgaggcagaagaatcccttgaacccgggaggtggatgttgcagtgagccaagattgtgccactgcactccaacctgggcaacagagtgagactccatctcaaacaaacaaacaaacaaacaaacaaaaaaagaggggctgggatgagtcacacctgtaatcacagcactttgggaggctgaggcagaaggatcacttgagcccaggagtcaagattaggggcaacatagagagaccccatctctacaaaaaacttaaaaaactagttgggtttggtggcacacacctgtggtctcagctactcggaggctgaagtgggaggattgcttgagcctgggaggtcgaggctgcagtgagctatgatctcaccactgcagtccagctgtgacaacagagctagactctttcaaaaaaaaaaaaaaaaaaaaaaaagaggggctgtaaaagtggaaggagccaagaatggaagctgtgccaaatttctaggatcagagaaaagcattgtaggagggtcttgcacatataggcaggcccaggagatgtgaactggaaagggagatgtccagagacggagggggtccaggagatggtcctatcctgttagatgtgtttagacagaactgggaaaggctagaataagaaatgtctatctggaatgagcatgccaggcaaggttcagccaactgaaatcctattttcccttatagataggaggagctaggtgggaggtgggtggggccagaagggtattctgtttgtttgtttgtttttagtattctgttttgatcagtgagtttggcccagacaagtacagggatttgggtgagaggagccagacggggttgagataagtacatttcttcccactcttataggtgggttgtagtggaagaggcgggactagaggcaggtgggaccaagttggttttgtttggatgtgtttctagcctggactgggagtggccaaaaggttgggcaggacctgaagtgggaggagggaggagccaagcagcactgagttaagggaagttctgtcttgataggtgggttgtagtgaaagacggagggactagaggggtgggcaggactagaagaggttgtttttggccgggcgaggtggttcacacctgtaatcccagcactttgggaggccgaggtgggtggatcacctgaggtcaggagtttgagaccagcctgaccaacatggtgaaaccccatctctactaaaaatacaaaaattagctgggagtggtggctcactcctgtagtcccacctactcaggaggctactcacgaagctgaagcacggtaatcgcttgaacccgggaggtagaggttgcagtgagccgagatcgtgccattgcactccagcctgggcgacaagagcgaaacttcgtctcaaaaaaaaaaaaaaaaatggttttgtttggatgagtgtttgtagccagaattgggagtggcctaaagttgggcggggcctgaagtaggaggagctaaaggaagttctatcttgataggtggattgtagtggaagagggaggagctagagaggtgggcggggcagaacaggttggttttgtttggatgcttgtttctagcttggactaggagtggccaaagggggtgggtggggactgaagtgggaggagccaagcagcactgagctaaaggaagttctttatcttgataggtgggttgtagctggagagggaagggccagaaggggtgggtggttaccgttgtgaggccgtgaaatgggaggagccctgagctctggcgtccaggtcaaggacgcttggccccctccctgtcccgcagcaagaagcgcagctccctcttccggaagatcacgaagcagtcgaacctgctgcatactagccgctcgctgtcgtcgctgaaccgctcgctgtcatccagcgatagtctcccgggctcgcctacgcacgggctgccggcgcgctcgcccacgcacagctaccgctccacgcctgactccgcctacctaggtattacctcctgcacctgcgcggggaccgagcagcgcggggtggcctggctggtgcttgggctgtactcactcgcttcacctcctgtctcccgcaggcgcctcatcccagagcagctccccagcctcgagcacgcccaactcgcctgcgtcgtcggcgtcgcaccacattcggcccagcacgctgcacggactgtcgccaaagctccatcgccagtaccgctctgcgcgatgcaagtcggccggcaacatccctctatcgccgctggcacacacgccgtcccccacgcaggcgtcaccgccgccactgccgggccacacggtgggcagctcgcacactactcagagcttcccggccaaactgcactcatcgcctcccgtcgtgcgcccgcgccccaagagtgccgagccccctcgctcgccgctcctcaagcgcgtgcagtcggccgagaagctgggagcctctttgagtgcggacaagaagggcgcgctgcgcaaacacagcctcgaggtgggccacccggatttccgcaaggacttccatggcgagctggcgctgcatagccttgccgagtccgacggtgagacgcccccagtcgagggccttggcgcgccccggcaggtcgccgtccgccgcctgggccgacaggagtcacctttgagcctgggcgcggacccgttgctgcccgagggtgcctccaggccaccagtgtcgagcaaggagaaggaatccccggggggcgccgaggcgtgcaccccaccccgcgcgacgacccccggtggccggaccctggagcgggacgtcggctgcacgcggcatcagagcgtgcagacggaggatggcactggcgggatggccagggctgtggccaaggcggcgctgagcccggtgcaggaacacgagacaggccggcgcagcagctctggcgaggcgggcacacccctggtacccattgtcgtagagcctgcgcggcccggggctaaggctgtggtgcctcagcctctgggcgcggactccaaggggttgcaggaacccgcacccctggcgccttccgtgcccgaggccccccggggccgggagcgctgggtgttggaggtggtggaggagcgcaccacgctgagcggtcctcgctccaagcccgcctccccaaagctctccccggagccccagacaccctccctagccccagcgaagtgcagtgcacccagcagtgcagtgaccccagtcccacccgcatccctcttgggctcaggcaccaagcctcaagtggggctgacctcccggtgccctgctgaagctgtgcccccagcaggcctgaccaaaaaaggagtgtccagtcccgcacccccgggaccatagccaagggggtcatcggccccgcgctgtacagcctccgtatacatatgtacacatataaataaagtgcgtccgtgctgcgtgagttttctggggctcactcctctccaggcaaggcgagacatcacacgaccccacccccatgcccaggtgctttttgggaggtgggactccagttctggttaccatggagagtggagggaattttggatagacacctcctgtggtcccacttctggtctcacctctgcaccaactgcccccaaacctttagggggagaattgaagctgcgatgctcttgtgtcccagcgcccacctgaagagaaggttaacagcctcgtccaccaatttccatttatttactcctcaacaatcctgatggcaggtattatgtttcccattttgcagacaggtagactgtgtcacagagcggttaaggcacacaatcaaggtcatacagctaggaaggggatgaactgggattcaaaatcaagtccaaactggttcctgagcccttagattttttattttttatttttttgacacagagtctcattctgtcacccaggctgaagtgccgtggtgttagctcagctcatgacaacctctgcctcccgagttcaagcgattctcctgcctcagcctcccgaggagctaggaccacagacgcgtgccaccatgtctggctaatttttaaatatttttaatggatatggggtttcaccatgttggccaggctggtctcgaactcctgacctcaagtgatctgcccatctcagcctcccaaagtgctggggttacagatgtgagccactgcacccacccgtcccccgccccccctttttttttgaaacagagtcttgctatgtgacccaggttggcgtaatcatagttcactgtgaccatgatctccctggttcaatcgatcctctggcttcagtggctgggactacaggcatttatcaccgtgcctggctaactttttttaagttctagtagagatgtggtctcactatgtagcccaggctggtctcgaattcctgagttcaagtgatcctccctccttggcttcccaaagtgctgggattacatacgtgagccactgcacctggccataagggttagatcttataagctctgctgggcttcctggccatgccattacagggctggtagttcttcaccagcggctggaaggctttccagagggctggcagctgggcacacagtgtgcccccaccccgttgctcctctccctggttccgattcatgtcacccacgcaggtccagggcccttttggggacacgcaccatttggagtggtcctctgtgctgttgaagcttgggccggctggtccagggaaagctatctggttcacattcagaacctgccagatatccgagcagttagagggcaggatgcctacagttttgtgccagaactggacctgcaggttggtaccaagggctgctgccaaccagccggagtacaggtctgcaaaggatggagagagggcacaggtagggtcagggccactgcgagggagtccctagtccacttcccctctctcagctcagtttccatatttccttttttttttttttttttgacatggagtcttgctctgtcgcccaggctagagtgcattggtgcaatctaggctcattgcaacctctgcctccgaggttcaagtgattctcctgcctcagccttctgagtagctgggactacaggcatgcacaaccatacccggctaattttttaataaagaggggtttcaccatattgaccaggctggtctcaaactcctgatctcaagcaatccgcccacctcggtcttccaaaatgctgggactacaggtgtgtgtcaccgcgccctgccacagtttccatatttctgagctcagttgtcaattcccagtcctgggaatgatgacattaatattaattgcccttcccaaatttgtttttgagacagagtctcactctgtcgcccaggctggagtgcagtggtgtaatctcggcacactgcaacctctgcctcctggtttcaagcgattctcatgcctcagcctcctgagtagctgggattacaggtgcccgccaccacacccggctaatttttgtacttttagtagagatggggttccaccatgttggccaggctgttctcaaactcctgaccgtgtaatcagccagcgccctccaccatgcccagataatttttgtacttttagtagagatggagtttcaccatgttggccagactggtcttgaactcctgggctcaagtgacccacccgccttggtctcccaaaatgtggggattacaggtgagccaccgcgtccggccctgagtgtttttaattaattaacttatttattttgagactgggtctcattttgacaccccagctggagtgcagtggcaggatcatgactcacttgcagcctcgacctcctgggctcaagctgttctcccacctcagcctcctgagtagtggggactacacgtgtgtgccactatgccccactaattaaaattttttttgtagagatggggtcccgctgtgttgcccaggctggtctcaaactcctgggctcaagcaatcctcctgcctcgactgggattacaggtgtgagccactgtgcctggcctatttatttgtatttatttatttatttatttattttgagacacagtctcactctgtcacccaggctggagtgcagtggcactatcttgactcactgcaagctccaccttccgggttcacgccattctcctgcctcagcctcccgagtaactgggactacaggtgcccgccaccatgcctggctaatttttgcacttttagtagagacagggtttcaccgtgttagccaggatggtctcgatctcctgagctcgtgatctgcccacctcagcctcccaaagtgctgggattacaggcatgagccactgtgcccagcctatttatttatttttaaataaagacagggtcttgctctgtcacccaggctggagtgcagtggagtcattatagctcactgcagtctgaaactctgggctcaatttatcctcctgcctcagcctcccaagttgcttggctaatttttaattttgtagagatgaggtcttgctatgtttcccaggcttgtcttggatgcctgtcttcaaatgatcctcctgcctcagcctcctaagtaactgggattacaggagtgaggcaccacctctggcacccaaatgacttacaggtaccacttcattcacaattttttaagtagatgtcagtatccccatttttcagatgagtagaccaaggctcaggtgaagttatacatcacacagcaaaacccagggtttgaacccaggtctgttcactgatcatgtgattatagctcccaaacagacctggtctctaccgctgacttgaactcagccatggccacaccagtcaccctgtctgcagagaaggagctctccaaccctcaaccttgagactcaccatctccaaatttgctgaacttggcaaagctctggaaaacagccccggcctgggatgtgagtgtgatgctgctgttccagggttcttggctaacgtggtggcccttgaccacattctccaagtcggggaattcctgggcaaagatcccttccagctggtagttatagacccaggggtaggtgtaggtcagctgcttgcctggaggacaaggggaggaggaaatgcaagatcgttccaggttctggtcagtaaacccaggactcatcctgtgtccctgactcgacttacccatcttcgagaactgagcgaagggaaaagacacacagagcagggtctgcccgtaggtacaggcgctatgaggccagctgtatgcagcagaggaggccggtggagggaagttaggtacactgtggaccagccagaagcccccatcgtggtcaaggagcaggacacctggaccaaaagaaggcattaggggaggtcgggcgcagtggctcacgcctgtaatcccagcactttgggagaccgagacacacagatcacctgaggtcaggagttagaaatcagcctggccaacatggcgaaaccccatctctactaaaaatacaaaaattagctgagcgtggtggtggacgcctgtaatcccagctactcaggaggctgaggcaggagaatcgcttgaacccaggaggtggaggttgcagtgagctgagatccaccactgcactccagcctgggccacagagcaaaatttcatctcaaacataagtaagtaagtaagtaaataaataaataaataaataaataaataaaaatttaaaaaaagaaggcaggccccacgcagtgtaatcccagcactttgggaagccgaggagggcggatcacctgaggtcgggagttcaagaccagcctggccaacatggagaaacctcatcactactaaaaatacaacattagccgggcatggtggtgcatgcctgtaatcccagctactcgggaggctgatgcaggagaatcacttgaacccaggaggcggaggttgcagtgagccgagattgcaccattgcactccagcctgggtagcaagagcaaaactccttctcaaaaaaaaaaaaaaaaaaaaggcaattagagggtattgctccaggcctcccagcaagctcatctgcaatcaggaacaccctcagtttgcagcggggcttagagagggtgccagcagtgttagaaccacagctgagctcagtttttgcaggcataaattcttatagtccagaataacgccaagagtaatgtaaggtagggaaacaggccaggtgtggcggctcatgccggtaatcgcagcacattaagaggccaaggtgggtggattgcttgaaccaggacttagagaccagcctaggcaacatggcaaaagcccactctacaaaaatacaaaaagtaggccaggtgtggtggctcacgcctgtaatcccagcactttgggaggccaaggcaggtggatcacctgaggtcaggagttcaatatcagcctgtccaacctggtaaaaccccatctctactaaaacatacaacatttagctgggcatggtggcgcacacctgtaatcccagctactccagaggctgaggcagaagaatcgcttgaactggggagatggagattgcagtgagctgagattgcaccaccgaactccagcctgggtgatggagagagagtgccgcaaaaaaaaaaaaaaaaaaaaaagccaggcgtggtggggggtaccggcaggcccagtacttgggaggctgaggtaggaggatcacctgagccctgggaggtcaaggctgcagtgagctgtgatactgcactccagcctaggtgactgggtgagaccttgtctaaaagaaaataaaataggggaaatagatgcccaaggtctgacaggggagatctcccaccccactatggaggtcaggggttagcttggaaaaatgcataggaactcggctgggcagggtggctcattcctgtaatcccagcactttgggaggccaaggcgggtagatcacttgaggtagaaaccaggagttcgagaccagcctggccaacatggtgaaacctcgtctgtactaaaaatatgaaaattagcctggtgtgatggtgcgcctttaataccagctacttgggaggctgagacaggagaattgcttcaaccccagaggcagagattgcagtgagccaagattgtgccactgcactccagcttgggtgacagagcgaactcccaccgtctcaaaaacaaagaaaaaaaaaagttggggggaatagatgcccagggtctgacagtgcagatctccccgaccaccccatgcacgtcaggggttaccttggaaaaatgggacccgagtctctccccagcccccaatccaggcctcacccttcgtgtgcccacgcatggaagagtcctgagccttgctgggttgaggcggttggtcattgtagagcaggaaggcgagctgcgggcggataaacggaggcaacgtgaaattcctcccaggcagggcagccctagagtttcgcccctagttggcccggggcccccttcacctggctggtgttgctccggtacagcggctgcaggcttcggcccacggccccctccgggctgttgatgagtgccctgccgtcccgccagcctccggagctctcgtccagatacttgtactgcagccctctctgcgccgcctccccggaccctctaagagctggcagcttgtagaccacgaacctggaggtcggagaatgcacagaaataggagagagggaagagaaggcaccccagggttccccgaggaggtagccatcccggttgagtgaccgcagccggaccccggggcgatggtaggccccccgctgcgcactcaccagtctacaggctgcccggagtccccgtagcaggtcagggccccggcggggacgcacagcagcgctgccagcagcagcgggatcatagctgctatggggctgagatccaggaatctgtgtcgggactgcggggcgctgggttacatcagaggccaggactggcacctggcgcctttcacttccctaaacttgcctgggaaccggggcggggacatcacgagggtacagactcctcccccgagacgcgatgctgcgttttggagaggcaaaaggcaacgctgagtctgcccagaccacgcccacgacgggcccggcgctccagcgtctcctggagcctggccaccgttccttttcgtggtagctaatcccagcccacgctcttctgtctgacccaactcccgcccgggtttctggatcaggcacaagtttgtattttattttttattccagccctacaacctgggtccaactcttgggacctttgttcttcctcttttttttttttttttttttttttttttttttgagacggagtttcactcttgtcgcccaggctggagtgcaatggcacgatctcggttcactgcaacctccgccttcctgattaaagcgattatcctgcctcagcctcccgagtagctgggattacaggcgcccgacaccacgcccggctaatttttgtagttttagtagagacggggtttttccatgttgactaggctggtctcgaactcctgacctcgtgatccaccagcctcggcccccgaaagtgccaagattgcagaagtgagccactgcgccccttaagaagcatttgtgttccagtgtatcttcccctttttctttctttttttttttccttccttttttttttttttttttcccggacaatatctcgctctgttgcccaggccggagtgcagtggcgcaatcttggctcactgcaacctctgcctccccagctcaagtgatcctctcacctcagcctcccgagtagctgggatcacgggcacatgccactatgcccagctaatttttgtagttttttttttgaaacacggtttcaccatgtggctcaggctgaactcctgagctcaagggatccacctgtcttgcctcccaaagtgctgggattacaggcatgtaatccacgccacccagactctcctttttcattctgcacgttttctccaggatcccctgagctagcaaagaggtgactgtatgtttgttttttgtcgttttgagacaggataatggtttctcacccaggctagaatgcagtgactccatcacagttcactgcagcctcaacctactgggctcaagagatcttcccaggtagctggtactacaggcctgtgccaccacacccagataattgttcattgcagagatgagggtctcactatgttgcccaggctgctctggaactccggggttcaagtgattctcccacctcagcctcaaaggatcatggcagggcaaagggctatgggaatctgagtactggcttgaaactgcctttgcaaaaattatgacagaaaattatgtcagtgaaagagctctgacctaaccaactccatcttgcctttaatctccaaactgcccttgcttggtcattcctggagtggggtcaagctaactttttttttttttttgacacgttgtctcactctgtcgcccaggctggagtccagtggtgtgatctcagctcactgcaacatccgcctcctaggttcaagcaatcctcctgcctcagcttcctgagtagctgggattacaggcatgcgccacatgcccagctaatttttgtatttttggtagagactgggtttcaccatttttggtagagatggggtttcaccttggggctcaggctggtgtcgaactcctgggctcaagtgatctgcccgcctcagcctgccaaattgctgggattaaagagggagccaccatgcctggccccaagctaattttgggaggaatttagtttatagcttaaatgataatagcccttccccaaactaaactgcctttgtagaaataatgaaagggcactaggttaggaggatgagaggagcctgaattctgctaaactgtaggtgtagtagttaaattatgaccagccatttttccggccgggtgcggtgcctcacgcctgtaatcccagcactttgagaggccgaggctggcagattacctgaggtcaggatttcgaaaccagcctggccagcatttcgaaaccccatctcttctaaaaatacaaaaattagcccggcatggtggcatgtgcctgtaatcctagctacctggtaggctgacacaggagaatcacttgaacccaggaggcagaggttgcagtgagccaagatggaacaactgcactccagcctgggcaagagcaagactccatctcaaaaacaaaaacaaagatggccagccattattctggaggtcacaaggtttgcaacttccccagttatttctgcaaataacatgactattgcaaaacctaacgctggcctttttagatgtctttttaggctttttgcatatctgacaactggatgactccacccagactagcgactctatggtccccacccagaagctgactcagcaactgttttccacagctccaggattgcagcaaggcacccattccctagccctcctgcccaccaaactgttcttgaataaccctagcctctgaattttcagggaggctgattcaagtaataaaactcccatctcccatttagctggatgtatgtggattaaactctctctattgcaatccctctgtctcgataaattggctctatctggacagtgggcaagatgaaccccctgggcagtcataggctgtgaactcttaaatccagggagatgtttgctgtcaatgtccgcagggttcaaggcagaagacaaggacagtgtagcctgaactgggtgggaaaagagaggacagcaaggcctccagtgcccaagggggcttgttggagttgaggggtgtcactgtagtttaggagatgagggtgtgtaaggccctctaatatgacctctaggtttacagcctcctgccatcttccagcctccaaaacccaaaaattcaggccaacgctgaagctttatctgggaggggcatttttataggacccataaccattgacagttaatatcagccacaataagggaccttcaggagccgctttctagacccagggtctctgggaagcctcatcccacaccctctcctgctgtccagggccatctgggagctggtctgagtgtccactgagtccgtttatttggcggtctgtctcactgggtttgcacgacagtttggacatctctgtgtggctccctgtggctgaaggcttgtcggattttccgtaagaggctcccccagggctgtctatgggtccgtgtttgatatttgggtggatctttgggaacgcgagtccaggagagggtccattcgtgggaaaaccacccagcattgtgtcacgcgcgtccgtgtgaagagaccaccaaacaggcttcttgtcccatccccagtcactaggagagtccaagtgccagggcagggctcaaaggtggcgcttcatgtgcaaggccaggtggtcagagcgcgaaaaagcacgtgggcagagctggcagcggaaggggcgctgccccgtgtgtttccggtagtggcgggtcagctcgtccgagcgcgcgaatctccagccgcagccttcccacgtgcaggcgtatggcttctcccctaggggacaaggaagccataagcgccactgtctgcccagtcatgtccccgggtcccctgcatctggccacacccctttactcagcctgggctgggactaggatgaacaaagtgaggcccctagggcacaaaatttaaggaggcactcactctcagaggccagccaagtccaagtcccgccctctgcaacccttcttcccctgtaactacagcgggcgccgcgccctttctcatgtccggggccccgccccctcacctgtgtgcgtgcgcagatgcgccttcaggtgggagctcttggtgtagctcttgccgcaacccgggtgcgcgcacgtgtgcgctgcctgcctcttgcgcgcccacgaacgtcggcctcgcttggatggcgcggtctcggctatcacacctggatcctctgcagtccccccgagtccagtgcccaccgtcccgggtcccaaacaactcaggaaggagggggacgtggcgggaccgggcgcgggtccctggagcccgcggaagagctggaagtgcccttggtactgaggcgccgggtacatcgcggggtacccggacagtagcccgtagggggcgcccgacgccgcaggcactgaaagcccggtccgcgggaagtagccacccgaggagccggcgccgggccccgggtacaccggttgcagcgccagcgccttgggctcgggggccggggctggagccagggctgggcccacgaaggcgtcgggagcccgggctcgcagggcagggcgcacccaacccgagtgatcctccgaacccaaaagcccagccaccagccccgggccgccagcatatgcgcccagagtctcgggcggcggcggatattgcgccccggaggcctcgctgggcgccagagcgcaggtctggggcgcgccaccgggctccgggcccgagaagttggtgaggaggagatccaggtcccaggtggcgtccgcgcccctctcatcgtcctcttcctccccgggctggtcctcagacttcacgtggaggggcggctccgtggggtcaggaggacccgggcccatgtcctgcgcctcttcggagcgccaccactgcgggagggagcaggcagctcgaggttcggtggacactggggtgccctgcccagggacatcgcgggctggacactctgacgcagaggctttggaaaggggtcttgtttgcctgtctgtctgtcccacttccccaacactgcccctctaaccgcccctctccccgctccccccccagctccagggacagaaaccgatcaggtctggctggagacaggagataagacttccactatctggaaccacactcggggatgggggaaggggtagcagagctgctggagatggaaaactggcaggggacgggggagaggatgccagccttgacttagttttcccccagaacatccctctccttccctgtctcccaaaacaagattaattccgaaattttggatgtcccccagacacactcatcatttcccgctgatatctggaagattgtctgtgagcctagatctcgttcctttttttttttttttttcttgagatagggtcttactcttttgcccaggctggagtgcagtggtgcagctcactgtatccttaatctcctgggctctaatgatcctcctgcatcagcctacggagtacctgggactacaggcacacgcccccatgcctggcctaatgtttttggtattttttgtagagatagggtttcaccatgttgcccaggctaccttcgttttctattaccgaaatagatcacacttagaacctcaaacccctagaccaccctcctcaccccctgccagactaagctgagatctcctctcctggactgagcgtacctcagtcctggttaagtctcttgatttcaggtcaagatgcaggtctggaccccaagatctgtgactgtggccctggattccagccagcccacctagaccccaccttctaggccccaccttgaggaagtcatcctgtgtgtccgggaaggggcccagggcggtcagtgtgctgatggagggcaaggcggtctcggctgtggccatggctggctggtgcccaccctgggcctcaagcctcctcttcctcggctgcctcgtgaactctgaggctgtgatagccccttcgagggctcctctctgtccttagctgattggctgcagcctctgataaggcaaagcaaggcaaggcggcgggggggcactgtttctggggcacaaacttcacgttggcctgtctggggctggggttaaagactaaccctgtgtccaaagccaagtcaaatatcaagggttggggggttcagggtttgagggtccaggtgctgggtaaaaacagacattgggtctccaaagaaggagagacttgggggtcttccctcagttaactttcctggaaaaggcagaaagggtattctgggaagaagctgtgggaccccctgtccccctgattgaggctccacagccctccccctccccagtaaacagcaacaaccgtgctgatggcgggacttggcacgagctccccgccaagcattatcagacaccccagacgttggaggctgctatcaggtgggggcccaggccagctagagctctgtcctccggtgaaggggagggctgggagttgggtcttcaaattagcctggcgttcaatttgcctgggttgggacctcccagggtctcagccctgcagcaggaggaagcccctgacaactggcccaccattgtctactggggacccttgggtggcactgcatgggactgcatggaggctggttcagtgccagctgctttagtgcgatgggggcagccaagggaaaagtgaccctctctcctcctgggtgggataggaccgttggatcaagccacaggcagtacctgacctgcaggagaccagtgccctggctctgggcctggctgctccttgattctgcccaacatgaggagaggatctgagtttctacaacaggaacctccactctggtgccctgggagcctgggaaggggacatggatacgtattacagacacataactcatagtcactcattggaagactgaggcaggaggatcacttgacaccaggatttcaagaccagcctgggcaacataaaacctatctctccaacaaaaagctgtgagtggtggtgcatgcccatagtcccagctactcaggaggctgaggtgggaggattgcctgagcccaggaggtcgggactgcactgaactataatcacaccactgcagtccagcctggggcacagaaagcaagactctgtcgctggaaaaaaaaaaaagttgggtggccatctttattcctggcagatcaacctgggtgacacaaacaaaaacaaggccaggtgcggtggttcacacctgtaaccccagcactttgggaagccaaggtggggagatcacttgaggtcaggagttcgagaccagactggccaacaggatgaagccctctctctgctaaaaatacaaaaattagctgggcattgtggcacatgcttgtaatcccagctatttgggaggctgagctggagaactggttgaaacttggaggcatggggccaggcgcagtagctcacgctagtaatcccagcactttgggaggccgaggcaggcagatcacctgaggccaggagttcgagacaaacctggccaacacagtgaaaccctgtctactaaaaatataaaaataggccggggatggtggcatacacctctaatcccaggtacccgggaggctgaggcacaagaatcacttgagcctgggaggcagaggttgcagtgagccaagatcatgccactgcactccagcctgggctacagagtgagattctgtctctaaaaaacaaaaacaaaacaggcttggagcagtgagtagtggctcatgcctgcagtcccagcactttgggaggccaaggtaggaggaatgctcgagcccaggagttcaagaccagcttgggcaacatagcgagatcccatctctaaaaacaaaaacaaaaacacagttactcacaggaccatgcaattacataatgacatgagttcctgttccctcagtcacactgatcatataatccgtgcacatataattgtgtgtctgtctatgtatatggactatgcacagacatacaattcccaggcactaaaacacaaccctatgctatattggttacacaatgtcatagccaaacaatctctaaaacacagaattcataatccacaggcaggcacacagttatacaatcctactgacacaatttagccgtaattgagcagacacacatggggagtcagatacattgtcacagaactttttttttttagatagtgtctctctctgtcacccaggctggagtgcagtggcatgattttggctcactgcaacctccacctcctaggctcaagtgattcctctgcctcagcctcccaagtagctgggattacaggtgcctgctaccacgccacgctaattttttttttttttttttttttgagacagagtttcactcttgttgcccaggctggagtgcaatggcatgatctcagctcactgcaacctctgcctcctgggttcaagtgattctcctgcctcagcctcccgagttgctgggattacaggcacccacaagcaggcctggctaatttttgtatttttagtagagatggggtttccccatgttggccaggctggtcctgacctcaggtgacccaccctccttggcctcccaaagtgctgggatgacaggcatgagccgccccagccagtcaaaacctacactttatacagtcacaccaccggtcacttttacaatatgtaaagtaattatttagtcacagttgcatagctaccagtgcccaaccgtaggggatgcacccagttaaacacagacaaacgcaaggacatggcatcacaggtcctgagaatcaagacacacacatttctcaacagatacacaatcagaatgggtgcaccacaaatgcactacacaaaaagacaaaacaggcggggcgcggtggctcacgcctgtaatcccagcactttgggaggccgaggtgggtggatcacttgaggtcaggagtttgaggccagcctggccaacatggtgaaacccgtctctattaaatataagaaaaaaggccaggcatggtggctcacacctgtaatcccagctactcaggaggctgaggcaggagaattgcttgaatccagtaggcagaggttgcagtgagccaagattgcgctactgcactccagcctgggcaacagagtgagaatccgtctcaaaaaaaaaaaaaaaaaaaaaaaattagccaggcatgatggcatgcttcagtggtcccagctacttggaggctgaggtgggaggatcgcccaggaggtggaagctgcagtgagctatgatcgcgccactgcactccagcctgagcgacagaacgagaccctgtctaaaaagaaaaaacaaaaacaaaacaaaacaaccacatagactcacagaatcacacaagttcacacacacacacacatacacagacacagacacacacacacacacacacacacacacacagagtcacaagtatctacatgtgcttcctgggacagactggcagaaaggtttgctaagatcgcccacttggagctcgtcttccccacaaccagcacccaattagagaactcgagtctggcctcctgggttcaggaggacgcctagtgctcgcgccagaatttctttgtttaattcttgactccctccgcacacaccccctgcaactgaccaaccaggagtgggccgagccctttcctacggccaataagaggagaaacccagctggccaatcggtttcccgcactcgtcttccgcccctaccccgtccgcttcttaaaggggctagcctatctctgtctgggccccccgatttccacaggcaaggctaccttagcccttttaaaaggcagagctgcggagggggccggattctaggaggaaccaatgaaaagcctcactcggcctccgctcctcccacttcttgctgaggtcaaaggcctgcgtcagttgcactgtagcctcggcagtgaaccgggaggtactaccaggtaaggaaggtgcggtagccccagccgtgggtgagaggagctccgctctgacacccccgctcctgtaggtcgccgtcgttgctccgctcgctctgagagagcatggccctgagaggcgtctccgtgcggctgctgagccgcggacccggcctgcacgtccttcgcacgtgggtctcgtcggcggcgcagaccggtcagtgtggggtcgggagtgtggagggaaggagggaggaactgggggtttagggactttccggggtgactttcccgttctgtgcttgcagagaaaggcgggagaacacagagccaactggctaagtgtaaggacctctggtcgcaccgtgtgtctgctgcccctgttcagctgtctgtctgccgcaggtggactctgtcccagaatccgagagctgcccgagcggggtggcagggtcgtggccagggtcagaggcactaaggcagtgagtgcgctgtgcctgcggggccggagaaaagtcacctgatcagtctcgcttgcagctcgcactagccggggggcgacatgggtgttggggggtagggctgatgagggtccgagaagggagggcacagtgatcttgcggactggaccgaggcgaattccccttcccagcctcgcgtcccgagtttgactggcaggacccgctggtgctggaggagcagctgaccacagatgagatcctcatcagggacaccttccgcacctactgccaggagagactcatgcctcgcatcctgttggccaatcgcaacgaaggtgggcgggctggtgggtgccctgagactgctcctccgcctggagccatagccaccccacctcaaggcccctctgtccttggggctggggcttcctgtggcctaggcctgggcctgaatttgggcactggtccctttgcagtttttcatcgggagatcatttcggagatgggggagttgggtgtgctgggccccaccatcaaaggtaggaacaagtatctctccacacactgcagaaccctctgtattctgaaagcctcttcctccttccctccctccctttcttccttccttctctttcttttcttttccttttctttcctttcttcttcccccccaacagagtctggctctgttgcccaggctggagtgcagtggcacgatcttggctcactgcaaattctgcctcccaggctcaagcgattctcctgcctccacccctctagtagctgggattacaggtatgtgccaccatgcctggctaatttttgtatttttagtagagacagggtttcactgtgttggccaggctggtctcaaactcctgacctcaggtgatccgcccacctcagcctcctaaagtgctgggattacaggcatgagccaccacgttcagccttctttttgagatggagtttcgctcttgttgtccaggctggagtgcagtgatgcaatcttggctcactgcagcctccacctcccgggtttaagtgattatcctgcctcaggctcccgagtagctgggattacaggcgtccgccaccacgcctggctaatttttgtatttttagtagaggtggggtttcaccgtgttggccaggctagtctcgaactcctgacctcaggtgatccacccgcctcagcctcctgattacaggtgtgagccaccgttgcccggcccttttcttttttttttttttttgagatggagtttcgctctgtcacccagcctggattactggattacagtggtgcgatcctggctcactgcagtttcctcctcctaggttcaagcaattctgccacctcagccttctgagtagctgggattacaggggtgcaccaccacgcccagctaatttttgtattttttagtagaaatgggatttcaccatgttggccaggctggtcttgaactcctgacctcaggtgatccacccacctcggcctcccaaagtgctgggattataaacgtgagccaccgtgcctggcccctttgtttctttttttagagacagggtctcactgtgttgcccaggctgttctcaagtgatcctcttgccttactgaaagcccccttctttccctaagccacaatttcccagtctgtaaagtggggctgttgtcccaccctctgaaagtggctgtggagatgaaatgaataaacctcagctagggccagcttggtgcctgcctccttgtgtgtccttattcagccctgtctcttgggtcttagctgggcagggccctgttctctattgtcctgctttcccctcctactaccaccaggatatggctgtgctggggtttcgtctgtggcctatgggctcctggcccgagagctggagcgggtggacagtggctacaggtcggcgatgagtgtccagtcctccctcgtcatgcaccctatctatgcctatggcagcgaggaacagcggcagaagtacctgccccagctgggtgagtggctgcccatggggcctggtggaaggaagacagtctctgaggtctggaactcaagggtggggctgtcccctgagcctattctgtccctatctcaaagatagcataagtggccacctggacccccgccagaccctgggcttcacctggagatctgatccctggccagcctgactgtccccctctgtgaccaccgtcatctccctatgctttctgtgttccccagtccagcccaaagtttaaagtccaccaggttcctgctggccatttgcagtggctcacacctataatcccagcactttgggagggtgaagtgagaagatcccttgagcccaagagttcgaaaccagcctgggcaacgtaaggagaccccatgtctattagaaaaacaaaaaaaggaaagagcctatgtgacctgcgctaagtggacgttggccctcttccgtggtgtctcggaggtgttcagctgcttcaagatgaagctgaacatctccttcccagccactggctgccagaaactcattgaagtggacgatgaacgcaaactttgtactttttatgagaagcgtatggccacagaagttgctgttgacgctctgggtgaagaatggaagggttacgtggtcggaatcagtggtgggaacaataaacaaggtttccccttgaaacagggtgtcttgacccatggccgtgtccacttgctactgagtaaggggcattcctattacagaccaaggagaactggagaaagaaagagaagatcagttcatggttgcatcgtggatgccaatctgagtgttctcaacttggttattgtaaaaaaaaggagagaagggtattcctggactgactgagactatgatgcctcgtcacctggggcccagtacagctagcagaatccgtaaacttttcagtctctctaaagaaaatgatgtctgccagtatgttgtaaaaaagcccttaaacaaagaaggtaagaaacctaggaccaaagcacccaagattcagcgccttgtcactccacatgtcctgcagcacaaacagcggcgtattgctctgaagcagccgcatattaagaaaaataaagaagaggctgcagaatatgctaaacttttggccaagagaatgaaggaggctaagaagcaccagggacaaatcgtgaagagacgcagactgtcctctctgcgagcttccacttctaagtctgaatccagtcagaaataagattttttgagtaacaaataagatcagattcgcaaaaaaaaaaaaaaacccacaaggccctgtgtgaccaggcctctgctgacctttccacctcatctctggccactcatgtgatcctcccagccagacttagctacttgaaattctccagaagtaccaccagttctttacacatctgttccctctcccagcactgctcttccccacagcctcctcctgcttaactcctcacacccttccagtttggccaactccttcctgattccctgggtccccctccccatcttggcattgtgatcatgactttggggtaacctgtctcttgaaagcagggccagatctaacttagttatgaggtctgactcaggggcgagggtaattttttttttctttttttgagacaaagtcccgctccgtcccccaggctgaagtgcagtggtacaatcttggctcactgcaacctgcggttccccagttcaagcaattcctgtgcctcggcctcccaattagctgggattgcaggtgcttgctacccgtgcctggctaatttttgtatttttagtagagatggtgtttcactatgttggccaggctggtctcgaactccagacctcaagtgatccatctgccttggcctcccaaagtgctgagattacatgtgtgagccacctcgactggcctaattttttgtatttttagtagagatggggtttcaccatattggtcaggctggattttttttcttttttgagatggagtcttgctctgttgcccaggctgtagtgcagtggcatgatcttggctcactgcaacctctcctgcccgggttcaagcgattctcctgcctcagtctcctgagtagctgggattacaggcacccaccaccacatctggctatttttttttttttttttttttaagtagagatggggtttcaccatgttggccaggctggtctggaactcctgacctcaattgatccacctgccttggcctcctaaagtgctgggatgacaggcgtgagccactgcaccccgccacgaggataatttttgagtaaggggatgtatcagggaccaggcagccttgtgactttgtcttgtgcctgcagccaagggggagctcctgggctgcttcgggctcacagagcccaacagcggaagtgaccccagcagcatggagaccagagcccactacaactcatccaacaagagctacaccctcaatgggaccaagacctggtaagggttctgggtggtgggcaggtggtgaacaggggcaaaggggcactggtcagacccctcaccgactgttccatccccaggatcacgaactcgcctatggccgatctgtttgtagtgtgggctcggtgtgaagatggctgcattcggggcttcctgctggagaaggggatgcggggtctctcggcccccaggatccagggcaagttctcgctgcgggcctcagccacaggcatgatcatcatggacggtgtggaggtgccagaggagaatgtgctccctggtgcatccagcctgggggtaagtggcagccactttgggaatgggtgttgggtcacctgcggatgcggctttgtcaggcaggctccgtgctggggacgcggctccctgtgcctgtggagcccacacagtggtgattcttactcagccggactcgctgacgtgctgaaaactgcccccatttggtgaccgtctcgctcatcccggctctgcccgggacacatgggcctgaaccagctcagtcatttgactcacagtgcatcttctggcatccgtcagcctcctggctctgagcatcgaacccagatgccaggctgggtgggactgtgtgcaaaccgagtgagcaggcaccgagcttcagtgccagggccatctgtgatgtgaaccacaacctgagtccccctgcgtggggtggctggggaggaggctttccctgcttcagagttggttctgcataggccctcttggtgtctcttgggtgggcctgaggcgccatctcaaccctacagggtcccttcggctgcctgaacaacgcccggtacggcatcgcgtggggcgtgcttggagcttcggagttctgcttgcacacagcccggcagtacgccctcgacaggtgtgtgagggctgcagtgagattctctgggggtgtggggcagcttgggtttcactctctataccatgggtgactccccagcccccacccaccaggcctgagttccttgctctggaatgaccagtgacgtccttctgagcagctgtgggctgagtcaacggcagggccagggcaagcttgggggcactgaggcagcctgggaaggcgtcctggagcagggggccccaggacagggacggggtgggagagtgggcctcccctcgctcttaccctgccattgcccatgtaggatgcagtttggtgtcccactggccaggaaccagctgattcagaagaagctggcagacatgctcactgagattaccctgggccttcacgcctgcctgcagctcggccgcttgaaggaccaggacaagtaggggctgtgtggtgggggcggggggatggcagcggtggctggaggaccttgtgtccttcctggagagaaaggtccttcctgcctggtggccctggggacctgaaccttctgctgtccctcttgtccttgatgggctgggctgaggacagccccactggtccctcattgggagcttggctgcatcagggaatccccaccccgggctaggtttgcttggagcatcgggatgccaggatccccagtccttgttaccctcatgtgccactcccagggctgcccccgagatggtttctctgctgaagaggaataactgtgggaaagccctggacatcgcccgccaggcccgagacatgctgggggggaatgggatttctgacgagtatcacgtgatccggcacgccatgaacctggaggccgtgaacacctacgaaggtaggagctggacctcagagggctcactgaggcctcagtgtctggggagggggtacagggaggtgggacggggacaggtctgagtccaactccacctatcactaagtgacagtgtgacctggggcgagccttacccctctgtccctcatctggagttactcacatggggactgtggaagtgaagtgcttcatgcagcacacagaggccccatcaggccttgcgaggggctcccagctctttctcccacatgctcgggaggagggatgttcctgagacaggtaagctccgaaggcagcccaggggtgaggcccgactcctagcaggctggtggacgcaagggagtgagcgaagctacacgcaggaatcaacgctccattttgttaagagacaaaagtcatcttcagatgacggtgtttgcaccctgtaactgatggtgatttacatgggggtccagaaccccttgcttggtgggaagacagatgtggaaaaagatacttaaaaaaaaaaaaaaagtgcaaacccagcatgcgctatgtagaaatagagggaggtatgaggaccccccgggcagagatgcttccagacagagagaacagcaaatgcaggaggggtgccttccctgcgcaccttgcaaccccagatcttgtctctatctggcatctggggggtggggggatcctacaaatgtgagaatgaccctgaggacaagcagcgggcgccatgagatggttttatgcagagaagggatgagtcagatttggtgctttaggggctcggcgcagtggctcacacctgtaatcccagcgctttgggaggctaaggcaggaggattgcttgagcccaggagttagaagttatgatgagctatgatcaccccactgcactccagcctgggtgacagagtgagaccctatctatatttaaaaaaaataggtttgtactttaggaagtaaacagaattggctctaaaaaggaggctacaatctgccttctgcttcaaggagctggggaggagcaaaggatgagacaccagggcatggggtgtgggattctctgggagaggcggcttcagatgggcagaggtcagctgaggcaagtgactgctcttccgatgtgctgtccctcctatccctcccgagggtaagaaagggcttgctgtgtttccttggagctcaggggtgctttcagcctctgtggcaaggaagcgtggccaggttgaaaatcaaacatttaataaactgtggggctgggggtggggagaacttgccaagggtggggagcacgaagcctgggcctatggcaggggctggacttgctacattttgggagttcagcacaaggagctttgggtttttgtttttttctgccaagatgcattatagaaccatgaaaaacaatttctcagtgtggcccaaatggtggcctcacagtcttctcctggagactgtcactaaggcgtgagtctcccggcagctgtcagcattcaccatctctgttggtctgtacttctgaagcagtggcctggggatacatgaaaattgattttaaagggaagttgtgagctatgaaaactccaaaccgactctgtattaatcttgtccaggtacacatgacattcacgccctgatccttgggagagctatcacgggaatccaggcgttcacggccagcaagtgagccgctccatcaggggcccgaaactctcaagcccctttctggagagatgcctggctggaccgtaggagcgctgtgctctgagcttagaaagggaggtggcggatggagtgggaagtgagagacactgatttttaaatatcaaaatttcccttctgaagtcgttcagatgtgttccttaaaaagaagatggaattctctgtagagcgtctcaatccacttttaaccatggatgagagcagactccatttaccctgaaatagcagcttctcttgagaggagagtgacatggaagcaactccgtctgctgcagctgaccccctcacactgagttcacagtgcgccctccctccctcccatctgggggtagtgccttatgctgggtgttggagcagagtgagggagaggaaaataaagacctgcacatctgaccccaaggtgtcaggccggtttactggtaaccacctgagaagtagtttcagccacagaagaaacgaacacgtctgggggctgtgagttgccgggacgtggtggggactttcccctagagtggtctggcccccatctgagtcttaggctctgctgtaaaaaagaaacccaggttagcagtgccggtctgtgccagggctgtgggcagaggggatgatttctgagtggcaggggtgcaagggactttgtcctttctgtcaccacagagctgctcatacaacagtgggacatgacaacggtttggcttctcagctcagacacaccatgttataggggatcacaaacaagatggtgagtgcaccaagggctttgcagggactgtggcctggcggggtcagggctgggtgcctggtttctgttcacatttactcttggctgggccatccctgtcctcttcctcaggcagcgccccccctgtgagtttactcatacctcaggctggagacacaggtctttgtacacagtctccacgctgtggcagacttgtttgagctctgtctccaaatggctgatctttgccattttctgggtgaactcttggagcttttcctggatgatcttgttgtggtcattataaatctgatagatcctctcctctaatttctctgtcagatccgaaacctgttaaacaataagatgtgttctcggaaaatcaaacaagaggtatcacaagacatctgtgttaagtgggtttcttagatttctgcaatttatcttatgaaaatgacaaaataggctgggcacggtggctcatgcctgtaaccccagcactttggtaggccaaggtgggtggattacttgaggccaggagttcaagaccaacctggccaacatggtgaaaacccatctctattaaaaatataaaagctaggacgggtgtggtggctcacgcctgtaatcctaacactttgggaggccgaggcgggcggatcacgaggtcaggagatcgagaccactgtgaaaccccgtctctactaaaaatacaaaaaaatttagccgggcgaggtggcgggcgcctgtagtcccagctacttgggaggctgaggcaggagaatggcgtgaacccgggcggcggagcttgcagtgagctgagatcgcgccactgcactccagcctgggctacagagcaagactccatctcaaaataaataaataaataaataaataaataaataaataaatacacaaatacataaaaactaactgggcatggtggtgtgcacctgtaatcccagctactcgggaggctgagacaggagaattgcttgaacctgggaggtggaggttgcagtgaaccaagatgatgccattgcactctaacctgggcaacaagagcaaaactccgtctcaaaaaaaaaaaaattagcaaggcataggtgacgcgcacttgcagtcccagctactcggaaggctgaggcaggaggatcacttgagcccaggagttggaggctacagtgagtcatgatcacactactgcactccagcctgagagaccctacctcaaaagaagaaaagaaaaacaccaaaaactaaaacccagtgcagtgactgggggtcagattgcctatattttaaatttttttgctttttttgttttgttttcttgcggcggagtttcgctctcattgcccaagctggagttcaatggcatgatcttggctcactgcaacctccgcctcctgggttcaagcgattctcctgcctcagcctcccgagtagctgggattacaggcgagcgccaccacacccagctaactttttgtatttttagtagaaacggggtttcaccatgttagccaggctggtctccaactcctgacctcaggagatccccaccttcagcctcccaaagtgctgggattacaggcatgagccactgcacctggcctgttaaatttttttaagaggcaaaagtatatacagtcgtgtgctgcataatgacattttggtcaatgtcagactgtatatacaatgatggcccataagagtataatgccatatttttactgtaccttttctatgtttatatatatttagatacacaaatacttaccatcatgttataagtgcctacagtattcagtatggtaacatgctgtgtgcaggtttgtagcttaggagcaataggctcttccacgtagcctaggtgtgtagtagactataccatctaggtttgtgtaaattcaatctatgatgttcagatgatgacagtgtcacctagggatgcatgtcacaaaactgtacagtacaagctcagccaggttaggaagaaagtacacagaatagaagaggcatccaacaaagtggcctctgggtgctgtatcaaaataaataaataaataaataaatgtttttgtatcttttctactagaggccaaggcagcagggtgaggagttcaagaccagcctgggtaacatagcaagatcccatctctacaaaaaaaatgtttaaagaaaattagctgggcatggtggtgcacacctgtagtctcagctacttaagaggcagaggtgggaggatcatttgagcccaggagtttgaggctccagtgagctgtgatcgtgccactgctctgtaagcctgggcaacagagtgagacgccacctctaaaaatataaataaataaataaaacaagtgagccgggcatgatgttgcatgcctatagtctcaagctactcgagaggctgaggtgagaagattgcttgagcccaggagttcaagattgcagtgacctatgattccaccactgcactgcagtctgggcaacagcaaggcttgtctcaaaaaaaaagaaaaaggaaaataaagtcaatctgtcatcaagacacctagaaccagcaagctgtcccactcatgtgacccattatgtattttgtttgtttgtttgtttgctggaattataggcacgtgctaccatgcctggctaatttttttttttttttcgagacagccaagatcgtgccactctactccagcctgggctgggcaacagagcgagactctgtctcaaaaaaaaaaaaaaaagaaaaagaaaaaaccagaaagaggcagtcttctttttcttctttttttttttttttgagatgaagtcttgctctgtcacccaggctggaatgcagtggcgggatctctgctcactgcaagctccgcctcccgggttcaggccattctcctgcctcagcctcctgagtagctgggactacaggcgcccgccaccacgcccagctaattttttgtatttttagtagagacagggtttcatcatgttaaccaggatggtcttgatctcctgacctcgtgatctgcccgcctcggcctcccaaagtgctgggattacaggcctgagccaccacgcccggccctcttctttttttttttttgagacggagtctcacctgtcaccaggctggagtgcagtggtgcaatctcggctcactgcaacctccgcctcccaggttcaagcaattctgtctcatcctcccgagtagctgggactacaggcgcgcaccaccatgcccagctaatttttgtatttttcatagagacggggtttcaccatgttggccaggatggtctccatctcctgaccttgtgatccccctgcctcagcctcccaaagtgctgggattataggcgtgagccaccacacctggcccctatttatttatttttgagacgaaatcttgctctctagcccaggctgcagtgccgtgcagagccactgcactgagccaatttttttatttttagtagagacgtggtttcaccatgttggccaggctggtctcgaactcctggcctcaagtgatccacctgcctcggccttccaaagtgctgggattacaggcgtgagccactgtgcctggtccccccattatatattctgaagaggcatcaggtgcaaccattcatgtaggacctgaacatcacaccagcttttgcaagatgtaagccctgggcatgtggaagaagctccactcccccgtcacagaccattcgatggcttctgcaggacatatgggtgtgacaatgcaagttgtgcctcaaccccctactcccgtggctgctcgaccttgcgtgaagtaagagggctgcgtgttggaggcaggagggcatccaacgccccgctccctcagcctggctctctcgtcaggcaaatcattcatttccaagccttatctatatcatgggtccaatctcttctctgtaggactattctaagggtaaattgagatacagatggtcccaacttactacagttcaacttactacatttttgacttacagcattttcaactcacaatgggtttattgggacgtagccccatcataagtggaggagctcctgtgctgtgtgtgaatggcctagcaccgtgcctggtgtacaacagacaccatcagtggttcattccctccccttttgcataaggaatcccccctctcgctgggtggagtctgtcaccttggtcttcaggctgttcctgaagttggtcatgagtgcatggtccttttgccggctcttgttgatgttttcgatcagctcctgggctctcttctgcaggatgtcaatgcttgagtccagagaggagaagtagagtcccgacttcccttccaggaccgtcagctggcaactggcactggaggtggcgacacaagggcaagaaacctgacttctcagagtacaggaagcggccaggtgtagtcgctcatgcctgtaatctcagcactttgtaggccgaggtgggcggatcacaaggtcaggagttcgagaccagcctggcaacatggtgaaacctcgtctctagtaaaaacaaaaaaacaaaaaattagccaggcacggtggcacgtgcctgtagtcccagctacttgggaggctgaggcaggagaattgcttgaacccaggggatgaagttgcagtgagccgagatcacgccactgtactccagcctgggtgacagagcgagactccgtctaaaaaaaaaaaaaggacaggatgctgagatcagcaccagactcttccaagagcggctgatctgagagagatcaggtgggaggggacccgcgttgttgccttccatgggtgacacgaggcatgcttcctaggttattccattcacacacacgccctgaatgatgagaatggcacccccattttatagctgagaaaacagaccaagaggcacgactaaatatgcccaaggttccagaccaaggaggtctgtctgtccccaaagcccactgttattttatgacaccaacttgcttctttggaattttggaataccaataatagtgtcaatgctttctttcttttttttttgagacggagtctcactctgtcgcccaggctggagtgcagtggcgcgatctcggctcactgcaagctccacctcccgggttcatgccattctcctggctcagcctcctgagtagctgggactacaggcgcccgccaccacgtccagctaattttttgtatttttagtagagacggggtttcaccgtgttagccaggatggtctccatctcctgacctcgtgatccgcccgcctcagcctcccaaactgctgggattacaggcgtgagccaccgcgcccagcccaatgctttctttcttattttctttttttttatagagacaggtctttctctgttgcccaggctggagtgcagtggcacaatcatagctcactgcagtgtcagcttcaagtgatcctcccacctcagcctcctgaataggtgggactacaagcatgtgctaccatgcacagctaatttttaaaatttttaaatagagactgggcttcactatgttattcaggctgctctcaaacttctggcctcccaaaatgttgggattacaggcatgagccactgcgcctgactgatgcaatcagcaatctcctgcaacctctgtctcctaggttcaagccattcttctgcctcagcctcccgagtagctggaattacaggtgcacaccactacacccaggtaatttttgtgtttttagtagagacagggtttcaccatattggccaggctggtctcgaactcctgacaagtgatcctcctgcctcggcctccaaaagtgctgggattacaggcgtgagccactgcgcccagcctgatgctttcttaagtgaccttcctgtcattaacctgctgcatccctttcccaacctactgggtgatgttgaccgcctggggctacagtgtacctgcacctccttgctcccaccaggtgaggtgaatacctgttgaattatatttaaagagcatttaaagaaatgcgcacacacaaaaagttgttggtcccatgttgtacatgtaactgtaattatgtaattcaaatattgtgttaacaagtgaaatagtggcagaagagtgacagctatctaaaaagctaaacagaatgaaaaattttgagtaatatgtaatgttccgtaacttcataatattcaatgtaataaaatggaacttcagttgggtatgggagagagaactaaaattgaagcaaagatcataaaaatctagaaaaattctgcatatagattgctctgccaaggccttgttctctgctttaaaaacagaactggggccgggcgcggtggctcaagcctgtaatcccagtactttgggaggccgaggtgggtggatcacaagggcaggagttcgagaccagcctggccaacatggtgaaaccccatctctactaaaaacacaaaaaattagccaggcgcagtggcaggcgcctgtaatcccagctactcaggaggctgaggtacaagaatcgcttgaactcgggagccgagatcacaccactgcactctagcccgggcaacagagtaagacttcgtctcaaaaataaataaattaattaaattaaattaaaataaattaaaacaactgaaaattgtgggtaatgcattgtgaatgaagtttatggaaaaaatgtgatctgataaggcaacccattggtattttaaattaagatatattttttcttcttctgatgctctggtttatttgaccggtttgacgtctgatcagttagcggttctggccaggtagagctgcccctgtgagtcacagctaacttttcctcagccatgttcccggcactgagctaagtcacatgccttgtcttggtgcatcctcacgaccacactcgggtcatctgctgttctctttacgacatgggcttagagtggttacaccaccttctcaaggtggaggacagtctgtggcagagctgggctttgtacccagaaggcctgacttcccagctggtatcctgcttcctactaaggcactcaggcgccactcccctcctggatcttacatttcctcgtcgccctctgaggtcctccagctctgaaaggccaagccttgtaggtgtggacagagcagttcctgaatgcagcaggtcacacttgtgtccacaagcaggttactgattacttacaaaaataaatcttggccaggcacagtggctcacgcctgtaatcccagcattttgggaggccgaggcgggtagatcaccagagatcaggagttcgagatcagcctggccaacatggtgaaaccccgtctctactaaaaatacaaaaattacccaggcatggtggcatgtgtctgtaatcccagctactaggcggactgaggcaggaggatcgcttgaacctgggaggcagaggttgcagtgagctgagatcgtgccactgcactccagcctgggcaacagagcgagactccatctcaaaaatataaaataaaataaaaataaatctcagctatctcaaccaggcacagtgggctcacgcctgtaataccagcacttcggggggctaaggcaggtgaatcgtgagctcagggttttgagaccagcctgggcaacatggcaaaaccccatctctacaaaaaacacaaaaattagccgagtgtggtggtgtgtacttgtagtcccagctacttaggaggctgaggtgagaggatcacttgagcccgggaggtcaaggctgcagtaagcttgatcatgccactgcactggagcctagatgatatcacgccactgtactccagcctgggcgacagagtgagaccctgtttcaaacaaacaaacaaaacaaccacaacacacatatacacccctcccctctccacccggtctcccccagccggccacctccctctttcctccccatcaaggccaaggttctagaaggagctgcttaaattttctgggcttttttttttttttttttttaagagagagagagagtctcaccctgggcttcttttcttttcttttgagacagagtctcgctctgtcaccgaggctggagtgcactggcatgatctcagctcactgcaagctctgcctcccgggttcacgccattctctttcctcagcctcccgagtagctgggactacaggcgcccgccaccacgcccggctaattttttgtatttttagtagagacagggtttcaccgtgttagccaggatggtttccatctcgtgacctcatgatctgcccacctcagcctctcaaagtgctgggattacaggcgtgagccaccgcgcccggccatcctgggcttattttcttacccccattcacttttcagtccattgtaatcaggttcctcccccggttctcaaatgaaacagctcctaccacagtcaccatgaccttgtggttagaccgatagacatctcagagtgacatgctgacctcttggcagcagccagcactgctgaccacccttccctgctactcccgacatgtggtatcccagaggtctgtgcttgggcctctgctgtcttcttgccagacaccgtcaatcacacacttgttctgcagtgaggcctccatgcctcctccctgctggcccctgcagctaatatcccagccaccattccacaatgcacaggctattattctccaaaggcattcattcccgtagcatgggatccctgaacagtcccctttcccacctacgtcctgtctcctccagaaagtgttccttggctggattaggtgcacacagcacctacggtttcactgtttacaccttggcctcccactgtagtctgctgaagggccagggccatccttcatctttgtatcttcagtacttacccctcatgagagaagcaataaatgtgctgctaataagtaaatgacttgcgagtactatccattaccatccacactttggattctatcatctaaattctatcatcccagcccatgcctctctcctgaggacccaagaatatatgaaacctcccagcctccccacatggctgtctcaaaggcatctgaaactccacatttgcacaaccaaaagcgtcatctcccaggcaacccgatttcatcttccattcccttagttaatgacataaaaagccacctggttcccaagctcaaaacttagcagcaagcctagagtccagcttctctctgtccctctgcatcctgtctcaaaatcccctcatttctaccttctttgtttttttatttttatttttaattaatttttttttcagatggagtttcactcttattgcccaggctggagtgcaatggcgcgatctcggctcactgcaacctccgcctcccgggttcaagcgattctcttgcctcagcctcccgaatagctgggattacaggcatgtaccaccacactcggcgaattttgtatttttagtagagacggagtttctccatgttggtcaggctggtctcaaactcccgacctcaggtgatccgccctcctcggcctctcaaagtgctgggattacaggcatgaaccactgtgcccagcctttttatttatttgtttttgagacagagtcttgctttgttgcccaagctagagtgcagtggagcgatctcaggtcactgcaacctccaactcccggtttcaagcgattctcttgcctcggcctcccaagtagctgggattacaggcacctgccaccacacccagctaatttttgtatttttagtagagacggggtttcaacatcttggccaggctggtctccaactcctgacctcgtgatctacctgcctcagcctcccaaagtgctgggattacaggcgtgagccaccatgcccggccctaccttcttaatgtctctaaatctaccatcattagcagctctataactttcacttctcaactaggccatagggacctttattttatttacttatttatttttgtaaaaaattttgtaataaattttatgttaaaaaatttttttttcttttgtaagaaattttcttttgtaaaaaattttgttattattattttgtttttgagacagactctcactcggtcgctcaggctggagtgacaggctggagtgtcgctcaggctggagtggtgcaatctcagctcactgccacctccacctcctgggctcgagtcattctcgtgccccagcctcctgagtagctgggactacaggcacacaccaccacgcccggctaatttttatatttttagtagagacagggtctcaccatgttggccaggctggtctcaaactcctgacctcaagtgatccgcctgcttcggcctcccaaagtgctgggattataggcatgagccaccacgcctgaccttttatatatatatattttttttgagatggagtctcgctctgtcccccaggctggagtgcagtggcacaatctcggctcactgcaagctctgcctcccgggttcatgccattctcctgcctcagcctcccgagtagctgggactacaggcgcccgccaccacacctggctaattttttgtatttttagtagaggcggggtttcaccatgttagccaggatggtctcaatctgctgacctcatgatccgcccgtctcggcctcccaaagtgctgggattacaggcgtgagccaccgcacccggcctgacctttttttttcttttgaaggcagggtttgctacattgccaagctggagtacatcagtacaattactgcaactttgaactcccccaggctcaagtgatcctctcgtctctgcctcctgaatatctaggactacaggcgggtaccactactcctggctaaattttgtttaatttttctgtatagatggaggtcttgctatgttacccaagctggtctcaaactcctggcctcaaaaaatcctgcctcggcccccaaagtgctgagattacaaacgtgagccacagtgtcagcccctagtgacattctacactgtaatctgatttcctactcctgtttgttagcctaaaaccatccccaccagccacaagatcaagtctaaattccttcacacagcatacaaggccttccagggccctggcctccaccctctcttccagccttaatgggtttttttctttttctttcttttttcttttttgagaaggggtctcactctgtcgcccaggctggagtgcagtggcatgatcttggctcactgcagcctccacctcctgggttcaagcaattctcccacctcagcctcccctgtagctgggattacaggtgcctaccaaccatgcctggataatttttgccttttttttttttttttttttttttagacgaggtctcgctcagctgcccaggatggagtgcagtgccacgatctcggctcactgcaaccactatctcccaggttcaagtgattttcccatctcagcctcctgagtagctgggattacaggcacctgccatcatgcccagctaatttttgtatttttagtagagatagggtttcaccatgttggccaggctggtcttgaactcctgaccttaggtgatccacctgccttggcctcccaaattgctgggattacaggcgtgagccaccgtgcccagtgcagccttactgttttctttttgtttgtttgtttttttcaagacagagtcttgctctgtcacctaggctggagtgcagtggcacgatctcggctcactgcaacctctgcctcccgggttcaagcaattatcctgcctcagcttcccaagtagctaggattacaggtgcccaccactgcacccagctaacttttgtatttttagtagagacagggtttcaccatgttagccaggctggtctcgaactcctgacctcgtgatctgcccgccttggcctcccaaagtgctgggattacaggcgtgagccaccaagcccgatctagccttactgttttctacagcccctccatctgcagcaattggggacctaccacaatttccccaaacatgtcagcctttgcctggaatgactttcccttcctgcctccttcataatggaacatttggaacttttgcttctctaccccccgctatacctaggccttgctggtcacaaagctgccaaagtttatgaacatcagtcccctccagcgcacgacaccttgagggtgcagactacaccctactcatttgttttgcagcaccccaaaggtttcatcagtttgctgaatatctaaatgaatgcagcactgacattggggctcccacacctcctcgtacccagttcaccttgttgtctcagcctctcctggatgctctcaacagtttcagaccctaaaattaaaatcgatgagagcaccaggtgtttctttttgtgtgattgttcacaacctgcttgagctgctaatggttcagagctgctcctttttaaggctcaagggatgaggctggaaccggttttcatggcagctaagcaaacagtaaaaaaaaaaaaaaatcacttgaattcagctaattcgagtttcatggtaggacaaaggcctgcatcagatgtctgctgagagcttctttatttttccaacctctcctttggggatttatcccttttgatttcatttttcttaatacacagcagctgcatattaatcaggatgctaatgaatcataggcttccctgggcctgcattcaccaattaactttaacaaacaaaatgcgtggtgtcctctctgctggctttcccggttcctaggctggcttctgttgccgaaccctggaccgaggccagagaatgcaagtcagcccaacacagcacgtcgggtgtgcatggcctgcgcccggattgggcagcgggctgggggctgtgaacacagcgctgcgttcatctattatggtctgtccttctaagaagtccctaatttggctgcgaggattaggacatagttcccaagcagggcccacgctggcagggggcccaggagctgcggaggaaatgggtctaagcgaagagaccatctgttcgctccaggtaaagctgtgattggcaggcgactgagccagaactgcccgctggtggggccctccctccgtggcctctaacagatatacaagtaaacaatccgccagccacttatgaccaccgcgggtggcagtcccgggagaggaggcaagctaatcaaacattcaaggggggaacacaacagaatctctggcgcttgggcaaaacaatgttttgctgaagtacagccaggaagggggaaggtttgaatggaagctgatgagccagttcctcaacctctccttttctctctggaaacgtgttaacattttaatcatgttgctgagtatctgctgctggatctattaactggcccctgcactggttttaatctatctgttttttggcccagggttcctgtggagctccttgaagtctctaaatgatttgcagcggtctgtgtctcttcactacacagatcctggtctaaacatgctattccgcagtaaggtattagcaaacaaacgacttcaaccattgcttccctttttttttggtctccaattgacagcacacacctataaaccatttcacgcgtggcctgctttccagcagaggaatgtgcgaggagagggaagctggcttgctttctgcctagagtcctcagggccctgtcctgaccctcctctcactccttctccaggtgagctcattcattccacagctgctgctgaaacaatgactcccacagaaccatctccagaccctcaccccaccccgagttccgggtcagaaagttgaactgtatcctggacatgtggatgtccctggccaccgaaagtggctcagataaacaaggacaacacagaactcatgttcttgtctctgccagagaagccaccacctaccggaaaccaccacaagctggaaagcagacagcagtgatgtgcttgtaagcatttagcaactggctgtgtgatgggggggaagccctgattcgtagtgtttgccaatttccgtggtgcagagcctcccaccattagccaatttcaggctaccaacatgaagacgctaaatgccaagttgggaagagatgtgtagaattggctctttcaagccggtaggagctggccccagtacatcatggccgggaaacatcctccctcatccccttcctgtgtcttatggcacaaggcacttcctccatctgccctgctaaaggccaccccccccacaccccccataaaagcctcccactagacctccctacacccacacattctccctcccaaccattctctacaaagcagccatatttttttattaatattttttgagacagggttttgttcttgttgcctaggctggagtgcaatggtgcaatcttggctcagtgcaacctctgcctcccaggttcaagcgattctcctgcctaaccctcccaagtagctgggattacaggcatgcaccaccacccctggctaattttgtatttttagtagagacggggttttgccatgttggccaggctggtcttgaactcctgacctcaggtgatccatctacctcgaactcccaaagtgctgggattacaggcatgagccatcgtgcccggcctgcagccgtatctttttataacgggaacctgagcatgtcacttctgtgacccagcagttcccctcctaggtatgagtatgcccagaagaaatgaaatcatctgtccacacacaaacttttctaaatggatttcatagcagtgctgctcataatagccaaaaagtgaaaaccacccgaatgactatcaacagatgagtggataaacaaaatgtggtagactcatgtggaatattattcagccattgaaaagatgaagtccagatgcagtggctcacgcctgtaatcccagcattttgggaggccactgtatctggcctggagtgatgaagctgttttaaagttgactatgagaatggttgtccagctctgaatataccaaaagcaatcaaatcatacccttcaaggaggtgagccgggcgcggtggctcacgcctataatctcagcactttgggaggccgaggcgggcggatcatgaggtcaggagattgagaccatcctggctaacacggtgaaaccccgtctctaccaaaaatatataaaaaaaagccaggcctggtggcacatgcttgtagtcccagctactcgggaggctaaggcaggagaattgcttgaatctgggagggggaggttgcagtgagccaagatcatgccccctcactccagcctgggcaacagagcgagactccatctcaaaaaaaaaaaaaaaaaaaggtgaaccgtatgctatgggaattatatctcaaagctgttactgaaaaaacctctaggataaagtctgtagcccacaaaatgcctcataacctggccccttctgcagccctccccttgcactcacccctgtaccccactcgctcgcctagccacactggccttcctttagctcccccgaatgccacgagcagggacttcgcacgagctcttctctcaacccctccttccccaccctgcccacactttctgcttcaacatctcttctacaaggacaccttccctggctccccattccaggctggctgcccacaggggaaaggtctcccagcaccatgatctcttccctgttggtgtttggtcagatgcaaacagcaggagggtatgagcatgtctgtctggaggacaggagtgtccctgctgccaatcacaatactgccatatcagcctttttttttttttttttcctcgagacagggtctcactctgtcacccaggatggagtgcaatggtgctatcttggctcactgcaacctctgcctcccaggttcaagcaattctcctgcctcaggctccggagtagctgggattaaaggcatgcgccaccacgcctggctaattttttgtatttttagtagaaacagggtttcactatgttggccaggctggtctcgaactcctgacctcgtgatccgcctgcctcggcctcccaaagtcctaggattacaggttgagccactgcgcccggccaacatgagcctccttcttgctcttttgagaacacatcaagcttattcctacctgagggacttcatacttgcggccccctctgcgtggaaggtttgggcccagaatgcctcctggctggcctcttctcatgtgacctcttcagagttctccaactgctctaaggtccctgtcactctacttgctccttactatattttgtttcttcattccacttacttgccaccagttgaaatcacattattcacttatttatttttgagacagggtcttgctcttccagtgcagtgaagcaatcacgtctcactgcagcctcgacctcccaggctcaagtggtcctcccacctcagccttccaagtagctagggccacaggtgtgtgcaaccgcaccacaccacgctcatttctttctttctttctttcttttttttcagagagatatgtctccctctgttgcccaggctggtctcaaactcctgggctcaagggatcctcctgccttggcctcctgaatagccaggactacatgcatgcaccaccacgcctggctgatttttgtgtttttagtagagacggagtttcaccatgtgggccaggctggtctcgaaatcctgacctcaagttatctgccagcgccagcctcccaaagtgctgggattacaggcgtgagccactgcgcccagcctctactatatatatactttttttttttttttttgagacagagtcttgctctgtcaccaaggctggaatgcaatggcacaatcttggcttactgcaatctctgcctcccaggttaaagcaattctcctgcctcagcctcctgagtagctgggattacaagtgtctgtcaccatgcctggctaatttttgtagacacagggtttcaccatattggccaggctagtctcaaactcctgacctcatgatctgcctgccttggcctcccaaagtgctgggattacaggcgtaagccaccgtgcccggcctactaaatttttcttttttcttttttttgagacggagtctcactctgtcgccaggctggcatgcagtggcatgatctcggctcactacaacctctgcctctggggttcaagcgattctcctgccttagcctcccgagtagctgggactacaggcgtgcaccacaacacccagctaacttctgtatttttagtagagacggggtttcatcatgttagccaggatggtctccatctcttgaccttttgatccacccccctcggcctcccaaagtgctaggattacaggcataagccaccattcctggcttttttttttttttttttttttttttttgagacagcgtttcggtctttttgcccaggctggagtgcaatggcgccatctcagctcactgcaacctccacctcctgggttcaagcgattctcctgcctcagcctcctgagtagctgggattacaggcatgtgccactatgcccagctaattttgtatttttagtagagacggggtttctccatgtttgtcaggctggtctcaaactcccgaccttaggtgatccacccgccttggcctcccaaagtgttgggattacaggtgtgaaccactgcacctggccaatattttttaataaattggcccgacattctggcccgcctctagtcccagccatttcggaggctgaggtgggaggatcacttgagtctgggaggtggaggttgcagtgagccgtgatcatgccactgcgtggtgacaaagcaagacgctgtgttaggagggaaaaaaaaagcagcagacactggcatagccttgtggaagaaaagggtgaatgagagggacccaggggcctgtgtagacccatagggctgggatcttcctcacctagctggccctccaccagcttcctcctcgcagttctcttcccaccgcggatgctccttgctctcccccaagggctgcggttcctggtctttgcatttcacatggggcacgtccacctgcaagcacagtcaggacggaggccaaggagggagaatgaggagtgaacagatcgccctcctgccgacccttcaaccctggtcacctcgatgtgctgctgcgggacggtggggacccgcaggaaagacgggcagggctggggcaggtgccatgagggcaggggcatggggtgaaaggacactctgtccctaggggacaccaggacaccagacctagaggggccgggtgagggcagggctgtgggaatgtaactggaggacctgggctcctaactggtatgtgtgttggctggagtccttcgagaaaggagaagaggtaggagaaaagagatgaggccgggcgcggtggctcacgcctgtaatcccagcactttgggaggcggaggcgggcggatcacgaggtcaggagtgcgagaacagcctgagcaatatggtgaaaccccgtctctactaaaaatacaaaaattagctgacgtggtggtgcgtgcctgtaatcccagctactcgggaggctgaggaaggagaatcacttgaacccgggaggcagaggttgcagtgagccgagatcacgccactgcactccagactgggcgacagagtgatacttcgtctcaaaaaaaaaaaaagaaaagaaatgaaagaaacgggtgcggtgcgtgggtgtttgtgcctttctctactccgttccggccacgcgccatgtgtggaaatcagacccgtcagtgcgtcagtcagggccgggttcagtcagtcaggaaatttgaggccaggcctgatgagagggagccccaatggcaaaggacaagcggccgggctcgggtccgctggagatggctgggatcgcagccgttccctgcctatctgtccgcccgccccacgcgcgagaaggaaacaagcgccgcgtactccctgtcgctccattccgtattttcccgccttcaagctcgcaccctctgcgcatgcgccgaccccgcccctggccagctgcgctcccgcggacgagtgtgttgtgacgcgtgctcccggccccgccctctttgagaacttgcgcggccaactgggcggggccgaccgttaagcagcagtttcgcggtccgcgggctgcgcgcgcagtcggcgccccttgggaacaggacggcgcgctctgggtgcgcttgtgtgcccctgtgaggctcctgggttccacggggcgcccaggttatacggatctcagagtcctgtatttattcggtgcttctaacttcatccactctgccttggaaaatatactccataacaatttttttttttttttgagacaagatcttggtctgtcgcccaggctggagtgcagtggtgcgatcacagctcactgtagcctcgacctcccaggttcaagcgatcctcctgcctcggcctcctgagtagcagtgtcattcaccaggcccttctaatttaaaaatatttttctggccgggcgcggtggctcacgcctgtaatcccagcactttgggaggccgaggcgggtggatcacctgaggtcatgagttcgagaccagcctagccaacatggtgaaactgtctctactaaaaatacaaaaaatagccgggcgtggtggcgggcgcctatagtcccagctactcgggaggctggggcaggagaattgcttaaacccaggacgcagaggttgcagtgagctgagatcatgccactgcactccagccggggtgacagagtaaagctccgtctcaaaaaaaaaaaaaagattgtatgtatatatacacacacacacacacacacacacacacacacacacacacacacaaattatatttttttttcctgtagaaatgagatctcactgtgctgagcccaggctgatccccaactcctgggctcaagccgtcctcccgtcttggtctcccaaagtgctgtctcaaaaaaagaagaaattatctgatctaccctattgactgtaggtcataagacccccgtttcaaagaagtttctgccccacacaaggcctatctatctagattcttcttggcctctctgagcatgcattcctgagactccaagaagaatctagacagacaggccttgctgggtttccccactcagcctattagtattagacgacccccccggcttttttttttttttctttttttgtcttgctctgttgtccaggcaacactggagtgcagtggcaagatctcaactcgctgcaaccttggcctcccaggttcaagcgattctcagccaaccaagtagctgggattacagatgcaccatgcccagctaatttttgtatttttagtagagatggggtttttccatgttgctcaggctggtctcaaactcctggcctcaagtgatccacccgcctcagcctcccaaagtgtcaggattacaagtatgaaccacgacaaaccctttttgtccaatcaaatttctacctgggtgttcaaactttgctgaacctaagcataagacacttttcattaatcaggcatggtggcgggcacctgtaatcccagctgcttgggaagctgaggctgctgtgagccaagatcgcccctacactccagcccagggaacagagccagactccgtctcaaaacaaaacaaaacaaaaacacagtttcccctgtatctctggatcttcattctgaaggcttgtcaggtaacactatgatcaaatacattcgtattccttttctcttattaatctgccttttctcagtaatttttagtgaaacttcagagggcaataaggaagctttctcttcacccctacacagccaaagttcagatttgatggaaatggcaagattccagggtacttgtgtttatttagacacataaatatgtatttaacgacagggtctcactctgttgcccaggctggagtgcagtggtgtaatcacggctcattgcagcctcgacctcccaggctcaagtgatcaacctcagtctctggagtacctgggattacaggcatgagccactatgctgagctaatttttgttttctgtttttgggggacaggtctcactctgtggcccagactggagtgcagtggtgtgatctcagctccctacaacctccacctcctgggttcaagtgattctcccacctcagcctcccagatagctgggactacactacaggtgcctgccatcatgcctggctaatttttgttttttgtttttttttttggaacagagtcttcttctgtcacccaggctgtagtgcagtggcacaatcttggctcactgcaacctccacctcctggttcaaacgattctcgtgcctcagcctcccgggtagctgggactacaggtgctcaccaccacgcccagctttttttttgtatttttagtagagacgggttttcaccacgttggccaggctgctctcgaactcctgacctcaagtgatctgcctgcctcagcttcccaaagtgttggaattacaggcgtgagccaccacgcccagcctaattttttttttttttttttgagacggagtcttgctctattgcccaggctggagtgcagtggtgcgatctccgctcactgcaagctccgcctcccaggttcacaccattctcctgcctcagcctcctgagtagctgggactacaggcacccgccaccacgcccggctaattttttgtatttttagtagacagggtttcaccatgttggccaggatggtctcaatctcttgacctcgtgatccacacgcctcggcctcccaaagtgctgggattacaggcatgagccaccgcacccagccctaatttttttatttttagtagagacggggtttcaccacgttggccaggctgctcctgaattcctgacctcaagtgacccacccaccttggcctcccaaaagttctgggattacagaagtgagccactgtgcctggctcagtacccagactttttttttttttttttgtatttttagtagagacggggtttcaccctgttagccaggatggtctcgatcgcctggcctcgtgacccgcccgcctcagcctcccaaagtgctgcgattacagacgcgggccacctcgcccagcccagtacccagaattttgaccatcaagtggcacactgagctagggggacccaacaagacccctcacccctaaggaaagccaccagatgggggcaactgcccactttattagacaataggtggcccacaggtctcctcagggcccaccctcacagtagacacaccacacaggacaacagaaggaacctgctacccagtcctctgtccctgggattctggtcctgggacaggtgggaaagaggaaggtgggggctggcctcacagaggcctcataaatacaaggtcactggccagggatgcaaaggagcgcagcagcagggactcggggaggatgacctgtcctagagtggcccatgtcacgcagcctcctgtgtgggagggggcctcggctcggcatccaggcggcacaggggactgtcatacaccatctgcaggttcaccttgtggcccaccagctcccggatattgttgatgccatatttgatcatcgttgggcttgtgggggagggaacagagtttatcatgaggtcagcacgtgcacccttctgctcagatttccatggctcccatcttcttcagaggaaaagttcaagttctccccatgacccacagggccctgcgccaactgctctatcacctctcaccctccgccttcagccacaccagcctcctcactcttctcctaatacaaaaagcacattcccacctctgggcctttgaactgactgtgaccactacctgggacacccttccccagatactctcatggtttacctctttatctacctctagattttgcttaggtggcacttcttcctccatgatgccttcactgaccacgtagttgccttagccctccctataccacttactgccctggtacacacttctgtcttcttttgctgagtgcatttgtttttttgaaacagagtctcactctgtaacctagggtggagtgcagtggcgtaatctcagctcactgcaacctccgcctcccaggttcaagtgattctcatacctcagcctcctgagtacctaggactaggactacagacgcacgcaacagtgcctggctaatttttgtagttttagtagagacgggagacagagtcacactctgttgtctagactagaatagagtgcagtggcatgatcttggctcactgcaacctctgcctcctgggttcaaacgattctcctgcctcagcctcctaagtagctgggattacaggcacctgctaccacgccaggctaatttttatatttttagtagagatgaggtttcgccatgttggccaggctggcctcgaactcctgtcctcaggtgatgcacctgcctcagccacccacagtgcttggattacaggcatgtgccaccgcgcctggcctgtttttattctttgtagaggcggagacttgctctattgcccaggctgatctcaaactcctggctcaggcgatcctcctgccttggcctcccacagcactgggatgacaggcatgagctaccacgcctggcctgatgtacttgttggtcttgctagttatcatccttctcgctccactgggaccccagattcagagggagggacataagctgtcatgttcacagcacggggctgagcattcagtttgtactcacgatgaaagttttgtccattggatgaatgaatgggtggtgctgaaaccacgcaggcccctatacctggagagttatttgaggcagctggacaccccgagtttccacttgggcacttaccgctccagggagaggccccaggcaatgaccgacacgttctcgggaagccccatgggcagcagcatctctggacggaagacccccgagtttccgacctccacccacttcttcaggcctgcagaggcaggacagaaaagacgggcagtgcgtgttgagtttctgggcactgctggtacaggttctgggtctaggtggtgagcttgggaggtggggtacaggcatggcaatggggggacccaggccaaaccatagtagcctgagacctccctcccaccccagtaccagggcctaccctgaccttggtggtagctgaacacctccatgctgggctctgtgtatgggttgtaggctggcttgaagcggagttgcgtgatacctgcaggaagtggggggcgggcaggagagcaggggtttggaggataatgctggtgatcaacacacctgcccgctgcctcaccaccatggcccacccctgcccccctgctcacccagcttggtgaagaactcccgcagaacgcccatgaggtggcccaaggtgagaccatgatccgccaccacgccctcgatctggtggaactcagccaggtgcgtggcgtccagggtctcattccggaatacgcggtcgatggagaagtacttgaccggagtgaagggcttctaggggtgacaaccgagccaggcccaggtatgggtcagaaggtccctttgacagcaccctctccccactggggcccccgcctgggccaaccgcaccttctgggcaaggcggtagagcgcacgggcgctggctgatgtggtgtgggttcgcagtaggtttttccgggcctcgtccagcttccagttatacttgtaccttcaggagggaaggtgggaagtccatgcaatggcccaggggtccccagcctccttcccttccataccaggtaagtcctgcctcacccctgtgagccgtagccgccctgagagtgggtccgcttgacccgctggacatagtccattgggagctgcagggcctccgctggatctgggcaggacagagcaacatcaggtcagtcaacgagcatttcccacccctttttttttttcagacagggtctcactgttgtccaggctggagtgcggtggtgcaatctgggcttactgcaacctctgcctcccaggttcaagtgattctcgtgcctcagttttctcatttgtgtgtggcttttttgggttctttttttttgagacagagtcttgttcagttggcccagctgaagtacaatggctcaatcttggctcactgcaacctccacctcccaagttcaagcaattctcctgattcagcctcccaagtagctgggattacaggtgcctgccaccacacccgggaaatttttgtatttttagtagagatggggtttcgccatgttggtcagggtggtctcgaactcctgatctcaggtgatccacccacctcggcctcccagtgttgggattacaggcatgagccactgcacctgggctttatttatgtatgtacgtatgtatgtatgtattttgagatggagtcttgctctgttgcccaggctggagtgcagtggcatgatcttggctcactgcaacctcctcctcccaggttcaagcaattctcctgcctcagcctcccaagtagctgggattacagaagtgcaccaccacacacagctaattttttatatttggtagacgtgaggtttcaccatgttggccaggctggtctcgaactcctgacttcaagtgatccgcctgcctgggcctcccaaagtgctgggatcatgccaccgcgcccgacctttttattttttctttttttttgagacggagtctcgctctgtcgcccaggctggagtgcagtggcgcgatctcggctcactgcaacctctgcctcccaggttcgagtgattctcctgcctcagcctcctgaatagatgggactacaggcacacgccaccatgcccagctaatttttgtatttttagtagagatgggatttcaccatgttggccaggatggtctcgatccacccaccgtggcctcccaaagtgctggaattacaggcgtgagccaccgcgcccggcctattttttttttttaaagggacaaaattttttttttttttagacggagtctcgctcagtcacccaggctggagtgcagtggcatgatctcggctaactgccagctccgcctccagggttcacaccattctcctgcctcagcctcccgagtagctgggactacaggcgcccgccactatgcctggctaattgtttttgtatttttggtagagacggggtttcactgtgttatccaggatggtcttgatctcctgacctcgcgatccgcccgtctcagcctcccaaagtgctgggattacaggcgtgagccaccgcgcccggcctaaagagacaaagtcttgctctgttgcttggcctgcagtgcagtgatgcaatcatagctcactgcagcctcaaactcccaggctcaagcaatccttcacctcagcctcccgagtagctgcaactacaggcgtgcactactatgcccagctaattttatttgtacagatgggtctttctatgttgcttaggctgttctcaaactcctgggctcaagcgatcctcctcccttgccctcccaaacagtgggattatacccactgaggctggccaagtttccttctttgtaaaaaggggtaacagtactgcttccagtagttggcaggaagattagaatagtggctagtatgtgatgagtgcttagtaagttttgggtgctatgacaataatgacaagaatgatgttgctcctctggccaggtaagccggcacccaatgacctcaactgccctcttggtcaggaaggccaccccattgtgggaagtcattccatttcagacagtgctaagggcaatgaaagaaagaaatgggacagaagaatgaacactaggggagaagggcttctgtagaactcggggtgagcccgggagtgttaggctggcctgtctctggtgacacgtgagcagagatttgaggctgcagcctgccttgaagatctgggagaaaacagctcttggctaaagacggaacataagcaaaggccctgaggtgtgcacggcctggaatgcccaaagaagacatgggggcaggcagggtgtgggggctcatgcctgtaatctcagcactttgggaggctgaggcaaaactgtttgagatcaggagtttgagaccagcctgggcaacatagtgagaacaaaacaaaacaaaaattcattaattttgggctaggcgtggtgctcacgcctgtaatcctagcactttgggaggctgaggcgggagtatcacttgaggtcaggagttccagaccagcctggccaacatggcaaaccccatctctattaaaaacacaaaaattagccgagcgtggtggcaggtgcctgtaatcccagctactcaggaggctgaggcaggagaatcgcttgaacccaggaggtggaaattgcagtgagctgagatcgtgccactgcactctagcttgggcgacagaatgagactgtctcaaaaaaaaaaaaaaaaaaaaaaaagccaggtgcggtggctcacgcctgtaatcccagcactttgggaggccgaggcagactggagtttgagaccaccctggccaacatggcaaaactccatctctactaaaaatacaaaaattagctgggcatggtggtatgcacctgtaatcccagctactcgggaggctgaggcaggagaatcgcttgaacctgggaggcaaagtttgcagcgagccaagatcgtgccactgcacactccagcttgggcgacagagtgagaccctgtctcaaaaaaaaaaaaaaaaaaaaaaaaaaagactgcaggtggcataatgagaacagagcttgacacatccaacaaggatggactttaatttaactcaattaatttttttagaggtagattcttccctatgttgcctgagctggatttgaactcctgggctcatgcaatcctcctgccttggcctcccaaatagccggactacaggtgcacaccaccatgcccagttctagacctaatttgatcaaatgggatgcccatcctgtaaaggctccgccgtggcctggtgtctctcatgtctcagggaggccctaggggctgacccacctcgaaggaagaaggtgtcgtgctggtcacgggctgggtgctgctggggctggaagagggcgtcaaagttccagaaggagctctcaatgaagttatcagtcggcatctcggtgaacctggtgggagacgcagcctgactgccctgcctgtacccagcagaagcaccaggcaccgcccccagccctgtgctcaccccatctccaggaagatctgtcggaactgggagcggaccttgagcagcgggtgaaggtggccgctgtcggggaggacaccgtgggccaagaagttgtagggcttgaagggccggtcccgccaagagccactgggggaggatgcaagggcctggtaagggctgcccgcccctgccccctgccccagctcccacctgccctgaccctggggttgcctgctacctggagatcatctctgggctcagctctgtctcttgcttggagatgctggtactaaaggcactgcctttgctcacccagtaggtcttcagagtcctgtggccaggggaaggaaggggacgccactgccatctcctcctagaggacttccttgatctcccgtctgatgaggatccccatgctacctaccaagtcactctgctttatttccatcctgacatttatcactacctgaaatcctcctatgtgaccatgctgtatctccctgtattcactcactgattcattcaacacttactgagaacctaatgtgtgccagggtctgttcaaggtgctaagtacacgactgagtgatgatactagggaaagtctagcagatttattctgtgccaggctctgttctgcaaaagtctccccacaagccccggaaagagggcagttttttttatttgtttgtttgttttccttttttgagacagagttttgctcttgttgcctaggctagagtgcaatggcacggtctcagctcactgcatcctccacctcccagattcaagcgattctcctgcctcagcctccagagtagctgggattacaggcacccgccaccacacccggctaagttttgtattttcagtaaagacgaggtttcaccatgttggccaggctggtctcgaactcctgacctcaggtgatttgcccgcctcggcctcccaaagtgctgggattacaggcatgagccatcgtgcctggcccctttttctttgagatgggggtctctctatgttgcccaggctggccttgaattcatggattcaagtgatcctaacacttcagcctcctgagtagctgggattacacacgtgagccacacacttggcccaggctattttatagataaggaaacggagaccagcaaaggccaggtgacttggccaaggtcataaaactagttaagtgacagagcccgaacttcagttaggcatcccagctctagtctcttctctctgccactctgtgtctgctcaaaggggacatttgtcctgtgagaggacggcccctagcccatctaggttccagaagcctgtctggtgtgtgttcattaaactttggaccacactaaggacagtgaaagaaatgaacaagcaccaaagatgaagactaggggcgatgggcttcatggaactcaaggggagaggagggctgtcagggtggcctctttaaggggacacaggagagagacttgatgaggagcctatcttgaagatcagagggaaaacagttctcagcagaagggtcctcatgggcaaagaccccaaggcacgtaggcttgacaactatggcattaagcgagctgggaggaaactggccacacctgtgcttggtgtgggcaagatgtctccctcccaccatgcctccaccatgcttcgcaggtggtgggggcctgagcctgcagggggcacccactcacacttcagccaacagcttcctcttcctcagctcgctcctctccttctcccccagcttctcagcctgtcccccccggaccagctggagccgccgctgcacctcatcctccatgctgtccacctgccaggataaggagtgtgaggggtatgagggccaggggcccatgtgcccgtccacctgccccctgaccagcccgcaggaacgcaccactcggaacacccggggcccgtcagccgcactcttgtccacccgaatccacttgttggacatggccttgctgaagcccactttgccactgggcagtcgctggaaaagagaggctgcagtgagtggggcacgagggccaccttcatcccatcactcactccccattcaccccgcagctcctaccataagctcgctctgggccaggccctctgggggaatgcttcgaaacacacgggcctcatggctgccctcccgggcaatctcctcgccctccgcagtaagctcccagtgcttggtggaccgaagttcagcctcgatgacctagagggaaatgtggggagggtgtccaggcaggggtgaggctcagagccaggcaccccctttctgcagcgctgggtcccaggttgaaagcacagcccttaaagctaggttcacatcccagctatacaactttacagccaagtggtctcaagggaaagacttccccttgctgtgtctccatttcccttatgtaacacaggggtagtaataatgatagtttacacctcccagggtaaagtacaccactaaagatgttacctggcagaagacaaattctgtcggttttgaacctgtgacagattttaatgtgaaaaattaggtgaactgatatgtctccacatttttttgtttgtttttgttttctttgaaagggggtctcaccctgtcactaggctgggtgcagtggtgtgatcatagctcactgcagcctagacctcctgggctcaagcgatccttccgccagtcccgagtagctgggactacaggcatgtgccgccacacctggttaatttttaaattactttttttttttgagacggagtcttgcactgtcgctcaggctagagtgcaatggtgcgatctcggttcactgcaacctctgcctcccgggttcaaatgattctcctgcctcagcctcccgagtagctcggattacaggtgcccaccaccacccccagctaatttttgtatttttagtagagatggggtttcaccatgttggccaggctggtctcaaactcctgacctcgtaatcggccgactccgcctcccaaagtgctaggattacaggcgtgagccgccgtgcccggccctttaaattactttttaaagacagggtgttgttatgttgtccaggctggtctcaaactcctggcctcaagtgattctccttcctcagcctcccaaagtgctggcataatgggcatgagccaccatacccagcctgtctccatgtttaaatgttcacatgtcagtgcccagaatgtcagagacgggccctggaggtccacattacaaacaaaaactgaggttccaggtccagagtcatgaagacaaggacaacaagggtaagtagagtgcacagggcctggctcccacttcattctaatcccaactctgcccttcacttactgtgtgacctcaggaaagttgcttaacctctcagtgactcttctcatccataagagaaaggtgtgatgggttctacctcagatgattttaaggagtagctaaattaatactcagaaagaatatatagtgcctaccacgtgacaaacactgcataaatttttttttttttttttttttgagacggagtctcgctctgtcgcccaggctggagtgcgatctcggctcactgcaacctccacctcccgattcaaaaaattctctgcctcagcctcccaagtagctgggattacgggtgcccaccaacacgcctggctaatttttttttgtatttttagtagagacagggtttcatcatcttggccaggctggtcttgaactcctgacctcgtgatccacccgccttggtctcccaaagtgctgggattacaggtgtgaccactgcacccggcataaattctaattactataattatttttatggctattactgtcattagattgaacctcacctccttatattatttaaccctctgtgacgtatacaaatgtcagatcatattggtcaaggcactgtcaccccacacaacacagctgccatctctcctctgcattgaggactatgggctctgcagcctgagtgcctaatttcaaatctgggctcatcggcctcttctattcacactgattatgttactgaccatcagttgtcacatctgcaaaatgggaataacatggccatcagccaggattatggaatggattggacaaacaagctgagaccaaagtggggcacagaacatgagctctacggataaacagcccagatcctggccccatggatctagccttctgggtggcccacgggcccctcagcatcctacgcctgtgactctgtcactgtccacttgcccaagtcagaaggctggacttcatctgtgcgccccctgccttgtcctgaatcccacgccttccccacctcccccaagcttccttcccatagccagacatcatgccctccagcttggggaagtgccagcttcttctttcatcccttcacctccagtcctgtccatgccaattcttcccaaaggtgatgtggatagcacactcatctgaccggctctagctcctgctatcgcttcccagttccctcatgaggtaaagacctaagaggctttgcaattacagctatgctggtctcccttgccgcctgccatcccccaagatcccggccactgatctctaaagtgctatcactttcctcaacagagaacagactcagccgtcacctgcaccaggccgctctccctgacccccaaggctgggtcagctgtcacagctgggtcccctgttttcccccatcactctggttcttgaagcaccttcctattacgtcgcaacctgcgtgagggcagcaaccgcgcttcctcgtccatcatcgtaccctctacccacgctgaccgtgcctcaataaacgtttattgcatgaggaacatccgtgcgtctgggccctcactcgtcccacttcccgcccgcacatcccggagtggacacatatacagctaccccaaactaggcctgagggaatttggcttggacgtagagcgcccgtggcaaggggactgtaggtgcaagggcaaggcggtccggcatcacgggcccggctcacctcgcccagcgcctgaaggctcttcacggcgcccaccaccgcctggtgctccatgcccagctcagccgccaactcggcgctgtccaggccgccatcagacgcctccagccgccggagcagcagttccgccacctgaccatccgccatgactccttccagtgtgctcagcgtgtccgggccagggtgggcggggggagctgagccaccggaaccggaaccggagtgtgtaccgccatcttgaatgtgtctaactgtagaacagggctcaatgtgtcgtcatcttgagtgtggcgacggagccgcaaaaggtgcatgggactcagttcccacctccaccctggctccatcaatggcgtctggttgaccagaggggtaaaattgattatctcaaggtcagaagcaccgccctgttttgagttttatctagcctcacttcgagcgggctgtgtgaccttggacttccccgtctctgggttacagaaccctctgcccttctggtattctctcttgccctaggagaggcggtgggtggtgggctccagagatggtcattttggcgatgtcagctacttttaaaatttcaaaggaaggctgggtaggtaccgtccctttttatagagggaaaaggaattcacctagtaagtcaaggtggcacctaacctgtgtggactacctcgtatgtggtagtacttagcccagaactgagtacttcacgtgtagtatttcatttatccccaaaactttatgatgtagatactgatataaccgcattacacatgtgagaaaactgaggctcagagggtggtatgacttgcccaaggttctacagagagttggtggaaatgaagtcataaattataaaccttccagatcctcccacccctgtgcgctgagagtaacgtcagtgcaaatactgcatggcctagattagcactgtcctatagaaacacagtgcaaaacatctttcttttttgagacagggtcttgctctgtcacccatgctggagtgcagtggtgcaattatggcttactgcagccttgacttcccaggctctaaggatcctccaaccttaggctcctgagtagctggaactgcaggtgcgcgccaccacacccagctttttttttttttttaagtatgggttttggccatgttgcccaggctggtctcaaactcctaggctcaggttatcctcctgcatcggtctcccaaaatgctggcattagaggcatgacccacctcgcccagccagccagaccctgactcttacaaaaaaaaagatgactaataaaatattttgcactcggccgggcacagtggctcacctctgtaatcccagcactttgggaggccgaggcgggtggatcacctgaggtcgggagtttgagaccagcctgaccaacatggagaaaccccgtctctactaaaaatacaaaattagcagggcgtggtggcgcatgcctgtaatctcagctacttgggaggctgaggcaggagagtcgcttgaacctgggaggcagaggttgtggtgagccgagatcgtgtcattgcactccagcctgggtgacaaggcgaaactccgtctcaaaaaaaaaaaaattgcactttttttcatactaaatcttcaaaatctgatgcgtattttacacttacaacacatctcagttcggaccaaccacatttcaaatggtcagtaatcacatgtgggcagtggtgacttacgtcagcacaggtagattagaatcctagatctgctggccaggctcagtaatcccagcactttgggaggctgaggcgggtgaatcacctgaggtcaggagttcaagaccagcttggccaagatggcgaaaccccatctcctctaaaaacacaaaaattagctgggtgcagtgggggtgcctgtaatcccagctacacgggaagctgaggcaggagaatcacttgagcctggtaggtggagcttgcagtgagcagagatcgcaccactgcactccagcctcggtgacagagcaaggctctgtctcaaaaaaaaaaaaaaaaaaaaaaaagaatcctagatctgttatttatgtcattcaaccagaaggtgtagtctttctgtgcctcagtttcttgctcacatggaggtgattggagcccaggttactgtgagaattaaatgcccacacatattcacactgcttactaaattgagtgtggcccatgttcgaacactcttataagcagaacacatttattccttttacatcacaattattatttgagtctgtaaaatgggattactcatatccccaaatcctgaccctatatgaggttctgtattaaggatacatttctcaaagtcccttctctcctcccattttatgttgattatttatttatttatttagggagtgggtctcactctattgcccaggctggagtgcagtggcatgatcttggctgactgcagcctccacctcctgggctcaagcaatcctctcacctcagcctcccgagtagttgggactacaggtgtgtaccagcaggccaggctaatttgtgttatgtatattatatattatatgctatatataatatacatactattcatatatttatgcattatatgtcatatataatatattacatatgtgtacatatatatattttgtaagaatgaggttccaccatgttgcccaggctggttttgaactgccgggctcaaacaatctgcctgcctcaggttcccaaggtgctaggattataagtgtgaactaccatgtccggcttatttttatttatttttgagacagggtcttgctctgtaacccaggctagagtgtgcagtggcaacaacacagctcacggcagcgtcaacctcctggtctcaagtgatcctcctgcctcagccttctgagtagctgggaacacaggcaggcgccaccacgcctggcaattaaaaaaaatgtttttgtaaaaatggcctcctgctatgttgcccaggctggtcttgaactcctggccttaagcattcctcccatcttggcctgccaaagtgttgggattacaggcgtgagccactgtgccccgtgtgtttttagttaatttccacaagagtccttccttcctctcttctatcatgcagcaagtactttttaagcctgttctgtgccaggtgctgcaggtgacactggaggatgcgaagtgaacaaaacaggcagtgtctaacctcaagtaggaagcgccaagcccacaggtgcctgacacaggaacaggaggaagggtcagcaagaggcctgggatggtccccgggatcctcatgggggggaccagactaggcaatactgaatactacctagaggaagtggtagaaccccaacttcccagttcattctcccccgtctttttttcgagatggagtcttgctctgtcacctgggctggtgggctggagtggagtggcgtgatcttggctcactgcaatctctggctcccaggttcaagcgattctcccacctcagcctcccgagtactgggattagaggcacccgccaccacgcctggctaatttttatttatttatttatttttatttttagtggagatgggttttcaccttgttggccaggctggtctcgaactgacctaaaatgatctgcccgcctcggcctccccaagtgctgggtttacaggcgtgagccactgcgcccggccaccatttcttttttttttttttaaccagagacccttgccaagtcattccccccactccactttattttccttttcattttttccttcctctcttttctgagtcacaaccattagccaggaagcaccccctccccaccctctttcctggatccccctcattccctccttccatagtccactcccgcgctcccaggtccagggcttatttgcccagagtttggaaaacccccagctctccttcctcctttctacagcgtgggggcagggtactggtgccagtcacgtgcctctggcttctgaagaagactctagactggggtcggggggtgggtcctgcccatctccctagcatcttatcgtccctaccatctgtgtcttttttccctccccaaacggaaccccctgccctctcgcctgcctatagccgtttaattgcaaaagccaggccgtttgtgggagaccacagacagcgacccccttcatttaccggttgagaggagggtaaaggggcggctgcaatctgggtaataaccctatccccactccaggagtcacagtcacatcgttaagccttcctcccctcttgtcccaggacagctttaaaaacgttaaaagcatttctgctgggtagcatctggccagggtcgccccctctgtctgctcaggaacgtctgtcacttcagagagcttaagtgacttgccccggtcacacagcagcagtccgataggctgccagggctctaggggcagaaggaggagagggctggcattcttcccaccggcccgcgtgactgtagcaccggggtgcagcgaagccccaagggccccaatccgtgagctctctcccatcccaggcaggggtgggggagcagcagtggggtgctggttctcaaatgcaagataagagctggctaagaaagccttgcccagcccctccacctagagggaatgggagggagagaagctgagggcagggtcccggtcccgcgtggagacagctgcgctcccgcggtttctttaaacgcccagatgggcaacgacgcgcgcggacgagggcggggttgggttcaggtctggtcacatgacctggcctgaggtgctcgcggcccccaccccaccagtgggcgtcccccccacgcgtggtcgaccatcattggtcggtggtgaggccaatagaaatcggccatctgggaacccagcgttccgaggcgcagcctaacatagtgaaccgacgaaggtccaatggaaaaagacggccatgggcatagaccaatgacaaagtggcaggggcgggcccaagggctgggtcaggttggtttgagaggcgggtgggtataaaagtgcaaggcgggcggcggcgtccgtccgtactgcagagccgctgccggagggtcgttttaaagggcccgcgcgttgccgccccctcggcccgccatgctgctatccgtgccgctgctgctcggcctcctcggcctggccgtcgccgagcctgccgtctacttcaaggagcagtttctggacggaggtaacgcctggtcccgcctcgaggccgccccgacgacgcggccggcccccgatcctggatctgcgttgtcgcccgtaattaccgtttagaggtccaacacggtggcctcccgggactagagccgcgggcgatttctcttctgcgtccctggggagcgcggagggcgtagcggcctcccgcggcgggagttagggttagcccgaggatctctgaaggcacccgacgtgtcaaactagaggttggaatggggagtgtcggggatctcctttcctgtccccagcagcttgtggctctcggcagatgtttggtgtggggggggattagcacagccgctctgacctacccctctaatcccccacttagacgggtggacttcccgctggatcgaatccaaacacaagtcagattttggcaaattcgttctcagttccggcaagttctacggtgacgaggagaaagataaaggtaagagcctaggagtgggtgctcagatccgggaggacttcctggcagaagtccttgtctgtacacacacagccgggacagtccccttggaggaggacaggtggaggaagtgggggagtcttctctattctctaagtcgagggtcctcgcgagtcaaggcccaacggtgacctcactaccgtcccgtctcaggtttgcagacaagccaggatgcacgcttttatgctctgtcggccagtttcgagcctttcagcaacaaaggccagacgctggtggtgcagttcacggtgaaacatgagcagaacatcgactgtgggggcggctatgtgaagctgtttcctaatagtttggaccagacagacatgcacggagactcagaatacaacatcatgtttggtgagggcctgcttcctggtgctgatctctgtcccattagttagagggagacccagaccccattgactttcttaataatgattttttttggaaggggagctaaaagaataagtcccagcaacaatttattgcattatgatcgcagatctaggctgttaatttaatttgcgtgtttgtatatagttatttcccaatcttactaatgaggattttgagttctagagcactgattttttttttttctcctttaaacttaaggctccacccacagcccattcaggacagaatcagggtctgagtttctcttctcagccttgacagacccgagttgaagaaccaggtcttccttttataaagaggggtgagagcctcgagatgatgggtagtctctgactcttaactggatctgcttcacacctaggtcccgacatctgtggccctggcaccaagaaggttcatgtcatcttcaactacaagggcaagaacgtgctgatcaacaaggacatccgttgcaaggtgtgcctgggggtggtggcaaatggctgtcatggggagattcagaggtcagcctcattggggggtggcccccgctcaccttcttccttcttcaggatgatgagtttacacacctgtacacactgattgtgcggccagacaacacctatgaggtgaagattgacaacagccaggtggagtccggctccttggaagacgattgggacttcctgccacccaagaagataaaggatcctgatgcttcaaaaccggaagactgggatgagcgggccaagatcgatgatcccacagactccaagcctgaggttggtgtttgggcaggggctctgctctccacattggagggtgtggaagacatctgggccaactctgatctcttcatctaccccccaggactgggacaagcccgagcatatccctgaccctgatgctaagaagcccgaggactgggatgaagagatggacggagagtgggaacccccagtgattcagaaccctgagtacaaggtgagtttggggctctgagcagggctggggctcacagtggggagtgcaccaaccttactcacccttcggtttccttctcccttctgcagggtgagtggaagccccggcagatcgacaacccagattacaagggcacttggatccacccagaaattgacaaccccgagtattctcccgatcccagtatctatgcctatgataactttggcgtgctgggcctggacctctggcaggtgagacttggaggaaaaaggaggatccctggggtacctcaagtgcataagatcacccaagaggaaagggacagggtaggcaccccaggtgagtctgactcaaaaatggtacttcttgtaaacagtacttcctggtctgtccctgtgaagtcctcacagcaacccctttaaggttatacttgctgtgcaccaagtacttccccaagtacttttatgcaaatcaacttctttacccccaaagacctagaaggtggtcaggtaacccagttagttagctggggctgggcacagtggctcacccttacaatcacggtactttgggaggctgagacagaggattgcttgaggccaggagttacacaactcaacctagcttggcaacacagcgaggagaccctatctctacaaaaaaaatttttttttttgagacagagtttcactcttgttgctgaggctggagtgcaatggcacgatctcagctcactgcgccctccgtctcctggtttcaagcgattctcctgcctcagcctccggagtagctgggattacaggcatgtgctactatggatgccaggctaatttttttttttttttttgagaccgtgccttgctctgtcgcccaggctggagtgcagtggtgtgatctctgctcactgcaagctccgcacgaccccccaggttcactccattcttctgcctcagggtcccgagtaactgggactacaggcaccccccaccatgcctggctaatttttttgtatttttttttttagtacagacatggtttcaccgtgttagccaggatggtctccatctcctgacctcatgaaccacccaccttggcctcccaaagtgctgggattacaggcgtgagccacctcacccagcctttttgtagagacagggcttcatgttgcccaggttggtctcgaactcctggcctcaggtcatctgcccgcctcggcctcccaaagtgctgggattacaagggttagccaccatgcctagcctctacaaaaactttaaaaattggcgagatgtcatgcatacctgtagtcccaactaccaaggaagaaggatgatcacttgagcctggggcatcgaggctgcagtgagccatgattatgtcactgcactccagcctcggtgacagagtgagaccctctcaaaaaaagttgggacttggccggacacagtggctcacacctgtaatcccagcactttgggaggccaaggcgggtggatcacaaggtcaggagatggagaccatcctggctaacatggtgaatgaaaccccatctctagtaaaaatacaaaaaatttgcccggtgtggtggtgggcgcctgtagtcccagctactcgggaggctgaggcaaaaggatgacgtgaacccgggaggcggagcttgcagtgagccgagatcatgccattgcactccagcctgggtgatagcgagactctgtcccaaaaaaaaaaaaaaatgctgggactgaatttttgtctgttttggtcactgaaataccttctgtgcccaagacagttctggcatgtagtaggtacctgaaaaatacctgaataagagagtgagaaacaagaaacaggtgcagagaactgaagtcagtggcccaaggtcatgggggtaggaaccacaaagctggggtttgaacctgggcagtacagcacctgagtctctccatcttttttttttttttttttaagacagagtcttgctctgtcacccaggttggagtgcagtggcttgatctcggctcactgcagcctctgccttccaggttcaagtgattctcatgcctcatcctctcgagcagctggaattacaggcatgcgccacgacgctgggcttttttttttttgagatggaatttcactcttgttgcccaggctggagtgcaatgatgcaatctcggcggctcaccacaacctctgcatcccagattcaagcgattctcctgcctcggcctcctgagtagctgggattacagggatgcgccatcacagaccccgggctaattttttttagtagagacagagtttcactatgttgcccaggttggtctcgaactcctggcctcaagtgatccgttcgccatgacctcccaaagtgctgggattacaggcatgagcccgtcccgtccctggctgtctctccatctttccatcttttttttttttttttttttttttggagatggagtctcactctgtcacccaggctggagtgcagtggcacgatcttggctcactgcaagctccgcctcctgggttcacatcattctcctgtctcagcctcccaaatagctgggactacaggcacttgccaccacgcctggctgattttttgtatttttagtagagacggggtttcaccgtgttagccagggtggtctcgatctcctgacctcgtgatccgcccaccttggcctctgggcgaggattacaggcgtgatccacctcacctggcctctccatctttttaactgcagtgtcagcggtgttccttgtcttctctgcagatgcaggcagcagaatatagtggttataggaacacaggtggaaaccctgtccaaagcaagggctatcgggtatcacctctgaccatccttcccattcatcctccaggtcaagtctggcaccatctttgacaacttcctcatcaccaacgatgaggcatacgctgaggagtttggcaacgagacgtggggcgtaacaaaggtgaggcctggtcctggtcctgatgtcgggggcgggcagggctggcagggggcaaggccctgaggtgtgtgctctgcctgcaggcagcagagaaacaaatgaaggacaaacaggacgaggagcagaggcttaaggaggaggaagaagacaagaaacgcaaagaggaggaggaggcagaggacaaggaggatgatgaggacaaagatgaggatgaggaggatgaggaggacaaggaggaagatgaggaggaagatgtccccggccaggccaaggacgagctgtagagaggcctgcctccagggctggactgaggcctgagcgctcctgccgcagagcttgccgcgccaaataatgtctctgtgagactcgagaactttcatttttttccaggctggttcggatttggggtggattttggttttgttcccctcctccactctcccccaccccctccccgccctttttttttttttttttaaactggtattttatctttgattctccttcagccctcacccctggttctcatctttcttgatcaacatcttttcttgcctctgtccccttctctcatctcttagctcccctccaacctggggggcagtggtgtggagaagccacaggcctgagatttcatctgctctccttcctggagcccagaggagggcagcagaagggggtggtgtctccaaccccccagcactgaggaagaacggggctcttctcatttcacccctccctttctcccctgcccccaggactgggccacttctgggtggggcagtgggtcccagattggctcacactgagaatgtaagaactacaaacaaaatttctattaaattaaattttgtgtctcccccctgtgtctccttctggggaaagacagacttaaggaaacccagcagtggtctttttggggggggggggggtttccagtatatctcctttttcagctattgctagagaggttgctgagtgttccacaagattccagggacccttatttaccccataaccctcaaaaccaacgggggaatggctgttgctgctgtaaatactccacatactaacttactgaatccttgaacctaactggtaagttttggttctgcttatttatttatttttaagatagactctcgctctgttgtccaggctggcgtacagtggctcaatctggttcaccctgccccttaaactggcctttttcatgcttctattcctttggggtcctgtggctcagcccaacccctctgggatgcctccaggactggtagatccaagggagaattctgtatttaatgtagtgaggctttgaaagttaacatctttaaatacttctggggtcagattaggtatagtacaacaaagtactcctgcccggagacccaagaatgaaaattgtaggttcattccaaaactccagatccctaaagaatgaatgaggctacaaaatggcaccttgcccccgcttccaacttaaggttttttttctgtgcttggtggcctttcaggtatttctagttttgagtaactttcactttgactgctctacaagggttcctgccaggatacccagaccagaataaaactcatttgggggccgggtacggtggttcacgcctgtaatcccagcactttgggaggccgaggcgggtggatcacctgaggtcaggagttttgagaccagcctggccaacacggtgaaacccaatacaaaaaattatccgggcgtggtggggggtgcctgtaatcccagttactcgggaggctgaggcaggagaattgcatgaacccggaaggcggaagctgcagtgagccgagatcgcgccactgcactccagcctgggtgacagagactgtttgaaagaaaaaattctcatttggaagaggcaaaatgaggtttttacagaagaaatacaaatgtctgtaaccagtacaggtacataaaaactttgttaaaaattcatttgagcgtgagagtggggacaccagagtcactttgcagccccgtgacgtcaccgataacgggcatggcgtcactcaggagaccacgtgtgcgggccgagcaagaagccccgcccacagcgcggagtttagtctgcgcgtacctcgctcgagaacgcgctcgtgcgcatgcccacaaaggccaaggagggagtgcgcaggtcacgtgcgccggtggtcagcgcgcgcattgcctgccccggaagtggtcggcgcgcggcgcggcgcgcctgggcgctaagatggcggcggcgtgagttgcatgttgtgtgaggatcccggggccgccgcgtcgctcgggccccgccatggccgtcaccatcacgctcaaaacgctgcagcagcagaccttcaagatccgcatggagcctgacgagacggtgcgggccgggccggagcccgggggcgggagcgacgggtttcgggggtggggtgggggcggggaggctagaatcccaacgggaggggcagggaggacggcgcgggtcggccctgcccagacccccgacctgcccgactttcctggaccccccgatggtctttggcccagcccccagccgatcgggcggcgctcctgcgccggtctccgggcgaggccccacccccggggcgctggccaggccccggctccaatgtcagcgctctcgcggggcgcgggagtcacaagctcggattcctgggcaggccaagctctccaagactgggctccacgttcccagctttgcaggcgtctccttgggacactggtggtcgaatctaggagtaatgaccaggagatactgagtagtgacgacaacaacgatgttaatgataataaacgggtctcagtctttataattttggtggtccgtgtttgttggccgtttactttttatcagtcaccgagtgttgtagtgttgttttaccgctctgcaaaacgggcttgtcattggggacctctgatcattttacagatgtggaaacctagggattgaggaactttgccacagtcacacacaagtaatggcagagctgggattcaaattcggttctgcctcgtgtgagcgtccacgatataaatattatgctgcctttttagtcaaaagtagaattaggacctaattcaaacatactgaatgtctattgggtacttggcgctttttgcatagtgagggagacattgaagtccactttttgtagaaaaggaaacacacattttttgatccgctcaagtgtttggctttgggcaagttaacctgcctacctgtctgtgcctccgttttctcaaatatcaaatgaaccggtcgcctgctggcttccgcctgtaatcccagcacttagggaggcagagggaagaggagcccttgagcctaggaattcgagatcatcctggcaacacagtgagaccccgttctctacaaaaaaaagaaacaaaaatcaataaataaaatgagaccaattaaacgtatttcataggaaacttaaaaggtatgacacatatacatttacagtagcactattggccaggcacggtggctcatgcctctaatcctgatgatttgggaggcagaggcaggaggattgcttgaggccaggagtttgagaccagccagtctaacatagggagacttatctacaaaaaaaaattatttttaattagtctggagtggtggtgtgtacctttagtcctagctactcccaaggctggacaagagtaccagttgagcccaggagtttgaggctgcagtcagcgatgatcgtgccacatcaatccagcatgggcggcagcgagatcctgcctcttaaaattaaaaaatatcactattaactattagtcacttattgtccaaggtagagtgtagagtgggggactgtcccctttattctgttaattatactttatactacccgaaattacattttcttcacattagtgttctctcattgagagcagggacttacttgtgttgagtttgttctgtgctgtggcctctgtgtctaaaacagcacctggcacataatgggtgtttagtataagtaaatactgtgttgaatggcatgatgattgaatgaattcaaatctagcatgctttagatgctgagaaagcttaaaaaacccagcgtgcttgcctttctgccatcagggctggcagtttctctgtcctaaactagaagggaaaagagaatcttggggtctccagtgactgtctgtaccactccctctaggtgaaggtgctaaaggagaagatagaagctgagaagggtcgtgatgccttccccgtggctggacagaaactcatctatgccggcaagatcttgagtgacgatgtccctatcagggactatcgcatcgatgagaagaactttgtggtcgtcatggtgaccaaggtgggtgacgtgtgctggctgggagggtgggtggacgagctggggagctggcaaagagcctgtgtgcccaggagagattagctgtgaacagggcggggccacagcggagcgggttgttgggtctgatagggttgctgatgccagctccctttttcttgctgttgcagaccaaagccggccagggtacctcagcacccccagaggcctcacccacagctgccccagagtcctctacatccttcccgcctgcccccacctcaggcatgtcccatcccccacctgccgccagagaggacaagagcccatcagaggaatccgcccccacgacgtccccagagtctgtgtcagggtaaggcgggggcagcagtcccagcttgggccctgtcctcctagcacattccagcgtccacataagtggtcccacacacctggagggagggcaagccgccagaagccagggtccgatttctctctcttgaatttgcagctctgttccctcttcaggtagcagcgggcgagaggaagacgcggcctccacgctaggtgggtgggtggtccccagggcagaggtgactgggtgccccagccatcagctgggccttgtctgggtgcgggagggcctgggagctgccctttcctcttcctggtgacctaggctttgctgcttcctccacagtgacgggctctgagtatgagacgatgctgacggagatcatgtccatgggctatgagcgagagcgggtcgtggccgccctgagagccagctacaacaacccccaccgagccgtggagtatctgctcacggtgaggtggggcttccgcctcccggggaggccttgagggagtacccgggcgtcactgccctgatgggcggttgggaaggcaaaacctgccctgaaaagcctttgggtagtgattctagccactaaaggcttcccacaggaggctggatgtgagtgatgggtgggcctctggagggcagggccgaggcctcatctgtgtcctgccagggcatggaggagggtggcagcaggaggtctgtgcattagaactaaacaggacccctgacagggaattcctgggagccccgagccggaacacggttctgtccaggagagccaggtatcggagcagccggccacggaagcaggtgggtgtgcacatgccgcatctgccctccaggtacctgactcacattacactccaccccgcagtgctcctaggagcccggcgtggtgtctgactgcaccccttcctactaccagcaggagagaaccccctggagttcctgcgggaccagccccagttccagaacatgcggcaggtgattcagcagaaccctgcgctgctgcccgccctgctccagcagctgggccaggagaaccctcagcttttacaggtgtggtcccaagggcagagggagctagggcagccaccatttcccttccctgtgggcaccagagtccataacacgtaggaatcgttctaggtccggaaagcaggactaagcacatgcttcccccacgcccctgtgcttcctgtgacctggtgacccccctggtttctcagtcttcccaaccaccttgtaaggtgtgggtgctgtcaacatcacctcccacagaagaagacaccggaaacttagagcagcctgtcattcccagggtcacgcagctggtagtgtgtgtgtctgcctcctgcctcggggtggggtcctgggctggggctctggcttcacatacagatggtgctgcgtaaatgtctgtaaggtggcatgacgtcacccaggacagctgtgccccagttggctctgggacaactctgctcagtgaggctccatcttgcccttgaaggttcacaggaagagtgggggagtggccccctgggtgcaagtaggttcctctgggttctcggtgaagtgcctaccggtcttggctcaggaccctgctgtctgacccttctcctctcacttctcagtcccttgccagctcctcctggtcggtcgtgttcttcatctgcactcagccctccctcatagtgtcctggggccttcagtctgtatgggaacccccaaatctatgtagccagcccaggcctctctgaatgccacactccatggctggcttaattaactctccatcaaagtgctccctagactagacgtctaagacttagaacagacctccccagtcctccccgatctctgcaaggattagcttggggttgcttcagccccaggccctggggatctgctggggtctaccccttgtcctgtctgctcttcccactcagcccctccctgcactccagctctctggtagcctcttcctgggcctctgccactgcatagtcccacagtccacttttcaaccatgaggcagatgactaaaaagcactttcttttctttttttttttgagaggaaatctcgctctgtcgcccaggctggagtgcaatggcgcaatcccggctcactgcaacctccgcctcccgggttcaagcgattcttttgcccccgcccgagtagctgggactacaggcgcccgccaccacgcctgactaattttttgtatttttagtagagatgggatttcaccctgttagccaggatggtctcaatctcctgacctgatgatctgcccgccttggcctcccaaagtgctgcaattacaggcatgagccatcacacctggctgactgaaaagcactttcttctttaatgtgaaaatgatcagatgcatacaatggtagagttatatcagagcttccagatacccaggtagggcacagtggctcatgcctgtaatcccagcactttgggaggctaaggcaggcagaccacttggtcaggagttttagaccagcctggccaacatggcaaaaactcgtctctactataaatacaaaaagtagctgagcatggcggcaggccactgtagtcccagctactcaggaggtggaggcaggagaatcgcttgaacccaggaggcagaaattacagtgaaccgagattgccccactgcactccagcctgggtgacagagtgagagtgtctcaaaaagaacagaaacaaaaatgaacaaatgaacttccagatacctaaatccaacacccagatgagttcactttttttggtttgggggctggtaggtgggaatagagatagggtctatgttgcccaggctggttttgaactcttgggcccaagcagtccctcctgccttgcctcccaaattgttgaggttacaggcgtgagccaccacacccggccaagttcacctttctaaaagatccacagaccacgtcttttcccatgtaactgtcaccaccgtggcttccccctgctctagaaaatgggtctgacttgggccttcctctctggtgtcattgtctgcctcctcccccttcccttgttcgctgttttttgttttttttgttgttgttgtttgtttgtttttgagatggagtttcgctcttgttgcccaggctggagtgcagtggcgtgatctcagctcaccgtaacctccgcctcctgggttcaagagattctcctgcctcagcccccagagtagctgggattacaggcatgtgccaccacgccctgctaattttatatttttagtagagatgggatttctccatgttggtcaggctgctctcaaactcctgacctcaagtgatctgcctgcctcagcctcccaaagtactgggattgcaggcatgaggcaccgtgcccagccccattcactctgttcctgcttctgtttctgagacttcccagatgcatccaccctgggcctttgcacttgctgtttgctttacctggaggaaaccctctgcatctgccatactgcaggcctctccaccagccctcatctgcagttccttcctagccagacacttgcagttgtctggttcatttattggctcactcacttattttttgagagtctcttgcccaggctggagtgcagtggcacagtctcggctccctgcaacctctgcctcccgtgttcaagtgattctcctaccttagccttcttgagtagatgggattacaggcacgtgccatcacacccagctaatttttgtattttagtagagacggagtttcaccatattggccaggctggtctcgaactccaggctggtctagaatcacctgaagtgattataggtgtgaaccactgcagccagcctatttatgtatttatttattcaagacagggtcttgctctgttgcccaggctggagttcagtggcttactgcagcctccgcctcctgggttcagtcttatgcctcagcctgccaagtagctgggattacaggcgtctgccaccacacctggctactttttgtattcttagtagagatgggggttcaccatgttggccaggctggactcgaactcctgacctcaagtgatccacctgcctctgcctcccaaagtgctgggattacaggtgtgagccaccgtgcccggcttatttcttggctcacttaaaagcacatcatcagctcttccagggtagggcttgtgtcgactgctatgttgtgtttggccagaacaggctcctctggatatttgcctgactgaatgaaaaagcaagggctgtgatgacctggggagaggaggggaccagggctgtgaattaccttcccttccccaccctctcctgcagcaaatcagccggcaccaggagcagttcatccagatgctgaacgagccccctggggagctggcggacatctcagatgtggagggggaggtgggcgccataggagaggaggccccgcagatgaactacatccaggtgacgccgcaggagaaagaagctatagagagggtaagaggcctggctgaggggtgactgcaggtgggcaggacccctaccctctcctgctcacacttaacctatcttcccacagttgaaggccctgggcttcccagagagcctggtcatccaggcctatttcgcgtgtgaaaaaaatgagaacttggctgccaacttcctcctgagtcagaactttgatgacgagtgatgccaggaagccaggccaccgaagcccccaccctacccttattccatgaaagttttataaaagaaaaaatatatatatattcatgtttatttaagaaatggaaaaaaaaatcaaaaatcttaaaaaaacaagcaaacagtccagcttcctgtcctcctaaagtggcccctgttcccatctcccgggccagacagctgtccccccgtcctcctccccagcccagcctgctcagagaagctggcaggactgggaggcgacagatgggcccctcttggcctctgtcccagctctctgcagccagacggaaaggcggctgcttgcctctccatcctccgaaaaacccctgaggacccccccccatcctcttctaggatgaggggaagctggagccccaactttgatcctccattggagtggcccaaatctttccatctagggcaagtcctgaaaggcccaaggccccctccccagtctagccttggcctccagcctggagaagggctaacatcagctcattgtcaaggccacccccaccccagaacagaaccgtgtctctgataaaggttttgaagtgaataaagttttaaaaactagccctatggtctgtgcctgctggggctccccgcgcccacctgtctgggtcttggggggctggctgggcacaggcaggcatggtgacgggtgcctggaagggggagaggagtctgtgagtccctgcagattgaggcttccggtgtctcctcccccagtgtgtcatttccaggcagtggaccccagcccaacgttacaaggactgcttctccccggcccccaccatcatcaccacagtctgttttggctatacttccccccccaccagccttgtaattggctaattactggagatgaatgttggtaaacagaagccttcttctcttctgccatctgcttctccattatttgcccattgtacaccccccttttcctcccactgaagccccagttagtcagcagggcctagagtccctgtccccttttgagtacagccaagtgggggattccccagctcttaagtattgggggaggaaccaggggacccagagaggcacaccttgagaggacgcagatctcttcaggggtactgccaggtagcaggctttattgggaagggacaaagcctcaggagctgggtgccccagaggctgctgggtcttgagccacagctgcagccaatgcagcagctcgcgcctccttcttccgtttctgtttttcctccttgaggcgcttgcgctccttcttctctaggtcctggagcagctcctggaagcgggcactccttgggtccacctggtagcccaggagctcctgggcctcagcctgcagtcgggccctcctctccttgtcagcctgggccttctcccagttctcccgctgctgctgctgccagttcacaatcatctgtggcatcttggccatgcactctgcgatgtgctgctccctgcaggggagggagagtgggctgtgacactggcactcagccagggcagagcccacccacccatatctcacccataggcctttgcccacgagcctgcctcctcaactcccccagtagattaactgtcaggaaaagcccttgacaagtgaagaaacaggaagagatgatgagaaagttacctgtgcatgaatttgatcacaagggcatgtcaagccccagtaaaccccaggtgccaaagccaaatcagcatttcactgagctgcctactgagcaagccaagtgccactcccatggataatttcacacctttatttcatagacattgctgagcacttcctgtacagaggccaggcccaattctaggcacaggagtgaaagcaagaaagacatttcccaccaatccttgagtttgtagctaccagtcacagccccatttttttcttttaagttcaggggtacaagtgcaggtttgttacgtaggtaaacttgtgtcatggggtttttttgtacagatttatttcatcactcaggtattaaacctagtacctagaggtcatttttcctgatcctctccctccaccctccaaaaagccctagtgtgtgttgctcccctgtgtgtccatgtgttctcatcatttagctcccacttacaagtgagaacacgttgtatttggttttctgttcctgtgttagtttgctagggatgatagcctccagctcccgtcgtgtccctgcaaaggacatgatctcgttcttttttatgacagcctcatttaaggattagaaaagtaaaagaattaagccctataatggtcatctggctgaggaggggcagaaacaggagtccctgctccatgattccctgcctgggtgatcagacgcatgacttcacttcaccaagcctcagtttcctcatctctaaaattagggcaatcccttcttcctcttaaggctattaggaaaacaagaagattaaacaccaggaacacacttgacctacccccttcacgctccaggatgtggcattatctataagagatgcccctggtctggcccgacgcggtggctcacgcctgtaatcctagcactttgggaggccgaggcagatggatcacctgaggtcaggagtttgagaccagcctggccaatatggcgaaaccccatctctactaaaaatacaaaaaatgagccgggtgtggtggtgggcgcttgtaatcccagctactcgggaggctgaagcaggagaatctcttgatcctgggaggcagaggttgcagtgagctgagattgcactccagcctgggcaacaagagcaaaactctgcctcaaaacaacaacaacaacaacaacaaaaagatgcccctggtccttcagacctgcctctgtatctgacctctgccctcttggttccaggacccatcaccttcctgccctcaccttttccccagccacactggcttcctggctgttctttaaggcatatcgtatctcagggcatttgccccagctgttccctttaccagaaactttctacccaagagatcgccccatagctaagtctggttattcaggtctttgcttaaacatcacctcctcagagaggcctgaggcttcccaaaccaaagctgccctcaggcacacactcttcactcttttaccttcctactagtcggctgtcaccattggtattatcttgcctgtcagctgtcgccatctgatattaagggcccttttggggcctgcctcggcctcccaaataactgggattacaggcacgagccaccgcccccggcctgggacagggtcttgcacacggtatgcgctcagtaaagacttggtggtgatggccggacgtgatggctcacacctgtaatcccggcactttgggaggctgaggcaggtggatcacttgaagtaaggagtttgagaccagcctggccaacatggtggaaccccgtctctactaaaactacaaaaatttgccgggcgtggtggtgcacgcctgtaatcccagctacaccggaggctaaggcgggagaatcgcttgaaccggggaggcggaggttgcagtgagccaagatcttgcgactgcactccagcctgggcaacagagcgagactcttgtctccaaaaaacaaacaaacaaacaaacaaaacttgctgatgaatgactaaatggacgttattctgagtttgttttgcggccaggtgagcgtatacataaatctacaacatgcagatgctgcgacgtgaccccgaaggggtaggcacggtttggggcccagttcgcccacggggcacagagggcagccccgcgtctgcctgcacgcacgcacctctcccgacgcttctgctcttcggccagctgcttcacccgcagcgactcctgcatggtcgccaggctcgggtaccattcgcgttcttcggcctccagctcccgcagctgctccggcgacggccataacgaaccggggaccaccccggaggcggcgccgtaacgcgcgaactgcttagccgcgtagcgcggtcccagctgccaccgcggggtcaggaggtcctcggggtctggccaccggggtcccggcctgcggcgcgggggcggccgcgcccggtagccacgggaacccggggccagggtcgccgccacacctagtaggctgcgtgcctgtcgcacggacgccgccatcttggctgtgcggggtcctcacaggcccgccgggctgtccatgcccggtgcctgagcgcgaggcccggtgtgggccagggcagggcgaggggtgtccctgctgcctcagttcgggggagggcggcgaaggggatagtatgggttttatacgtttccaagtataactttaaattttagttaagcagttactgattaaagtcatttttaattttcactttttttcttctcctttctgcacactgacacttaaaaatacatatttttgtcgggcgcggtggctcacgcctgtaatctcagcactttgggaggccgaggcgggcggatcacctgaggtcgcgagttcgagaccagtcttttttttttttttttttcgagacagagtctcgctctgtcgcccaggctggagggtaacggcgtgatctcgggtcactgtaacctccgccttccgggaggagaggagaaaccccgtctctactaaaaatacaaaattagccgggcatggtggcgcatgcctgtagtcccagctccgcgggaggctgaggcaggagaatcgcttgaacccgggaggcggaggttggggtgggccgagatcgtgccattgcattccagcctgggtaacaagagcgaaactccgtctaaaaaattaataaataaaaataaatacatacatgcatacacacacacacacatatacatatatatatacgctcacctggctacaaatatatatttgtgtatttttttctaagtgttcagtgttctttgggtaaaaattgtatttttgttttttgcatatcagaaaccatactgttttattcatccatgtgtcttctgtgcacacagtagccctccaatgaataatctgaaatcatgttgaatgaacacattgaaaaatcaaaaataagaggctgtggcagggccactgatatggtttggctctgtgtccccaaccaaatctcatcctgaattataatccccatgtgtccagggagggacctgtaatccccacatgtcggggaagggaggtggttggatcacgggggtggtttcccccatgctattcttttttttttttttttgccttcaaaaagtttattttattttattttattattattatactttaagttttagggtacttgtgcacaacgtgcaggtttgttacatatgtatacatgtgccatgttggtgtgctgcacccattaactcgtcatttagcattaggtatatctcctaatgctatccctcccccctccccccaccccacaacagtccccggtgtgtgatgttccctttcctgtgtccatgtggtctcattgttcacttcccacctatgagtgagaacatgcggtgtttggttttttgtccttgagatagtttgctgagaatgatggtttccagtttcatccatgtccctacaaaggacacgaactcatcattttttatggctgcgtaaaaattatatttttaactttacttttatacatttaaactagcatttattaggctgggcttggtggctcacgcctgtaatcccagtactttgggaggctgaagcgggcggatcacttgaggtcaggagttggagaccagcctgaccaacatggcaaaaccttgtctctactaaaaatacaaaaattacctgggcgtggtggtgggcgcctgtaatcccaactactcaggaggctgaggcaggagaatcgcttgaacctgggaggtggaggttgcaatgagctgagatcgtgccattgcactctacccagggtgacagagtgagactctgtctgaacaaacaaacagacaaaaagcccactagcatttattatttttttaatgtaaatgtggctgaacgcggtggttcacacctgtaatcccagcactttgggaggctgaggcaggtatcactgaggtcaggagttcgagaccagcctggccaacatggtgaaaccccgtctttactaaaaatacaaaaattggctgggtgcggtggtgcacacctgtaatcccaactactcgagaagctaaggcaggagaatcgcttgaacccgggaggcggaggttgcagtgagctgagattacaccactgctctccagcctgggcaacagatcgagactctgtctcaaaataaataaataaataaataaataattctgtcacatgctgtgacatggatgaaccttgaggacattaggctaagtgaaagaagccagtcacaaaaggacaaatattgtatgattccacttatatgaggtaactagagtagtcaaattcatagagacagaaagtagattaggagttccaggggttgggggtggaggagtgggagttattgcttataatgtataatatattttatattgtaaaatatacaaaataaataaaacgaatttgtgttttgttttgttttgagtcagagtctcgctctgtctcccaggtgagagtacagtgatgcaatcttggctcactgcaacctctgcctcccagattcaagggattttcgagcctctgcctcctaagtagctgggaccacaggcgcaagccaccaagcctggctgattttcatattttactagagacggggtttcaccacgttggtaaggctggtctcaaactcctgaccttaagtgatctgcccacttcagcctcccaaagtgctaggattacaggtgtgagccaccatgactggccacgttttttttgttttttttttttgtttgtttttttttgagatggagtttagctctgttgcccaagctggagtgcagtggtgcgatctccgctcactgcaagctccgcctccggggttcacgccattctcctgcctcagcctcccgagtagctgggactacaggcgcccgccaccacgcccggctaatttttttgcatttttagtagagagggggtttcaccgtgttagccaggatggtctcgatcgcctgaccttgtgatccacccgcctcggcctcccaaagtgctgggattacaggcatgagccaccgcgcctggcctgttgtttttgtttttaatcacacacgcacaccttctctacccccacaaaaaataactgcagttttctcaagacatgaatgttcatagcaacaccacatatatatgtcattaccaagctggaaatagctcacacccaatgtccatctgaagtagaatggacacctaaattatgctgtttcagccaatggaatactacacaggaatgaaagagcaaatattacatcttctcacagaagatggatgatgcttataagcataatgtgcaacaaaggaagaggacctatatgattgctttttaaattttatttttttgagacagggtattgctctgttgcccaggctagagtgccctggctcggtcatagctcactgcagccttgaattcctgggctcaagcaatcctcccgcctcagtctcttcagtagcaagactataggcatgaaccgctactcccacctacattttaaatttttttgtagagacggggtttctctatgttacccaggttggtcttgaactcctgggctcacctcccctcccctcccctcctttcttgacagggtctcactgttgcccaggctggagtacactggcatatcactgcagcctcaatctcctggtctcaagtggtcctcccacctcgggctcctaagtagctggaacttcaggcactcaccatcaagcctggctaatttttgtattatttgtagagatagagtctcaatatgttgcccagggtggtcctgaattctgggacccaagttatcctcccaccttggcctcccaaaatgttgggattacaggtatgagctaccatgcctgacctcagaattttttcatcttgcaaacctgtaactctatacactcactccccagtttccctttcgcccagtccctggcagtcactattcctttttttttttttttttttgagacggatggagtctcgctccgttgcccaggctggagtgcagtggcgcgatctcggctcactgcaagctccgcctcccgggttcacgccattctcctgcctcagcctcccgagtagctgggactccaggcacccgccaccacacccggctaatttgtttgtatttttggtagagacagggtttcaccgtgttagccaggatggtctcgatcccctgacctcgcgatctgcccgtctcggcctcccaaagtgctgggattacaggcgtgagcaccgcgcccggcctggcagtcactattctaccttgtttctatgaatttgactactctaggtacctcatataagtcgaatcatacggtacttgtccttttgtaactggcttattttttattttgagacagagtcttgctctgttgtccaggctgaagtgcagtggcacaattattataactggctgcagaatcgacctcctggactcaagtgatactcccacctcagcctctcaagtagctgaaactacaggtgctcacctggctaattttttttttttttttttttttttttttgaaacagggtttcgctctgtcgcccaagctagagtgcaggggcgccatctcggctcactacaagctccgccgcccgggttcacgccattcttctgcctcagcctcccgagtagctgggactacaggcgcccgccaccacgcccggctaattttttgtatttttagtagagacggggtttcaccatgttagccaggttggtctcgatctcctgacctcgtgatcctcctgcctcggcctcccaaagtgctgggattacaggcgtgagccaccacacctggcctttttttttttttttttgagacagagtacttactctgttgcccaggctggagcgcagtggcatgatctcggctcactgcaacctctgcctcccaggctcaagcaattctcatgcctcagccacctgagtagctgggactacaggtgtaaaccactgcacctggggctggctgattttaattagtataatatcctaaaatttctttctttctttctttctttctttctttctttctttctttctttctgtctgtctgtctgtctttctttctttctgtctgtctttctttctttctttctgtctttctttctttctttctctttctttctttccttctcttctcttctctccttccttccttcctttctttctttccttccttcctttctctttctttcgacattctctctctatcgcccaggctggagtgcagtggcactgtcttggatcactgcaacccccacctccccggttcaagcaattcttgtgcctcagcctcccgagtagctgggattacaggtgcccgccaccacacctggctaatttttgtatttttcgaggtttcaccatgttggccaggctgatctcaaactcctgacctcaagtgatctgcccacctcagcctcccaaagtgctgggattacaggtgtgagccaccgtgcttggcatatcctaaagtttcatccatgttgtagcacgtgtccgaatttctttttttcttttttttgtatttttagtagagacggggtttccccgcattagccaggatggtctcaatctcctgacctcatgatccgcccgcctcagcctcccaaagtgctgggattacaggcttgagccaccgcacccggccaacgtgtcagtatttctttcctagcctgggcaacactgtgaaaccctgtctctccaaaaaatacaaaaattagctggctatggtggtgcatccctgtagtccctcctacttgggaggctgaggtgggaggtcaattgagcctgggcggtgaagtctgcagtgagctgtgagtatgtcagtgcactccagactgggtgacagagcgagactgtctcaaaaaaaattttttttttcctttttaaggctgaatgctattccattgtatgaatggaccacattttttttttcccaattgcagatgtcaggctgaaagaatggaccacattttaggctgggcacgatggctcatgcctgtaatcccagcactttgggaggccgaggcaggcggattacaaggtcaggagttcgagaacagcctgtggtgaaacgctgtctctactaaaaagacaaaaattagccgagcgtggtggtgcgtgcctgtaatcccagctactcaggaggctgaggcaggagaatcgcctgaacccaggaggtggaggttgcagtgagccaagatagcgccactgcactctagcctgtgtgacagagtgagacttcgtctcgaaaaaaaagaaaaaaaaagcggccaggcacggtggctcacgcctgtaatcccagcactttgggaggccgagacaggcagatc

SEQ ID NO: 61304 - DNA, 1261 bp, Homo Sapiens
gcacgaggagtaaagagaaagaaaagaactgtttttattttttgtctacctttattgtaaggagagagtgaggataccatgccacacatgcagggtcctgagcagagggctgcaccctgcttagttctaaagacacctagactttatcctgaaagccactgagaggcccatattttgaaacactcagcctctcagaagaggatagaatgggttgccagtgtaatagggagagaaatcgaacatagctgactccatgttgcttctgactcctcaagctaactgcttttaggcacttctgcacacgggccaagttaatcatggaaagaacttagattacagtttaactggaaagcaaggatgataagcgttcctttccaaaactaacctctgaggagataagaagggcatgcacacaagtaacaatgttatattgaagacttgtaggagcgctgtgacctgagcaaggacaaagttttgcaatctccttgggcccctgctgatgcccaagtgtctgtggtcaccagccacccccctcacctcagtctcctccttgttccccttcagtgtaccccttcaatgtacaaagaagcttgagattcatgcctttaaagatggttcgttaggacatgggtccagtatcttcctgacttgctggctctccaaataaagatgcttttcttgctctaactttttgtctcgtgaatcattggctgttatgcagtgagcctcaggaactttggactccacagcaccaggacaactctcaggactcccagtctctattgggtgcaggaatcactggggagtctggctgaagtgcagactctgattgaggaggcctgggacacgaggcctgagattctgcatctccagtaagcaccaaggggatgttgatgctgctgatccagggaccacaccttggagagcaatgctgagaagctggtggaagagcccaggctcatgaagatctgaacatggtccatagcagggaggttggggaaatgagataaaaatgttaaaaatggcagttaccttcctggagaagaaatggcttttccattccttattaggctcatgtctttggaactagcccccactggtctccttcctgttatatacctgcagttaccatgttcttgttaaggaagaatggcaaatgcaaaaaaaaaaaaaaaaaaagaggaagttgatcatgtttggttgcttttggtcatcacaataaataaataaaatctgaaatttcaaaaaaaaaaaaaaaaaa

SEQ ID NO: 61305 - DNA, 56093 bp, Homo Sapiens
aagctttacgaggtatgagtatggtaacactctatataaatccctttttcattagaaagacaggaatgttatacataatgctgtcaatctaataaatacacatatcatctagtctttaacttttctgtttatcatttagtcattaaaatttctttggctttctaatgtttttgataaaatttctaaaactctccatatttaatggaggcctatttttttttctagccagaactttttgtagactacatttctggaagtgctcactgacaccactctgaaaaattagtacttagaatatactctaattggtataaatgatctctgaattgctatggaaaactgggagaatggttgcttcaggggagagaaagtaggaggctgtggacagcaatgaggagaattacagttcaccatataacacttttgtacttttaaagtccttaacatttacattattatctattcaattaaaaaatattgggaagattttactttgaacagttaatttttcccccatgggtaccgctgtcatatagttccaactaatcatgaacttgtgtatttcctgttctttgtaaatttaaactttgtaactcaccaggaagtttgaagccaaatttgtgtttcaaatatagcaactccaggatctctaggcagatgcatttgcatttgattttaaatgaatcttgatcccttactctcacttatgttttcccacatcctactttttttattttgttgtaagccatctaaaattctcaatgggatgaaactgggtataaatgaatacatgcatacaggaattatagtagcatattccttttcttttttctttttttttttttttgagacagagtcttgctctgtagcccaggctggagtgcagtggtgcgatctcggctcactatagcctccacctcccaggttcaagcaattctcgtgcctcaacctcccgagtaattgggactacaggtgcatgccaccacacctggctaatttttgtattttttagtagagatggggtttcaccatgttggccaggctgatctcaaactcctgacctcaaagtgatctgcctgccttggtttcccaaagtgctgggattactagcataagccactgcacctggcctccttttctgagttttataaaatttgatactttactgcacgctttgagactgtattaattgaaccatgttgatgaacaagtttttgtgatgggtatattaataaaatatagatcaaatttttatagttaaatcaatatcgagcttttctagtgctttcaaaaggacaacctgaattttcccagcactgaaatgatactgaaaccatttcatatcttctgtattaaggaaaaaggcttgaaaacatacaaaaaaccctagaggtggctttctcagaggcagtgtggatgcagccatctgttgtcctgctggatgaccttgacctcattgctggactgcctgctgtcccggaacatgagcacagtcctgatgcggtgcagagccagcggcttgctcatggtaaatgcatccaccactggcttaaggtcttgttcttttgtcagtcagcatttttagtcttaacaataaatctactctcttcagagaataatatatgtgttatgttaagtgttgtgtttgaggcccctgatggcattctacagttgtcctatagactgtaatagcaaaattggtagagtaaaaacagtgtgaaaattctgcaacttcatggttagtcctttagggtttttcattctcccttacttattgtttaatttacagatttactcttttgttcatttgacaaatatttgtcaaatgcttgtgcacagtctgtattctcaaattctaggagaaaaagaagggtgaacagtattagcgcagaacgatactaataatgatggctactgtgtatgagtagccagccctttcttggctttcttggattgctttgtattctacatgaagatattccctgggctttacaggtcaataaatggaaattcagagagattaatttgaccagggtgaccaacaaggagatgacagcatacactatgcgagaagtatacacagagtagtgtaggagcatataacctaaactgggggtgaggtgggataaggagttatcagggaaggctttttggaggagttgacaactgagccgagttttgatggaagagtagaaattagcatgaaccaatttcatgctaataaagaagcaaaggaagcgtggtctacaggcaaaagcacagaggtacaggaagtaatgatatgttggggaataccctgttgactggagcttagagtgcaaggagaggagtgctagggaggtgaggttggagggtttggcagcattgacttgcttcaaggttcttaagagctgaaatagatataaaatgcaactaagagtggcttggattattattacctagtgtgttaatctcaaattttgaaatctatagcatctataggactggtgttactaatcttacactcgatctgttactgttcttatactagatctattagtccagtgtttaagggagtggtgcagatttctaggtcaggacaggactcagatgtacattattaatgcctatttcagttctgaccttctcatatgaaaccttataagacctggggtaggaagagattgttctggaagtcataggaatatgaactgtattttgtttaacaaacaatacagtatggaaatttatcacccttccagaatatttatttcagagacaaatttttatcattcgttcatttatttcataagatccacgagtagggaacctcactagacattgctctgagtatatggtctgagtttgcagtacctcttgtgtctccattagatttattaggtcctcaatagataaatcagggaataactagatggattcattttttaaagacatgaaagagcgataccatacatactgcaccttaaaggtcaaccttagagtatcattatttttaatgaatgtataatttttaaatttcatgtttacttttcctaagcttttgcactatattgcttaattccagctttgaatgatatgataaaagagtttatctccatgggaagtttggttgcactgattgccacaagtcagtctcagcaatctctacatcctttacttgtttctgctcaaggagttcacatatttcagtgcgtccaacacattcagcctcctaatcaggtaatacactacttgtaaggattattgaattatgtcccttttatagaaattatttttcaattttattagtaattcgtggctttaaatttatgcttctcttaatgattttaaggatatgtaagtcaacatttggtgcatattgtgctagaggcataaattataatttatagccacctgaaatgttagtatgcgctttccaagaaaatgacttttttgaaaatggtatttctttgaatgagaaagaacagagagaaatagatagatggcttttaaacacttcattaattaaactttttttttccaccatcacataatggcacttagtcccctttgggaactcatgagggttttagtggtagtgagctgaaagaaatatgttccaggactggcaaacatattctaaattctttaaaattttcacctagcatctaccctaaatattcagaccctgtgctagttaactgctattgaagaacaaaggtattatatctattattaaggataatagaatggtatttgagatattggtcattgaatatgaatatgttttgagaaataagttttataggaaccaaaaaaaaattcttaaaggaaccatatattactaaaaatgcttcttattggagaaagaaatgacaatcatttattaatgtgattttttcacaactttattaagatataatttaagtacaacaaactcacataaagtgtacaatttgatcagttttaacatatgtagatgccatgaaaccatcaccacaattaaggaaacaaacattttcatcactccagaagtctcctagcccttttactacccattcctcccctgctccatccccagacaactaccaatttgctttctgtcactatagatttgtcaacctgattttctccaaatatacattcaaaaatatacagttgaatacaattggaaattcgaattttgtgtttttttctttaggaacaaagatgtgaaattctgtgtaatgtaataaaaaataaattggactgtgatataaacaagttcaccgatcttgacctgcagcatgtagctaaagaaactggcgggtttgtggctagagattttacagtacttgtggatcgagccatacattctcgactctctcgtcagagtatatccaccagagaaagtatgttttactattaaaacctgaacttggaatcttctttctattgtggagaaatgtaattgtagtaagacaagaattaaatatattccattgtagtatttgaataagcagttatttgagtagaaaattagtgtttccagctaagatgatggcatattttgaaaattcatatagtgaatataactagtaaaagaagttttgtttatttttaaacagaattagttttaacaacattggacttccaaaaggctctccgcggatttcttcctgcgtctttgcgaagtgtcaacctgcataaacctagagacctgggttgggacaagattggtgggttacatgaagttaggcagatactcatggatactatccagttacctgccaaggtatgtttaaaaaaagaaaaagtgaatacttactcccagaagaaccactgtattattggctttggctttatgtgtcagcttgcccaatctccgtgtgagtcaacaagtgtttactgagttaccaaataaatgtcttaacactattttaggtactttaacaaattttaattttattaattaattttttattagaattgagacctcactctgtcatctaggctggagtacactcacagctcactgcaacctcaaactcctgggctcaagcaatcctcctgcctcagcctccccagtagctagaactacaggcatgaaccaccatgcccggccaactctttaattttcttagagacggagtcttgctatgttgcccaggcagacagattttaatgtgtatgatgcagtctttgatgataagaaacttataatggaaagctgaggtgatagttacagtaaatacattttgatgtataattctgtttgctttaatcattcaaattgtagtaaagcaagatgaactgtctgctgggatttgagcagaaatggataggaataaactaggaggtagaagagttatcaaggttcacaggactgatgggtgaagctagatttccagacccgggatgtcagtccttgaaaagcagacttggcaggcatagacgaggcagatagcaggataaaggagacaaatgtagattgttcttcagaagatcagatggtagagtctaggaggtagtgtgttttaatcagagatctgagaggcaaagatcattgcatgagatcagggacccatgcaaaggagtgagaaaaaaaactgggttaaggagcctgctgcatggcaactcctgggaacagtggccactggggcctgggacatgttgattgcagcccaggactgttaaaaccagtgtgagagaacatgggtatggaagtactagctagcaggatcatgaccccgatgctgggatggggcatcaagcattagtacatggagattcagtacatccagatgcagtacatggagactatatgcgtaactgctgactttgggcttctttcagattggagcagaggtagaggtgagtgggaatattctcaatagagggaactaaataggcatacctaataaaggagaccaggatattgcagacagtagcctcatgtttggctcacctgttcaaaaagttctcttgttcttgagcagtggtgccttaaaaggtaacttgagaagcagtcgattatttgttcagcctggagactcttgggatattttactatctttgattgaatagatttaaatgtacacagctctcataacttgccccatgaagcatatccatgaaaggcactatacttgttaaaagattggtttgtactttttaaatgtagtacttttaataaaacaggaaaaatagaagttctgatgcagttatatgcattttatatagaatgtgttcttaattggaaaaaatttgtcgtagttcctttgagttcatttacagtttttagtaggaattgtattttctactgttgtacttgctgttactaaagaaagatggtcgtgattaccatctgaattttttttctatacattgatctttagctgctacttagtcatttctgtttagacttgagctctttttcatattttttttttttgtttctcagtatccagaattatttgcaaacttgcccatacgacaaagaacaggaatactgttgtatggtccgcctggaacaggaaaaaccttactagctggggtaattgcacgagagagtagaatgaattttataagtgtcaaggtatgttgtctacttatcttctttttttatttaggtaaaattaacataaatgcagttagccatttcaaagtgtaaattcactggcatttagtgcattcacaatgctatgcaaccaccacctctctctaatttcaaaactttttcattccactcctcctcttgcttatcccctggcaaccattcatctgctttttgtctctatggatttgccttttctgtatatttcatataaaacaaatcatgcaatatgtgaccttttttgtctggcttctttcacttatgtaatgttttcatggttcatccaggtagtagcatgtatcagtacttcattcctttgcatgactgaataatgttaccatactttgtttatccacttatcagtggtgaacatttgaattgtttctaccttttgactattatgaataatgttgctgtaaatattcatgcacaaatttctccacggatatgttttcatttctcttgggtataaactgaggagtagaattcttgggtcttagggtaattctctaacttttcaaagaaccaccaaactgtctttcacaccaactgcaccattcccactagcagtgtggggggttcctgattctccacatctttaccaacaccattatgtttctcaattgtgggctagtctcacatttggaaagctagtgggagcagcgatccatctattaaaagttgtatgaaattgagtaatgagccacctctctcttgtagggcttattatgttcttgcttaaggcaatcttcatgcattgtgaacagaattatacataaatgctcagataaaagggcaaaccattcttaaagggagtagacaactagaggcaggagaccatactgaggcaggaagctggggtttttatggttctgttacttttgactatatctcaccattgcttttgtcaaagtgagactaggtctaagtttttttcaggtataaggtgagtgtggtaattaaggggcatgctagcagatcattttgggtaatgcttcacagtccaccactggtgtgtcattgtggtcgcagatccagtatcttagctgtgtaatttcagacatcagcaatattagtttaacaaagggcaattagattccaagacaaaggaatcgtgtattattctagccttattcaaacttgatttataaatcagtttagtaatttatttatttgtttctgtatttatttttatttctttgagatggagtctcactctattggccaggctggagtgtagtgatgcaatcttggcttactgcaacctctgcctcctgggttcaagctattctcctgcctcagcctcccgagtagctgggattacaggctaatttttgtatttttagtagagatggggtttcaccatgttggccaggctggtcttgaactcctgacctcgagtgatctgcccgccttggcctcccaaagttctgggattacagacgtgagctaccgtgcccagctcagtttagtaatgtataactgggttttacccagttgtaaattactcttttgtcgtgtttttttgagaactggcaatgacggagaaactaaaagtgccaggctgttgccttgttcctgttattttgccttagttttttttttttttttttttttctctgagactgagtcttgttgtgttaccaggctagagtggagtggcatgatctcggctcactgcaacctctgcctcctgggttcaagtgattcctgcctcagcctcccgagtagctgggattacaggcgcctgccaccgcacccggtgaatttttgtatttttagtagagacgggattttaccatgttggccaggctggcctcgacctcctgacctcatgatccaccagcttcggcctcccaaagtgctgggattacaggcgagaaccaccgtgcccggtcttgccttagttatttcttgttccctcctctagtcctatagttctctgactgtattgaggaaatgtaattaaatattattatgttaatagatatttatgtggttgaatattagaaattccttattttggtcacatatcctgatcagtagttggtcttctggagatagtgatttttcactagagatgactttaggacctattcaggttttttttaagatcccaatttaaggaaagactattctcattattgattttgctatatgcagggaaatttatttcgaaaggtttttcagttggcttttagggaagattatatattctctttttttttttttggccttttcccacatgttctaaaaatgatatattctttaactcctatgaaaatacattgtttcagtaattgaagatgctgattaaagtcatatctctacacattttttaaaatttgagatagatgggactttgtcccttcttacaccattcacttattcacttggaaaaactattatccaatacttatgtggcagacactgtttctggcacaagggattcagcagtgaacaaaactgcctttttggagtttacattctactagtggaaagcgacaacaagcagatagacacattcagtatataattcactgtcagatggtggtggtaagtcctatgtaggaagaaaagcagggtaaggaggcttggagtaactggagtgagtcatagatggacttgtcaggaaagggtttctgaagaggtggtatttgggcagagatctaaataaaatgaagcaacaagccatgagaatatccgggggaaaatgttctgggcagaagcatcaagcatagaacttgtggtatgatatttattctagcacacattaattttaaaaatgtataaaagacatccatttaatcatattaaagatttccatgattcatttagacttagtcagaaaccaaatttatattttctttttaaataattttatctcaactcttattttacccaataggggccagagttactcagcaaatacattggagcaagtgaacaagctgttcgggatatttttattaggttggtagcctatgaatgtttttaaagtaactgactctgttattatttatcaatcagtgctttttttggtcttgttttttgaagaactgatatttgaaacctgtggtttatgtgaattattaataagctagaggacgtggattctctatttcatcaaataatacaaaacattttagatattaaattttggaaattatttggttttgttttacaatagaaatactcctcaaagtggaatcgaagtggttattcaaagaaatctcagagtagattcttatatgaagcaaataattgcccctaatttatctctaaattttgtaagttctaaattcttttttcccccagtttctaatttatctcttataagtcaagagtccatctggccaatttaatttcagtgagtgtaactattttgcatatattaaaaaactgtatatgaatacagaagatggtatttaaggatgaaaataattattcaaatgtgatagcattatggggagttttaaaataaaagttactgttttattcttccaaaaattttattataaagtatacagttaagagaatatacataaaatacatatgcagcttaaggaagaataataaaatgaatacttcatgtattcaccaccgagtttaccaggaaaaagcataaacaaaataaacctcttccacgtaattcctgggttaaagagaagttatagtggaaaatatttgggagcaaacgataatgaaaatactatccattaaaattgttagatgttgcaaaactgatttcaaggaaaatttatagtgttaaatgtttagaaaagaaaaaaggttagaagttaaccacttatgtatctatctcatgaaattaggaaaattatagatataaactaaaaaatatgttaaaagggaaataataaagataagaatgaagtttaatgaaacacaaaacagagaagctcacaaagccaagatttattttttgaacaccgagtacaattgacaaatctctaacaagtttgattaagaaaaaagaaagcatgaataaacaattttagggataaaaagggaaacatcgctaaagatatcccagaaatgtaaaagataataagggaatattatgaaaatattcatgccaatacatttgaaaacttaggtgacatagacaaaaacaaaattgaccaaaattgagcaaaaaagaaacaaaatctgagtagtcctgtaacttagtaaaaattgagttagaaaagttaaagaagtctttacacaaatcaaacatcagactcagttttctaggagagttttgccaaacattcaagtagcagataattctggtctatttttggccccagaagatatattttacttgccatgcatttaatgagatagctgttgatttttttcaatcaccgtgacaggtgttttatattaggtgttattcgccagacatctagtccacctgttgccagatatggaattaatattcacttattttgaattaaaatttgttaataaattaataaaacaaagtcaaagttcaaattattaaaaaagtaaaagaaataaaatatattttatagagagcccttacaaaacagtaccaacataatgagctttccaaattttgaatgggcaaaataaatgaataggcatttcacaaaagaaggaagggtggccaataagtatatattaatataaaaatggttacttgtaataggaatcaaaagtgtttgacttattgactaagagtcagtttttgttttgatccctgttagtctatccagaaggcatgggtcttaataaacaccttgacctcaacagtttactgaatacaagggtaatttcatatgccttgccttctttaagggtttgttgtaaagattaaaataaatacataaatatatataaatacatttatatgtatttatatgtaattacatacaacttgccttctttaagggtttgttgtaaaaattaaaagaagtatataaatatatataaatacataaaataaatacattcatatatgtatatgaaatcactttgccaactatgaagcctgattcaaatatgaaatgttgtttgtttttcccagagcacaggctgcaaagccctgcattcttttctttgatgaatttgaatccattgctcctcggcggggtcatgataatacaggagttacagaccgagtagttaaccagttgctgactcagttggatggagtagaaggcttacagggtaataattataaatacagaaatagaatgttataacaaaatgtcatcatgtcatcagattttggtaaaaaaatgttcttttttcctctaggtgtttatgtattggctgctactagtcgccctgacttgattgaccctgccctgcttaggcctggtcgactagataaatgtgtatactgtcctcctcctgatcaggtgacaatttcatatttagagtccaaaacccaacaaatgctacactctttccttgtgagctttacttctgccaggtaatggcaattgtccttagaagaccagctttcttagggaaaagctttagccactgtttgctcaaagcataaaaagattctgaattagatgcaaagcctttttttggcccagtgcaagtctgaaaactttgtaatccttctgtgttggctgattggggaaaaaaaaatgcaagaaacctaatgtattatattttcacattatcttctgttcaaagattacatacttccattatcctgtcaaaaaaaaaactctgatacagaatcaagcatgtgaatcgtaagcatgtaagcaggtttcatagagataatttttcaactcttccttgtcctgtgttgttccaactcttattctccaatttagaagcaaacaaataaatgaatgaaagaacagatagacaaatgaatagtcaaaggtataaagtatctgtatatatgttacatgtagctattatttaaattatttagattttccttttgaaataccttcttggcacacttgcctaaatctagaaaataagcactgtgtgaataagaaattatttacactgaatattttgtaggtttttgggtttttgtttttcagacaaggtctcactttgtcacccaggctggagtacactggtacgatcacaactcactgcagcctctatggcccaggctcaagcaatctccccacctcagcctcccgagtagctgggaccacaggcacacgctaccatgcccagataattttattattaatttttgtatagagatggggtctccctgtgttgcccaggctttcttgaactccagggctcaagtgatcctcccacctcaacctcccaaagtgttgggattacaggcgtgagccaccatgcccagccttaagagtgtttgattttcattcattttcctatatatattatttctgttggggaaaaaattccaaggaagataaatagtaggctgttggtacatttctcaacttacttataaagctttttagatatataaggttaatttatgaagaaaatcataagatacacaatttaagataatatttttaattttattttttatttgttaaataaatttttctcctttcaggtgtcacgtcttgaaattttaaatgtcctcagtgactctctacctctggcagatgatgttgaccttcagcatgtagcatcagtaactgactcctttactggagctgatctgaaagctttactttacaatgcccaattggaggccttacatggaatgctgctctcgagtggactccaggcaagttatatgaggaagttgttatgacattttatgagtgataaaagaagtacaatgtcaaaatttccaccttaaaaaatgctattttttaaacaactttggtaaaactgtatagaaacataaatttacctttagttgaatgttccatagttggaatatgggttttgcagagaatttataattatgaagtttgatgtctgtttctttaacattaccttaatattggcaaaaacatgttggtgtttgcaaggatattatttaaattgggataccatgaattaaatactacaaacaaaaataattagagttttttgtttgtttgtactttaacttttaaaaaataatcagttaaagttgttgttttgaagctcacattgttccaatctggccaataggagccccttttgtatggctcctgtatctttatgacatgtcctcatcattcttgaatcacttcctcacttccagatacagtaagttattcttggccaggtgcagtggttcacgcctgtaatcccagcactttggcaggccaaggcaggaggatcatttgggcctagtttgagaccaaatcatggttgcacaaactgtacccactatggacaacagagtgggatcttgtctctgtgaaaaatttaaaaattagctgggcatggtggcacatacctgtagtcctagcttcttgggagaggctgtggcaggaggatcgcttgagtaaatccaggatgcagtgagccatgcttgtgccactgcactccagcatggatgacagaatgagaccctgcccccaaaaaagaaaaatattcttggtttatcttgtactttctgtatcccagccctagcatcagccttttctctaaagacagtattatgattttaatatttacagtagatatttgaactgttacattatagactttaccatatattttctaggaaggattattctattactcttctttaccacatttgtttggaatgtctacagaacctacagtttctaaatcagaaactccctaggtttttgctattttggcaagccattgaagttcttccctctccctttactaccagaaaggtgtgtatttgtagagctctctataatgagaaagcactctataacatggttgattcatcattttggagtagaaaagtatgaatggaaagtcagagacataaaaataaagcccagaggtctgagtcttagcttcattacagactttcttgggggatggttggtaaattatctacacattctatcttgtctttataattttaatagttaaatttttaccatgtgcctcaaaaccgttagagaattaatgagctctttgaaaaatgcttctaagtttcttgtattgctctaatagaatgctatctatgttattatttatttctgagactaaaattgtttacatctttaaactggttgtccttttgtgtattttaggatggaagttccagctctgatagtgacctaagtctgtcttcaatggtctttcttaaccatagcagtggctctgacgattcagctggagatggagaatgtggcttagatcagtcccttgtttctttagagatgtccgagatccttccagatgaatcaaaattcaatatgtaccggctctactttggaagctcttatgaatcagaacttggaaatggaacctcttctgatttggtatcttgtgcagtcatcattatacagttctgaaatataaagctatatgttggtgtaaagttgcagtgatttctctcctaaccagccccacatattcttcctggttggttggttcttcagtaaaatagtcttgtttcttgcttacactaattggtaatttgcattccttgttaagattttcaagacagggctgggagcaaggaaccaaagtagcgcgtggttgtgattacctttggtttctttgaggtttctcttacctagtggctttaaaacatctttaggagcagttccattttatagtaaacttaaattctgttatcatgaacagttgaggataatgaataatttgatacaataatgtaagaaattcctgaaaacaaagtgttatctgtgatacttttgctgcatagtaagcacaatgaagtgtactgataatgtttcaacaggaaagtgttttgattaaatgtgggcagtatcactgttctactagcattcaacatctcttctaaaaattaatagtggttcactgtaattttattggtacatgtaacatctgtacatgtgtttggttatctatatgtttcctggttttttgtacatttgctttattaatttaggcttttttttttttttttttttgagacagtctcactctatcatccagactagagtgcagtggcacaattatggctcactgcagccttgacctcctgggcttaggtgattcttccacctcagcctcctgagtagctgggactacaggcacatgccaccatgcccagctaatttttgtatgttttgtagagacgaggtttcaccatattgcccaggctggtctcaaactcctgggctcaagctatctgcgtgccttgacctcccaaagtgctaggattacaggtgtgagccactatgcctagcctaactcagactttaaaaatataaaagcaattcatttttattcccaagaacagtaaggtggtggtttaattttagtctttaattctgtttttaatttattctatttagaaatgtcccagaaacttagtataactttactttctgaaaatgaagaaacctgtccttgggcattagtgtgttggatttaagcaacaaagttaaaaaaacctaccctgtgttatggcaattttcacttgatggtggttctataacacaggtatcagtgaacctttataaaagatgaacaacttttcagcttgcttaatttcagttaattaacatgtatacttatctatgttaatgttttattgcttaaaatgtttaatttttatatttggtaaacagatagttttttctctccccctcttccttccatctttcattactacaatttaccatgcagagctcacaatgtctctctgcaccaagctccatgactcaggatttgcctggagttcctgggaaagaccagttgttttcacagcctccagtgttaaggacagcttcacaagagggttgccaagaacttacacaagaacaaagagatcaactgagggcagatatcagtattatcaaaggcagataccggagccaaagtggagtatggctttttccccctcattataattgttaaaacttcttaaaaattgtttcacccttttgatatatatttctttgacttataaacgagctatatttataaacaagggaccagaacacattaactcagtcatggttatgtgcttccttgctttcaatgtttcattatcttataaggaagagaacgtatggtctcttgaaaaaactgacaataagaagtaacaactggactaccacatttttttttacatccttaatttaactcttcgtcaatttctttttttacttaaggaggacgaatccatgaaccaaccaggaccaatcaaaaccagactggctattagtcagtcacatttaatgactgcacttggtcacacaagaccatccattagtgaagatgactggaagaattttgctgagctgtaagtaacagattctgttttggaagtacagctactattacaagtgacatagtattacacttaaacctttaaagttcgtgtttaaaataaaaatattttgaatatttaaaagctaattcaaaaaatatgtgtcgtagctatgcattaaaaaaccccaaaatgtcagaagtacagaagtcaaaattgagttttcattaaccagttcatttgattatatttgaattattcataatggactcatttaattttagtaactttgggctgggtgctgtggctcatgcctgtaatcccagctctttgggaggccaaggcaggtggatcacctgaggtcaggagttcgaggcaagcctaaccaacacggggaaaccccatctctactaaaaatacaaaaattagccaggtgtggtggcatgtgcctgtagtcccagctacttgggaggctgagacaggagaattgcttgaacccaggaggtggaggttgcagtgagccgagattgcaccactgcactccatccagcctgggccacagagcgagactgtgtctcaaaaaaaaaaaaaaaaaatttagtaacttcgaagaaataagaaggaaaattaaaagttgaaagtgattctaatgtatagtttataaaattttgttataaaaatacctgttttgccttcaaaataatttatattaatattttattgacctcaagaacatttaaatacattcagatttattcatttgtggaccacatttgttatacattggatttaaaggatccttgcaattgagtttatggccacctatgcatctgagacccatggactgggaaccattctaggtcaatgattcagtgtgattcaatttaagagatgtttattcctggtctttagaagctgctaccttttgttatctaattttgcagtactttgaagtatgtatgtatgtgtacatacgttagtgctatgtatttattaaagaagaatcagaaaacagaggtaaggaaaaataaggaaacaaatttctgttaagcccaccacctcccaaagcatatttgtttatatgcttatatatgttttcctattatggtaagaacagtctgtacatattgctatatagcagtccccctttatccacatacatcctgaaaattgttttacattttaaatgttaactactttattgtttttaaatgtcattttatagtgtagctatgccacaatatccaatttttagacatttaaattgctcccaggcaatgtggtaatgaacattcttgcagctgaatatatgcacatatctaattgtttcactaggatagaggtggaattgtataacagggagctcacattttttaaggcttttgaaatgtattgccaaattgcctgccagatatactgcaccatcactaacattgtgtgttgcagtatttttctaaacttggcccttttgattttagaaaaatgatatcaataatttacatttctttgattaaagtgtagaagttataatttttcatattattcattgtcatttgtattttatcttttctaacttgtctcttcatcccctttgctccgttttctattggagtgcaactttatttgtaagaattctttttaatttctgtgactggaatttttttttctagtttgttatttcccgttcatttcttaaaatataattgtgtttgccaacaatccattatcttttgttttgtaatggtagtatttatacatattaaattatctctttcttttttcagatatgaaagctttcaaaatccaaagaggagaaaaaatcaaagtggaacaatgtttcgacctggacagaaagtaactttagcataaaatatacttctttttgatttggttctgttaagttttttgatggcttttccatatgttgtaacaggaaaaaaatggtgtctatgaatttcttcttaatttaacaaatttggttaatttataaaatcacagattggtaaatgctataattatgtaatgatcaggattgagattaatactgtagtataaattgggacattataacagattccatattttatttcctaaaatctaaattcagtctttaatgaaataatattagccaaatggtggaactaatttatttcttttgaggaaaagataataaagaatgtaattaaatttaaatttcttggaattcccagttgtatattcatcacctttgtagcatttgacaaattttatgcttagcagcttcttcactgttttgaaataaaatatcctattacctactgatacaattatctgttctttgtatatcaaaaaatgtgaaatttacacataattcaaatacatttaattatccgctcaaccagaaatgaaatcacatccctctactatactacatccagctccaagcccaagatatttaaatgacatccattcctctcctagttccagttatgattttatcttgatattctctcatatatgaactaaattataaagttagccaccatcaatacaatctgcgtatctaatatcttaactatatagtaatggggtaagggaacagcaaaaaggagaacattaattaaaatatacaagtaagcctgggcaacatagtgagaccccatctcttaaaaaaaaaattagccatgcatgatggtatgcctctagtcccagctacttgggaggctgaggtaggaggatcacttgctcccaggaggttcaaggttctaaaccagcaaagctcagaatcccaggggatagaaacaaagacttagtggatcactagtattaaactgagacacgtcaccctgcattgcactttgtttctcagttctttgatgaaatcactgagctgacatacctgccctcttttcaccataaagtgagtttcatgatcagaagcaatgtctatgggatagcctaacaaacaatgtaaaaaccatttagtaagttcatgaagggtggtggtggtaaaaatttggagaacatacaaaacaaatacaattccaaggtgtgtcccctccaggaaggacaaattgctgcctgctctgtgatagaagaggatcagatgtaatcaacctgccgtcagacttgggctgttctctcctgggtgtggacttgcctggttggtcactgctgctgacaagtaggctgtcaatatagctgggttgtcatgtcagctgtggtgagggggaagtccacattgtggaggccacatccctgcactcttggccaatttgaccatgaatcttaagcactggggtggctggaaaagacagccgattgacatccatacagaggtcatcttgaccacttgattagtataagcactgaaggcttttaactgagcattcacataggacacaaatattctgattctttgggcccattccaagaactctgggcatacttttcctccagacctcatacccagttgtgttctttccaaatttctggtcatctggttatgttattagccactatctgtgaatcagcatagatttttatatcagacatctctacctcctgacagaatggaggagatatgttacttaacaattctgttcccttggaagatttcctgtctccactgtttgtaagggctactccctcaatgtagcagtaatgctttcactctgatgggaagtcacagtggaattctgggtctccaagaattagtgttagtgcatacacagtgtctgataatccccagagtgtctggtgcccttggatcctgtgaagaaggcttggagaaaagaagattcatggcaagaacttgtgatgtgatgacagggccttttctctggctcttcattcttagtctgacctaggtgtgagaattaggtcaggggccatgactatattgtggtgactcaaaccaggcctttgtttactaactgggagatttttacattgtaagaatcaagtaggatctttgcccatgtattttggtcttaagaacacaaatgatatggctccaatgactggaggaacaccagggtccttggtctcacgctgatttagataaaacgactgtcaggcctctgagcccaagctaagccatcctcccctgtgacctgcacgtatacatccagatggcctgaagtaaccaaagaatcacaaaagcagtgaaaatggcctgttcctgccttaactgatgacattccaccattgtgatttgttcctgccccatcttaactgagcgattaaccttgtgaaattccttctcctggctcaaaacctcccccactgagcaccttgtgacccccgcccctgcccctaagagaaaaccccctttgattataattttccactacccacccaaatcctataaaatggccccacccctatctcccttcgctgactcctttttcggactcagcccgcctgcacccaggtgaaataaacagccttgttgctcacacaaagcctgtttggtggactctcttcacacggacgctcatgacatttggtgccaaaacctgggataggaggactccttcaggagaccagtcccctgtccttgccctcactctgtgaggacatccacctacaaccttgggtcctcagaccaaccagcccaaggaacagctcaccaatttcaaatcaggtaagcagtcttttcactctcttctccagcctctcttgctacccttcaaactccctctctcactacccttcaatctccctgtccttccaattccagttctttttcatctctagtagagacaaaggagacacattttatccatggacccaaaactccagcaccagtcacggacttgggaagacagtcttcccttggtgtttaatcactgcggggacgcctgcctgattattcacccacactccattggtgtctgatcacggtggggacacctgccttggtcactcacccacattcccttggtggtacgtcaactgcaaaagcaggggacgcctgctttggctgctcacccacccccttctctgtgtctctacctttctctttaaacttacctccttcactatgggcaaacttctgccctccattcccccttcttctcccttagcctgtgttcttaaaaacctaaaacctcttcaactcacacctgacctaaaacctaaatgccttattttcttctgcaacactgcgtggctgcagtacaaacttgataatagctttaaatggccagaatatggcactttcaatttctccatcctacaagatctagataatttttgtggaaaaatggaaaaatggtctgagatgcctgacgtccaggcattcttttacacattggtccctccctagtctctgctcccaatgcgactcatcccaaatctttcttctttctctcctgtctgttccttcagtctccaccccaagctctgagtcctttgaatcctcctttgctacagacccatctgaactctcccctcctccccaggctgctcctcaccaggccgagccaggtcccaattcttcctcagcctctgctcccccaccctataatccttttatcacctcctctcctcacactcagtccggcttacagtttcgttctgtgactagccctcccccatctgcccaacaatttcctcttaaagaggtggctggagctaaaggcatagtcaaggttaatgctcctttttctttatctgacctctcccaaatcagttagcgtttacgctctttttcatcaaatataaaaacccagccagttcatggcccatctggcaacaacccttacaggctttacagccctagaccctgaagggtcagaaggccgtcttattctcaatatgcattttattacccaatccgctcccaacattaaataaagctccaaaaattaaattctggccctcaaaccccacaacaggacttaattaacctcacttcaaggtgtacaagaatagagtagaggcagccaagtagcaacgtatttgagttgcaattccttgcctcaactctgagagaaaccccagccacatctccagcaaacaagaacttcaaaacacctgaactgcagcagccaggcgttcctccaggaccacctcccccaggatcttgcttcaagtgccggaaatctgaccattgggccaaggaatgcctgcagcccaggattcctcctaagccacgtcccatttgtgcaggaccccactggaaatcggactgtccaactcacccggcagccaatcccagagcccctggaactctggcccaaggctctctgactgactccttcccagatcttctcggcttagcagctgaagactgacactgcccgatcacttcagaagtcccctggaccatcacggatactgagcttcaggtaactctcacagtggaggctaagtccatcccctgtttaatcgatacaggggctacccactccacatcaccttcttttcaagggcctgtttccctttcccccataactgttgtgggtattgacggccaagcttcaaaaccccttaaaactcccccactctggtgccaacttggacaacattcttttatgcactctttttcagttatcctcacctgcccagttcccttattaggccgagacattttaaccaaattatctgcttccccgactattcctgggctacagccacatctccttgccgcccttcttcccaacccaaagcctccttcatatcttcctctcatatccccccaccttaacccacaagtatgggacacctctactccctccctggcaaccgatcacacgcccattactatcccattaaaacctaatcacccttaccctgctcaatgccagtatcccataccacaacaggctttaaagggattgaagcctgttatcacttgcctgctacagcacgggcttctaaaacctataaactctccatacaattcccccattttacctgtctaaaaaccagataagtcttacaggttagttcagaatctgcaccttatcaaccaaattgttttgcctatccaccctgtagcacccaactcgtacactcttttgtcctcaatgccttcccccacaactcactattccgttcttgatcttaaagatgcttttttcactattcccctgcacccctcatcccagcctctctttgcttttacctggactgaccctgacacccatcagtcccagcagcttacctgggctgtactgccgcaaggcttcagggacagccctcattacttcagccaagctctttctcatgatttactttctttccacctctctgcttctcaccttattcaatatattgatgaccttctactttgtagcccctcctttaaatcttctcaacaagacaccctcctgctccttcaacatttgttctccaaaggatatcgggtatccccctccaaagctcaaatttcttctccatctgttacatacctcggcataattcttcatgaaaacacatgtgctctccctgccaattgcgtctccaactgatctctcaaatcccaacctcttctacaaaacaacaactcctttccctcctaggcatggttggatacttttgcctttggatacctggttttgccatcctaacaaaatcattatataaactcacaaaaggaaacctagctgaccccatagattctaaatcctttccccactcctctttccattccttgaagacagctttagagactgctcccacactagctctccctgtctcatcccaacccttttcattacacacagccgaagtgcagggctgtgcagtcggaattcttacacaaggaccgggaccatgccctgtagcctttttgtccaaacaacttgaccttactgttttaggctcgccatcatgtctccatgcggtagcttccgctgccctaatacttttagaggccctcaaaatcacaaactatgctcaactcactctctacagctctcacaacttccaaaatctattttctttctcacacctgacgcatatactttctgctccccggctccttcagctgtattcactctttgttgagtctcccacaattaccattcttcctggcccagacttcaatctggcctcccacattattctggataccacacctgaccctgatgattgtatgtctctgatctacctgacattcaccccatttccccatatttccttcttttctgttcctcatgttgatcacatttggtttactgacggcagttccaccaggcctgatcgccactcaccagcaaaggcaggctatgctatagaatcttccacatccatcattgaggctactgctctgcccccctccactacctctcagcaagccgaactgattgccttaactcgggccttcactcttgcaaagggactacacgtcaatatttatactgactctaaatatgccttccatatcttgcaccaccatgctgttatatgggctgaaagaggtttcctcactacgcaagggtcctccatcattaatgcctctttaataaaaactcttctcaaggctgctttacttccaaaggaagctggagtcacacactgcaagggccaccaaaaggcgtcagatcccattactctaggaaatgcttatgctgataaggtagctaaagaagcacctagcgttccaacttctgtccctcatggccagtttttctccttcccatcagtcattcccacctactcccccattgaaacttccgcctatcaatctcttctcacacaaggcaaatggttcttagaccaaggaaaatatctccttccagcctcacaggcccattctattctgtcatcatttcataacctcttccatgtaggttacaagccactagtccacctcttagaacctctcatttccttccatcgtggaaacatatcctcaaggaaatcacttctcagtgttccatctgctattctactacccctcagggattgttcaggccccctcccctccctacacatcaagctcggggatttgcccctgcccaggactggcaaattgactttactcacatgccctgagtcaggaaactaaaatacctcttggtctgggtagacactgtcactggatgggtagaggcctttcccacagggtctgagaaggccactgcagtcatttcttcccttctgtcagacataattccttgggttggccttcccacctctatacagtccaataacggagcagcctttattagtcaaatcacctgagcagtttttcaggctcttggtattcagtggaaccttcgtaccccttactgtcctcaatcttcaggaaaggtagaatggactaatggtcttttaaaaacacaccccaccaaactcagcctccaacttaaaaaggaggatagagcccaaaaactcgcaaccaagctagtaattatgctgaacccccttgggcactctctaattggatgtcttaggtcctcccaaatcttagtcctttaatatctgtttttctccttctcttattcggaccttgtgtcttccgtttagtttttcaattcatacaaaaccgcatccaggccatcaccaatcgttctatacaataaatgctccttctaacaaccccacaatatcgccccttaccacaaaatcttccttcagcttaatctctcccactctaggttcccatgccgcccataatccctctcgaagcagccctgagaaacatagcccattatctctccataccacccccaaaatttttgctgccccaacacttcaacactattttacattatttttcttattaatataagaagacagcaatgtcaggcctctgagcccaagccatcatatcccctgtgacctgcacatatacatccagatggcctgaagtaactgaagaatcacaaaagaagtgaaaatggcctgttcctgccttaaccgatgacattccaccactgtgatttgttcctgccccaccttaactgagcaattaaccttgggaaattccttctcctggctcaaaacctcccccactgagcaccttgtgacccctgcccctccactacccacccaaatcctataaaatggccccaccccatctcccttagctgactccttttttggactcagcccgcctgcacccaggtgaaataaacagccttgttgctcacacaaagcctgtttggtggactctcttcacagggacgggggtgacaacaacacggacacacatggagtggttttaaggagcagagagtttaatacgcaaaaaagaaggaagaggctcccctgtacagacacagagggagggggctccaagccgagagaaggaaaccccatgtgcagtggaaaagtggttgattatactgggaggctggaggaggcggtgtctgatttgcacagggcccaggggattgggttgaccaggtgtatcattcatgtaccccgcaaaaaacctggccctcccacctcagccctttaatatgcaaatgtgggttgccatgatgttctgaaaacacatgaattatctggagggggccatgacacttggtacatgtgctgacaagaagagggtgggaatcgccatggtggccatgttgggtggacctagtttttaatagcctgcatttgcatatcaaagtttgctggcctggctctttaagctgtcttttctgttagaaaaggaatggtttggaatgggtgagggttgcttcttattacaagaaaatttccaaaaacctttactctttctagctgccaaaaaactatttcttaataacttatgtattaccataattaggcagcaccaaagatccctgcaggtcagaccactgcaattaacatgctggctttactgctgattatggtagctgcatccacctagcctctcatattgcaactgcctgacctctgccaccccacgagccacttatccccacttataatcagcccatttcgattgtaacatctgccacttattcccgacgttgtggtatatcctatagatgaattcattcaacatccattccaacaccacctctcttgccttcctatactctctggagagtgaattactgagtcacatgatcttcactgcagtcatttgtggctatgtgacatagttctggacagtgaacatagacagaagtccctggggcgggcttcctttctgggatgagggcaaaacgcctggagatacagcaattatcttgcaactgagagacaggactagctggatttcctaggccgactaagaatccctaagcctagctgggaaggtgaccacgtccacctttaaacacggggcttgcaacttagctcacacctgaccaatcagagagctcactaaaatgctaattaggcaaagacaggaggtaaagaaatagccaatcatctattgcctgagagcacagcaggagggacaacaatcgggatataaacccaggcattcgagctggcaacagcagcccccctttgggtcccttccctttgtatgggagctgttttcatgctatttcactctattaaatcttgcaactgcactcttctggtccatgtttcttacggctcgagctgagcttttgctcaccgtccaccactgctgtttgccaccaccgcagacctgccgctgactcccatccctctggatcctgcagggtgtccgctgtgctcctgatccagcgaggcgcccattgccgctcccaattgggctaaaggcttgccattgttcctgcacggctaagtgcctgggtttgttctaattgagctgaacactagtcactgggttccatggttctcttctgtgacccacggcttctaatagaactataacacttaccacatggcccaagattccattccttggaatccgtgaggccaagaactccaggtcagagaatacgaggcttgccaccatcttggaagcggcctgctaccatcttggaagtggttcaccaccatcttgggagctctgtgagcaaggaccccccggtaacattttggcaaccacgaacggacatccaaagtggtgagtaatattggaccactttcacttgctattctgtcctatccttccttagaattggaggaaaataccgggcacttgtcggccagttaaaaacgattagtgtggccaccggacttaagactcaggtgtgaggctatctggggaagggctttctaacaacccccaacccttctgggttggggacttggtttgcctcaagccagcttccactttcagttttcttggggaagccgagggccgactagaggcagaaagctgtcgtcctgaactcccggcagtagccggttgagatcatggtgtagccagaagtctcaacagtcgcccatgcatgcacccctatctttccttctgacccatacctcctgggtcccaaccacaactttcttcaaagtgtagccccaaaattctccttacctctgaatatacttcctctgatccctgcctcctaggtactattggttcagacttccatttcctctagcaagttgtatctccaaagggatctaaggaagctctgcgctgcgtccttaggcacctaggctataacccagggagtcttatccctggtgtccctcccaatttaggcatacagctcttgacatgggcagttatgtaggacccactccccaccacccttgccagggccccaagtttgtaaatggctgagggaaaagagagacagaggagagagagagaaatggaggagaaagagagagagacagagaggagagagagacagtgagagagacagaagagagagagagacaaagaggagagagagagagtcaaagagagaaagaaagagaaagaaatagtaaaaaacagtgtgccctattcctttaaaagccagggtaaatttaaaacctgtacttgataattgaaggtcttctctgtgaccctatagcactccaatccactttgtggtcagtgtaaataagagcataggccgaaagcactgaggccattgacaacccgtagcttccctatcaaaaatccttaacccagtaacccgcagatggaccaaatgcattcagtcggtagcgcaactgctttgctaaaagtagaaaagtaacttttagaggaaacctcattgtgagcacacctcacctgttcagaattattctaataaaaaaagcaaaaaggtagcttactaactcaaaaatcttaaagtatggggctattctgttagaaaaaggtaatgtaactccaaccactgataattcccttaacccagcagatttcctaacgggatttaaatcttaattaccatacaaaggtccgaccagacctaggcggaactcccttcaggacaggacgatagatggttcctcccaggtgattgaggaaaaaaaccacaatgggtattcagtaattgatacggggactcttgtggaagcagagttagaaaaattgcctaataactggtctcctcaaacgtgtgagctgtttgcactcagccaagccttaaagtacttacagaatcaaaagactatctcaatcctgattcaaaaggttagctacaccctctctgtaatgcatttgcataagaacttgtttatgggaatgcatcttgatggggcagctgggttgttataaaataggaacccagcccagctctaggactcacccctgagcgcaaaggcaatgttgggcatgctggtaaaggaccactagaatccagcagcccagacccctttctttgtggtcaagaaaggcgggaaaaggggtgcaggactgctacatcggtaagcataactaatccgataaacagaggtccatgggtggttacgcaccctggaaaggaactcacccctgagcacaaaggcaatgttgggcacgctggtaaaggaccactagaatccagcagcctggacccctttctttgtggtcaagagaggcaggaaaacaggtgcaggactgcaacatcagtgagcataactaattcgataagcagaggtccatgggtggtgatgcaccctggaaagaataagcattaggaccatagaggacactccaggactaaagctcatcggaaaatgactagggttgctggcatccctatgttcttttttcagatgggaaacgttccccgcaagacaaaaacgcccctaagacgtattctggagaattgggaccaatttgaccctcagacactaagaaagaaacgacttatattcttctgcagtgccgcctggcactcctgagggaagtataaattataacaccatcttacagctagacctcttttgtagaaaaggcaaatggagtgaagtgccataagtacaaactttcttttcattaagagacaactcacaattatgtaaaaagtgtgatttatgccctacaggaagccttcagagtctacctccctatcccagcatccccgactccttccccaactaataaggaccccccttcaacccaaatggtccaaaaggagatagacaaaagggtaaacagtgaaccaaagagtgccaatattccccaattatgacccctccaagcagtgggaggaagagaattcggcccagccagagtgcatgtgcctttttctctcccagacttaaagcaaataaaaacagacttaggtaaattctcagataaccctgatggctatattgatgttttacaagggttaggacaattctttgatctgacatggagagatataatgtcactgctaaatcagacactaaccccaaatgagagaagtgccaccataactgcagcctgagagtttggcgatctctggtatctcagtcaggtcaatgataggatgacaacagaggaaagagaatgattccccacaggccagcaggcagttcccagtctagaccctcattgggacacagaatcagaacatggagattggtgctgcagacatttgctaacttgtgtgctagaaggactaaggaaaactaggaagaagtctatgaattactcaatgatgtccaccataacacagggaagggaagaaaatcctactgcctttctggagagactaagggaggcattgaggaagcgtgcctctctgtcacctgactcttctgaaggccaactaatcttaaagcgtaagtttatcactcagtcagctgcagacattagaaaaaaacttcaaaagtctgccgtaggcccggagcaaaacttagaaaccctattgaacttggcaacctcggttttttataatagagatcaggaggagcaggcggaacaggacaaacgggattaaaaaaaaggccaccgctttagtcatgaccctcaggcaagtggactttggaggctctggaaaagggaaaagctgggcaaattgaatgcctaatagggcttgcttccagtgcggtctacaaggacactttaaaaaagattgtccaagtagaagtaagccgccccctcgtccatgccccttatttcaagggaatcactggaaggcccactgccccaggggacaaaggtcctctgagtcagaagccactaaccagatgatccagcagcaggactgagggtgcctggggcaagcgccatcccatgccatcaccctcacagagccctgggtatgcttgaccattgagggccaggaggttgtctcctggacactggtgcggtcttcttagtcttactcttctgtcccggacaactgtcctccagatctgtcactatctgagggggtcctaagacgggcagtcactagatacttctcccagccactaagttatgactggggagctttattcttttcacatgcttttctaattatgcttgaaagccccactaccttgttagggagagacattctagcaaaagcaggggccattatacacctgaacataggagaaggaacacccgtttgttgtcccctgcttgaggaaggaattaatcctgaagtctgggcaacagaaggacaatatggacgagcaaagaatgcccgtcctgttcaagttaaactaaaggattccacctcctttccctaccaaaggcagtaccccctcagacccaaggcccaacaaggactccaaaagattgttaaggacctaaaagcccaaggcctagtaaaaccatgcagtaacccctgcagtactccaattttaggagtacagaaacccaacagacagtggaggttagtgcaagatctcaggattatcaatgaggctgttgttcctctatagccagctgtacctagcccttatactctgctttcccaaataccagaggaagcagagtggtttacagtcctggaccttcaggatgccttcttctgcatccctgtacatcctgactctcaattcttgtttgcctttgaagatacttcaaacccaacatctcaactcacctggactattttaccccaagggttcagggatagtccccatctatttggccaggcattagcccaagacttgagccaatcctcatacctggacacttgtccttcggtaggtggatgatttacttttggccgcccattcagaaaccttgtgccatcaagccacccaagcgctcttcaatttcctcgctacctgtggctacatggtttccaaaccaaaggctcaactctgctcacagcaggttacttagggctaaaattatccaaaggcaccagggccctcagtgaggaacacatccagcctatactggcttatcctcatcccaaaaccctaaagcaactaaggggattccttggcgtaataggtttctgccgaaaatggattcccaggtatggcgaaatagccaggtcattaaatacactaattaaggaaactcagaaagccaatacccatttagtaagatggacaactgaagtagaagtggctttccaggccctaacccaagccccagtgttaagtttgccaacagggcaagacttttcttcatatgtcacagaaaaaacaggaatagctctaggagtccttacacagatccgagggatgagcttgcaacctgtggcatacctgactaaggaaattgatgtagtggcaaagggttgacctcattgtttacgggtagtggtggcagtagcagtcttagtatctgaagcagttaaaataatacagggaagagatcttactgtgtggacatctcatgatgtgaatggcatactcactgctaaaggagacttgtggctgtcagacaactgtttacttaaatgtcaggctctattacttgaagggccagtgctgcgactgtgcacttgtgcaactcttaacccagccacatttcttccagacaatgaagaaaagataaaacataactgtcaacaagtaatttctcaaacctatgccactcgaggggaccttttagaggttcctttgactgatcccgacctcaacttgtatactgatggaagttcctttgtagaaaaaggacttcgaaaagtggggtatgcagtggtcagtgataatggaatacttgaaagtaatcccctcactccaggaactagtgctcagctagcagaactaatagccctcacttgggcactagaattaggagaagaaaaaagggcaaatatatatacagactctaaatatgcttacctagtcctccatgcccatgcagcaatatggaaagaaagggaattcctaacttctgagagaacacctatcaaacatcaggaagccattaggaaattattattggctgtacagaaacctaaagaggtggcagtcttacactgccggggtcatcagaaaggaaaggaaagggaaatagaagagaactgccaagcagatattgaagccaaaagagctgcaaggcaggaccctccattagaaatgcttataaaacaacccctagtatagggtaatcccctccgggaaaccaagccccagtactcagcaggagaaacagaatggggaacctcacgaggacagttttctcccctcgggacggctagccactgaagaagggaaaatacttttgcctgcaactatccaatggaaattacttaaaacccttcatcaaacctttcacttaggcatcgatagcacccatcagatggccaaatcattatttactggaccaggccttttcaaaactatcaagcagatagtcagggcctgtgaagtgtgccagagaaataatcccctgccttatcgccaagctccttcaggagaacaaagaacaggccattaccctggagaagactggcaactgattttacccacaagcccaaacctcagggatttcagtatctactagtctgggtagatactttcacgggttgggcagaggccttcccctgtaggacagaaaaggcccaagaggtaataaaggcactagttcatgaaataattcccagattcggacttccccgaggcttacagagtgacaatagccctgctttccaggccacagtaacccagggagtatcccaggcgttaggtatacgatatcacttacactgcgcctgaaggccacagtcctcagggaaggtcgagaaaatgaatgaaacactcaaaggacatctaaaaaagcaaacccaggaaacccacctcacatggcctgctctgttgcctatagccttaaaaagaatctgcaactttccccaaaaagcaggacttagcccatacgaaatgctgtatggaaggcccttcataaccaatgaccttgtgcttgacccaagacagccaacttagttgcagacatcacctccttagccaaatatcaacaagttcttaaaacattacaaggaacctatccctgagaagagggaaaagaactattccacccttgtgacatggtattagtcaagtcccttccctctaattccccatccctagatacatcctgggaaggaccctacccagtcattttatctaccccaactgcggttaaagtggctggagtggagtcttggatacatcacacttgagtcaaatcctggatactgccaaaggaacctgaaaatccaggagacaacgctagctattcctgtgaacctctagaggatttgcgcctgctcttcaaacaacaaccaggaggaaagtaactaaaatcataaatccccatggccctcccttatcatatttttctctttactgttcttttaccctctttcactctcactgcaccccctccatgccgctgtatgaccagtagctccccttaccaagagtttctatggagaatgcagcgtcccggaaatattgatgccccatcgtataggagtctttctaagggaacccccaccttcactgcccacacccatatgccccgcaactgctatcactctgccactctttgcatgcatgcaaatactcattattggacaggaaaaatgattaatcctagttgtcctggaggacttggagtcactgtctgttggacttacttcacccaaactggtatgtctgatgggggtggagttcaagatcaggcaagagaaaaacatgtaaaagaagtaatctcccaactcacccgggtacatggcacctctagcccctacaaaggactagatctctcaaaactacatgaaaccctccgtacccatactcgcctggtaagcctatttaataccaccctcactgggctccatgaggtctcggcccaaaaccctactaactgttggatatgcctccccctgaacttcaggccatatgtttcaatccctgtacctgaacaatggaacaacttcagcacagaaataaacaccacttccgttttagtaggacctcttgtttccaatctggaaataacccatacctcaaacctcacctgtgtaaaatttagcaatactacatacacaaccaactcccaatgcatcaggtgggtaactcctcccacacaaatagtctgcctaccctcaggaatattttttgtctgtggtacctcagcctatcgttgtttgaatggctcttcagaatctatgtgcttcctctcattcttagtgccccctatgaccatctacactgaacaagatttatacagttatgtcatatctaagccccgcaacaaaagagtacccattcttccttttgttataggagcaggagtgctaggtgcactaggtactggcattggcggtatcacaacctctactcagttctactacaaactatctcaagaactaaatggggacatggaacgggtcgccgactccctggtcaccttgcaagatcaacttaactccctagcagcagtagtccttcaaaatcgaagagctttagacttgctaaccgctgaaagagggggaacctgtttatttttaggggaagaatgctgttattatgttaatcaatccggaatcgtcactgagaaagttaaagaaattcgagatcgaatacaacgtagagcagaggagcttcgaaacactggaccctggggcctcctcagccaatggatgccctggattctccccttcttaggacctctagcagctataatattgctactcctctttggaccctgtatctttaacctccttgttaactttgtctcttccagaatcgaagctgtaaaactacaaatggagcccaagatgcagtccaagactaagatctaccgcagacccctggaccggcctgctagcccacgatctgatgttaatgacatcaaaggcacccctcctgaggaaatctcagctgcacaacctctactacgccccaattcagcaggaagcagttagagcggtcgtcggccaacctccccaacagcacttaggttttcctgttgagatgggggactgagagacaggactagctggatttcctaggctgactaagaatccctaagcctagctgggaaggtgaccacatccacctttaaacacggggcttgcaacttagctcacacctgaccaatcagagagctcactaaaatgctaattaggcaaagacaggaggtaaagaaatagccaatcatctattgcctgagagcacagcaggagggacaatgatcgggatataaacccaagtcttcgagccggcaacggcaaccccctttgggtcccctccctttgtatgggagctctgttttcatgctatttcactctattaaatcttgcaactgcactcttctggtccatgtttcttacggcttgagctgagctttcgctcgccatccaccactgctgtttgccgccaccgcagacccgccgctgactcccatccctctggatcatgcagggtgtccgctgtgctcctgatccagcgaggcacccattgccgctcccaatcgggctaaaggcttgccattgttcctgcatggctaagtgcctgggttcatcctaattgagctgaacactagtcactgggttccatggttctcttctgtgacccacagcttctaatagagctataacactcaccgcatggcccaaggttccattccttgaatccataaggccaagaaccccaggtcagagaacacgaggcttgccaccatcttgggagctctgtgagcaaggacccccaagtaacacaaccatgagggtgcaaatgcatgggccactaatggtagagcaagaaaacagaagggccctggttcctcgaaggcatcagtgagctgaaatgcctgccctggatgtcctattcctaggtgtttttctgcctgaagcagattaaaccctttgttcacttctccaagtagggcttctattacagcccaaatcaatccccaccccagatgacatcatcctattaatacttttcaaagtcttcctgtccttaaacttccagcttccccaaaaccccacagaagatcagcagtctgctctcctaagggagcctgggcctgactggcatagctctcccttacaatagtaagcaattaattcagctttgcgacttgatcagtccaaagtggctgccagtttgaaaatctcagaaaggtaccatatgtactaagagaagccctgacatgagggcctaagccaaaagttggcccacatccttcctcttccaaatttaggatgggcactgtaaagataaatatgaatttaataagtttaattccacctgttgaaaatgaggcaagaaattttcctcccctccatgtcaggttattacttgagaaaacttgtatgtgctttctcagtctctttgaaatatatatatgtatataattttttttttattttgagacggagttttgttcttgtttccaggctggagtgcaatggtgcaatctcggctcaacctccgcctccgggttcaagtgattctcctgcctcaacctccctggtagctaggattacaggcatgtgtcaccatgcctggctaatttttttgtatttttagtagaaatgggtttcatcatgttggccaggctggtttcgaactcctgacctcaggtgatccacctgccttggcctcccaaagtgctgggattaaaagcatgagccatcatgcccagcctgaaatacatatacagatatatatatttaaaaactgaatcagccttttgtcagctttatgacctaggaatgtctttctcaaggatctgggaaatgtaaacattaccagatagcatacctatcttccagtttctgtgggagggtaacagcctaatcttaatgagtaccttgcaccaagctataaaagtaactcctgtttccacactcccccacccccgaaaagttgatatcttagataacacaagtggtcacatcaattatcaggtaaagttagaatgaactgtgtgaccagtggtgctgtcaagttctcttagttgaggactatttatctcgaaaacatacatgtaatgggctgtacctgcttggctgtacaaaatggtgaaatttccttctgtctttgtgatctcttagcaaagtgcctgtgatgtgcatcacattctcatttaatttttattcaataataaagcttatctttctctactgccttcatggagaggatttctgggttgagagaagattttgttttttaaattatatttccccaacagcaccttcaccctttattctaaaactgctggctgggtgtggtggcttatgcctgtaatcacaaccctttgggaggccaaggtcggaggactgcttgaggccaggagtttgagaactagcctaagcaatatagtgagaccccatctcttaaaaaaaaatagctgggcatggtagtgcacaactgtggtcccagctactcaggaggctgaggtaggaggatcacttgagcctgggaggtggaggctgcagtgagcagtgatcacaacagtgcactccagcccgggtgacagtgcaagaacctgtttcaaaaaaaaaataaaattgctgtctttttcactcacaccttcactattcatggggagaagtgtgtaaggtataacagtctttttgtaataaacctccccacttccactcttctaatcagaagtagagatgatgttatgagaagttgagattaaggttgtagcttttcttttttcttttttttgagaccgagtctcactctgtcggcccagactggagtacaacggtgcgatcttggctcactgcaacctccccactgcccaggttcaagtgattctcctgcctcagcctcctgagtaactgggattacagggatgtgccaccacgccgggctaatttttgtatttttagtagagacgaggtttcaccatgttgaccaggctagtcttgaactccaggcctcaggtgatcccccaacctggcctcccaaggtgggggattacaggcatgagccaccatgcctggcagattgtagcttttttgtttacagtttggtaattacttcatgccagtctgtcatgtttaataaacaacacaggttagtgattgctttttttctttttttttttgagatggagtttccctcttgtcatccaggctagagtgcaatggcgtgatcttggctcactgcaacctccacctcccagattcaagtaattctcctgcctcagcctctggagtagctgggattacaggcagcggccaccacagccagctaatttttgtatttttagtagagatggggtttcaccatgttggccaggctggtctcaaactcctgacctcaggtgatccacccgcctcggcctctcaaagtgccaggattacaggcatgagccactgcacccagccaattgcctcttcttcaacagaaaagaaagaaaatgaaactatgtaagttcagccatgtgcagggatgctttagaaataacatttagatttttaatttgtattagattctttggacctagtactgtatttctcacagtagcatttacccaatttctttcggatcctacgtatggcagttcagcagtgacatttccatggtattttcttaacttctttaggcctcatttttcctatctgtagaatgagggagttagattagatggtctctaaatccgtacatctacaaagaatatgaatctttgaaaaattgttttctttatctggatcacaagccactatcaatctatgagaatctgcactggagttgaagaaacaagctttattcacaaaatcaaattttatttgcctagaaatgttcggcttacaaaacctgaaatgaactctttggaagctcctctatggcattattctgatgctcagggcatcaacatgctgggacactcccttgcctaacctctgtgcccaggggccctgcctgaggacgctggcaggattctctagcttgctctgaaaaacgatgcctttgctgaagccactcttctggttgtccttttatggcctgtccccatttcagtgattcccctgcaagctgaagcatgcagcagttagaccagtttttccattcttcttaattcccaaggccctttcctaggctttcataatgcaagacacaaggacagatgattattatttctaggcttcggatatttgtgcagaggactagagttgagaaagggagccttgactgtggtaggcctgaatgtgttctaagtttggacatgacctcagagtgagcactgaggctggcccacaggccagaaacccacaaaaatatggctgtccatcttgcccacctgcctaacagtttgtcccataaaagcattaaattaggagacagaaatcaactaggtgcagagttttgttactgcattgcacgtctcctgagttctcaaatccgtattttcaattatctaatggatattcaagtccaggagatggctcacagtcctcacattacaaaacagaacacacacctcacatcacatgcaaatctccacctagccttgtttactaactgggagatttttaaattataagaatcaagtaggatctttgcccacgtatttttttaagagtttttcacctaccaaaaagttgtactcaatgtcttccttaattcatcctcctcactcagtctctatttacaactggttattaaattctgttgactttatctcctatatatctattttttaaagattatggtaaaatatgcataacaaaacttacaattttaaccttttttttgagactaagtctcgctctgtcccccaggctggagtgcagtggcgcaatctcaactcactgcaacctctgcctcctgggttcaagcaattcctaggcctcatcctcccagcagctgggactacaggcacccaccaccacactcgactaatttttgtatttttaatagagatggggtttcgccacgttggccaggctggtccttaactcttgacctcaactgatctgcctgccttggcctcccaaagtgctgaaattacaggcatgagccaccgcacccaggtatcaacctttttttttttttttttgagacggaatctggctctgttgcccaggctggagtgcagtggcgcgatctcagctcactgcaagctccgactcccaggtcacaccattctcctgcctcagcctcccgagtagctgggactacaggtgcctgccaccatgcccggctaattttttttttatttgtttttattttttagtagagacagggtttcaccatgttagccagaatggtctcaatctcctgacctcatgatccgcctgtcttggcctcccaaagttctgggatttacagccatgagccactgcgccagcccagtattaaccatttttaagtgtacaatttagtgtcattaagtacattcatcatgttgactactgtcactacccatttccagaattttttcaaaatcactccaaaccgaaaatttgtacccacaatacccctcttcccacaaccctggtaacctctaatgttctgtatctatgacataatttgcctattctaggtaactaactcatataagtggaattatacaatatttgtccttttaagtttggcttatttccattaacatgttttcaaggttcatcattatagcatgtatcagaatttcattccttctacggctgaataatatcccactgcacgacctcaccacgttttgatcatccattcgtctgctgatgggtccttgtgttgtttctatctctgtcagcttgggctgctgcaacaaaataccgtagcctgagtggtttaaacaacacacattcatttctcacagttctggatgctgagaacccaagagcaaggtgctagcagatttgggttctggtgagagctctcttcctggctgtggccaccttctggctgtcttcttacatagtgaggagagaaaggaaggctttggtctgttctcctcttcctaaaaggacactaattccactatgcgggctccaccctcatgacctcgtagaaatctgattacctcccaaaggccctactcccctaataccattgccttgggggccagggctttaacatatgaacttggggcatggggatcaggcacacattcagcctgtaacaccatttagattaccatctttggacctaaatatctattttaaagttgtatttttttcctgactacgtaagtagtggatgctagtaatacaaacttcaaaatttttaaaagcataaagaatattaaaatgactgtaattccaactatgcttgttattttgtttgttccagttttctttatatgcatatgtatgcatgtgtatatgtgtgtgtttttgttttttttttttacaaaatcagaatcattatgtagttgtgtccaggttttacactaaacattttataaacttttttttgcgttattaaaaattatttgtaaatggtatttctgatgacagcataaaattctattagaaaaatatcaaaattcattttcctattgttggacctttagattgtttctggtttttcacaactttaaatactgttaacaacttctttttatacccattttttggtccacattttaaatcctcttagcatggattcttagaaatgaaattactggatcaagaagtacttttaatacttttaagattatagatacatattgctattctaaaaagctatgttaatttacattggccaccagctggatagggtgtccctctgtgcctctgaggtggtccctagtggtctctgcccttggaattcacgcccttgtgtggtcctgtgttcacactgtaccagagttggtctgtgtgacccaacagcatatggcagaagtgctggtatgtcccttctttcagattaggttatagaaaagatggtggcttccatcttgggtgcaactgcccttgcgtctttctgtcacggaccatttgctgtgagcaaacctgtggaggcccacagagaggaatggaagcttcctgccaacagccacatgagggagctgtttctcccattttattctttgcttttcaatttagtatataaactttaaaaataatccaatctatctttccctatgtgatctctttcattactttttgatttaaaaaatgtatcaaagcactacatattcatagcaaaaagatggccaaataattctaaacagtttataatgagaaacagtagttccttgccttctctttcagagtctcagcaactgttatcagccagaattcgatcagagaaacagaaccactaggagcgatatagaaaaggaatctataaaggaaactttaccttacacaattgttggagcttgctgaacactctgtgtaaggctgttgcttctgtgtttggtgttggggccttaagtcagcagcgcaggcagtctggaagggaagacagatttcaagtggaggacaggaaagaaaaacttgaacctacatcagtctcttaccctcgccaaacctccaattcagatgatacaggcaccctgcagaagaagctggtgacctttaccacagagctaagcatgcgcctggcccaggagtggctgaagctgaaggaagtcactcccaagttctttcctagaatcatgatgtgaatataggaaaataatgaaatcactgactttattttctcagctggtcattcactccctttcaagggtttaagaactactatttataaaatattctagatatgtatagactaaaagccagcggttgttcaccaccagttgggcacttatgcaaacaaacgtgtgtgtgtgtgtgtgcttattgtaaaaaatttggaaaatactgcttgttagagaaaatttggaaaatactgcgaagtataaagctgaaaaaagtagctgcagaaaacctctgttgacatgttaaaattctggaggaatttccgtctttttttttttttttttttttttgagagaaggtctcacttctatcacccaggctggagtggtggcacaatcatgggtcactgcagctcaagtgatcctccacctcagcctcttaaagtgctgggattacaggcatgagctactgtgcctgggctccttccatcttttataaaagatgcttcttgtttgcagaattgctatcatacagttctacattctgcttttttctcttatttattgtgaacctttccgctactacgagcaatcttccttgtgggtcaccattaagaggtgcttaaataaattactgtgcatttatgcatctgacccaataattaatggcccacctcttgtgggtcatttgggttccttctcttggcacagaccttctcctggcttatatttcttgggtgtaggaggtataccctcctaccaaaggtatggctcacacacctggtatgaagtaaacagcacagttcttcaaacatccccagggcagccagacaaaatccacaaaaatgcctctcccttttctgggcatgacagaaacttcattctaagcgtgtgcaatgtttatatgtagacacaacacacatgcatgtgtataaagcaaataaatacatttccctctattgttcatttgatttcacctacttacggctgaagtggaaaacttattaggcctggaaaagcctttcacagccaggaactggaatggtttgggataatttccttcaaatactcatattaagctttatttgtgttaagagaactatttaaaactcatcttaaaaacatcttgtttaaaacaatcttaaaaacaatctaatactaacccagaatgtaacaatctaaattttacttgactattcacaatagaatttaaaagtttcagccaaagttaatatgaattaataactaaaatatcaacaagcattttagttaacagtatctaactcagaccctacaatcagcatctcccataagcaagaaccggggttaggttatgtggaagttacaaagatgagtaaataaaacacagcatccctgtcatcccaggaccaaagggataggagtgaggatgatggaagtagaaacttaaatgtgatgacaataggatagagattgattccaaaaaggcatgggaatctggaaagttctcaaagaaagaatccgaaggtgttaagaaaggcctttggaaggtagaattggagagaacagtatgaacaaggactcagagccagaaaaattgggcgggcatacaggggaaagattttagtggtaatgaggaaacaaggctgggaacacagaccagggccatatcaggtccggcctcagcaggagaaatataagcaatgggaaccatcacactgggtgaaattcaatctttattttaaaagatggtacacaaccatctgccaatttataaacagatgatcaatttatagatttttaaaagtctacattttaataaatgttttacattgtgttcattttattagccattttttgattttcctaaaatctgttacttattaatgatgaatctactccaaaatcttttttttttttttttggagatggagtcatgccgtcacccagactggagtgcagtggcgcgatctcggctcactgcagtctctgcctcctgagttccagcgattctcctgcctcagcctcccgagtagactagctgggattataggcgcacgccaccacgcccagctaatttttgtatttttagtagagacggggtttcatgttgaccaggctggtctcgaactcctgacctcaggtgatccgcctgcctcagccttccaaagtgctgggattacaggcgtgagccactgtgcccggcctctactccaaattctaagtacgatactgttttggttttaaataccatttttggttaaagagccccatttaaattgtttaaatgaaataaatacatccaaagtaaatgcacggtgaaaaatacattttaatccaaaagttttgaatattggcacttagaaagttatttacaatcaattttactataccctttgtgaataaagagataattatgtacgtgtagctacctatagttgtttctttccaactcaaacaccataactatgtggaaaaagggtaagagttaaagctgctgcagctcaaaatcattacaatcaacttagattctgcaaattttcccagggttgaaaaatgctggttaaatcaggacaaaagaggaggcaagtgagtacaccccactcctctcccattttacgtgttgctcccttacttaaccggcaaagacctgcacctgaattctagacaatttcatatacaacaggcctcttattatgggtccatagcagatggtttagggtagatgttttaaagatatcaatgctaatggcctaccaatgactttcatgacctcccaatattcgttttaatggtagtcaagagactatcaagcaggaagcctgatctcgacatgtttcctctgcggctttggtgaagctgactatctgcagtataaaatcttatggtttgatcgaagtctcatttttgactagaaacagtaaagagcagctttattaagatcaatggaatggttctgaatgcctgtttctacagaaggattaaattaaaattttttcttttttttcttttttgagacagtcttgctctatcacccaggctggagtgcagtggcacgatctcggcttactgcaatctccacctcccgagttcaagcaattctcctgcctcagcctcccgagtagctgggattacaggcatgcaccataacacccaactaatttttgtatatttagtagagacagggtttcatcatgttggccaggctggtcctgaactcctgacctcaagtgatccatccactcaggcctcccaaagtgccgggattacaggcatgagccaccgcacgtggcctagatgaaagtttttaaaagcctgggctaataaaatcatccaccaatcatttttcttatggttaaagcagccaaaaagctgtcacagcatttttgagatgagaacataaggcttgtgtggctttatgatagatgctgttagtcattttatttgattaagcccttggtcagtcatctataccttaattaatattttgttcttatagaaaaatacaatccattttatgagtttctagaaataaataatggagaaaaatagatactacctgttcctaatggtctctctggaaattacagcttttgcctaggaagatacacatatagaatataatttaagttcaaaatatatttcattatattctatcccttttaattttttgtttgtttctttgagacggagtcttgctctgtccacccaggctggagtgcagtggcacgatctctgctcactgcaacctccgcctcctgggttcaaccaattctcctgcctcagcctcccgagtagctgggactacaggtgtgcgccaccacacctggctaatttttgtatttttagtagagacagggtttcaccatgctggccaggctggtctcgaactcccaacctcaggcgatccatctgcctcagcctcccaaagtgctgggattaaaggcgtgagccactgtgcccagccttttttttttttttttttttccgagacaagagtctcactctgttgcccaggctggagcacagcggtgcaatcttggctcactacaacctccacctcctgggtttaggcgattctcctgcctcagcctcccaaatagctgggattacaggcacatgccaccacacctggctaatttttgtatttttagtagcgacggggtttcgccatgttggccaggctggtctcgaactcctgacctcaggcgatccacttcccgacctcaggtgatccgcctgcctcggcctctaaaagtgctgcaattacaggcataagccactgtgcctggccctatcccttttaattttctaagtgaccagtaataaacaatgatttgtttattactaggtagcaggagaaaaactttttagtcacttttccagctaagaatttcatttaaagatacctatgacatatcttgtggtactaagaatattagagaactggaaatccagtttttttgtggttttttaagaaagagaatctgactccattgcccagcttggagagcagtggtgcaatagctggggctacaggcgtgagccaccacaccaggcctggaaacccagttttaatttgtgaactacaaatggttggcaactgattccttaattgttattgcaggagtaggcccaacatgagtccatatgtagcccttctctggtctggtgggaactgtgggaaatggtgatgaccgtgacttgaaatactcagaaggtgcatgacaaacaaattccaagtattccatcttccttggaagatcttcctctggccctggaaggcagccaagggaaaggttaaatacatttttgaccatatatatcattttcataagatgttaaaatttctagacactgggagagaccactctgggagcaacctggcattagcccttgaaacatgcattactttgaaattattcttaatcattttttcttctttaacggcttaaagaatatggcattctcccaaaaacagtgattgaacacttgcatcatgtttattttgtacccacactgctctaagtttacatgtatcaataccttcattcctcacatcaaccttctgaggtaggcactattattattcccattttacatatgaggaaagtgaggcaagagagactaagaaacttgccaaagtcacatggccggtaaatggcaggctgtgaacctagacagtctggctccagaactggtgttctgacctcatgccatgctgcctcgctgtaggacaaggatgcatatcagaatctggggattagaaagaggaggcagtagaggaatcccgaaggtgattctgatacatcactgcctctgctgagatcctgatccatagataaggtaaataaaaattctatatacttataagcagaaggctagaattgtttggtaatgtatcaaacttgacatataggtgagaataacagtggtatattatttgtccctggagttctctccaaaaacacacttatgcttgttctcaggatgcaaaagtaatgatgcatgctcactgcagaaagataaaaagtctgaagtaactgtaaaaatctgaaaactttaaaaattgtattaatcagtaaattcttgtgagtctatctcacaactgttttggcagctttgaaattaacaaaagcacagcagctgccatttcaactatcagcctttatactataaaggcctaagatgacatgtgtagcatgcagaggcacacatattgagaatttgcaagtatgggataactgggatagttctttcctaaattatttttgaataggtttgtataaataagtaacctaaataacctagttcctgagcaatacattcttgtagtacagtttaaccctgggtcactccaaaaaaatcttatccataccacttcttagtagatgcacattgctctaactcaaaataactgatagcactcacactccagctacataaaatgcctcatattttctataaagctctctaatttttttgtacttaataatactcatgctttttttgttatggactgaattgcatccccccccgccaccctccaaatttatatgttgaagccctaatccccaatgtgatggtacttggagatgagacctttagggaggcaattaaggttaaatgaaaccataagggtggggccctcatctgacagaaatggtgtccttataagaagatacaccaaagagctctcactccatgaaaggccatgtgaggacacagcaagaaggtgaccatctatatgccaggaagaaaagcctccccagaaatccgtgttgccagcaccttgatgttggacttcagcctccacaactgtgagaaagtgactttctgttgtttaagccactcagtctgtgatattttgtcctgacagcccaagctgactaacacactcttttacataatattggagagttaactaagttaaaaaaaaacctgtgccatttgtcaaacttacctatgatataggaggcgggatcaaattggtctctggggctagagagggtaggaatgagccacgtcagtgctgcactcttctcgcaatactggtcctggataaaacctctgatttgagcatagtagggctttccatcttgttcatcaatcacagaaacaacatcaccaatttggtaatatactccctgggggaaacagaagataatcccacattgaaaataaaaatagaacatcacagctatgaatgaaccttaataggtaagcaagttttcaaagtggtcagtaaaaggtgttcgagatagtctaatgtatcagtgtttatatgtttggtgccaattctaaagttgtttcacgtttgaatgaaaattatacatacacatacgagggtgcatatatgacagtttacatctggagaaaagatttgttcataaagtattttgattttatattgccgtaataccatccccactttttaaaaaatagactttattttttacagaggttttaggtttacagcaaaattgagcagaagtagagagatttcccatatacttcctgcccccacacatgcacatcctcccctattatcaataacccctcccaccactagagtggtacacttgttacacggatgaacgtacactgacatagcatcatcaaagaccagagttcacattagggttcactcttggtgctgtgtattctgtggggttgggcaaatgtataatgacatgtacccaccattatagtatcatacaaagagagtattaatagtttcaccgccctaaaaatcctctgtgctccgtactatccctactttgttagccacagtcatgaagcagtagtaaggttaaacggcttgctgaaagccatagagactgcagccaaagctcctacatcagctcagcagtcttttctctgtactgtcttgaaaatcatgctgatttggtaagaatgcattctacatgccaccctccccaaccatccactcaaagaaaatagataccatgaattcaaaccaaaacaaattcaaaccaaaaataatctttggattatagtcttcaggatatgtttacctcaacctactgtacatctcctagactcactgctgcctttctcttccactcccagttgagttttatatccttccacaacaggactactagtatttctggcattcaaggctttgtgtctcattcatttctgttccactttatacccaactaactaatgtgtacatgtcctgtgttaaatcctccctatgactctggtatccatcctatgtcctcttccctgggtcttgagctggaaataatctctcctctgaacacccataatggttgatccaaatctttatgacatccagcacctccttaagtgggtatagttcttggtaagatatactgtccttgactacgggaacagtgtaattcattgctgcttcccttgaaacagggacttggcagcaggtaaagctgtaggaatgtgtacctcaaccataaaaacacttttgaggaaatacttccagtaactgaactgtaacatagcacctgataggccaggagttttttcctggtggaccctttatccaagtgtctgagggtggctgtttcatctggatcactacggatgggtctggtctatgcaggccacagtccgctacttgctagttcctacccatcaatagctggtccttcctcccagccatcagtccaaagttatttatcatataaatagtttgcatttatggtttgtttgtccacatgtataatcaatattcccaaattctaaatgagaatacttgcttatcataggcttactatgcataacacagcatattcaaatgtatgctgaatgaatatgaatccaaaacatctactttcatagtgtaaaggcagaaatgcaaagtaaaaacaatgtcttagtgaaagattccagtggtaggcagtgcctggcacatagtaggtatttattaatatgtgctgtgttgtgtacacatatataacaccaaacaggactaagtcactgatctgagtagtctcctcatttgctgagaggattcaaggtttctggtagagaaaaggggtccacacgagaacagcactagtttaggcatcaccagatctgagttcatggagttgttctgccactgccatgctccagggaggccactcagccattctgggtcttgggtggtcacactcttggccgtgatccccagtggctcccactcaggctcctcttgcatgcctgatctgggctctagctcagtggctggcagtgacctcttgaacttgccaccatggtgctgcctgccagtggcactgctgtgatagccactacaatactgggcatttgcaacattacttgactactttgttgcattattgtccttatcatttaataaacatgggtggcagacaacaatacgaaagtacagacagtcacaataacaggtcccacacacccttccatggagacacacatggaaactgttagtacactaaacccgtagctcaacaagttgcttctggccttaatctgtaaactgtgaaggtaatgcacaaatacgaagatgtgataactcctactattcattgagtgcttactctgctaagtgcttaacacatatgatttcatttgacccactgaggtagtaactatttacaattcctattttacagatgagacattagagaggttggtcctcgtcacatagccagtcacttgctaaagctgtagagccaggaactatgctctaggcttaagctctggcatgagactgcctcactccatgacttgttggctatgtgatcttggacaagttaattaacctcgctgtgcctcaatgttctcatctagaaaatggggatagtagtatccacctcatagagtgaactgaatgaaataaagcatgcaaaatgctcagccactgatacacagcaactgtttgctaaactttagatattttattaacaatgtattaaatgttggaaaaataagagagatgtttgcctgtgtacagactttttttgttgttggtttttcccagccctgctgaggaatgccagtgtacccctgttgggaggaacagacttcgactatatagattgtgggcttaaaaaaaagtatacttaagggcatcatcacttgagtttctcagtccacctgggtcaagtataaagtactaactcacaccactgtcccctaaatgacagttcagatcccgaaacaccaaatagccttcaatggttgctgcctgtgccgtgccaggcctgccgagccttgggggtctatgttctaattcctttcctaagacttctggtttaaacacaacaatctgtcacttctctcactgaggtatcagatgttcatggactttggccctgggaaacctgacctcctcattcttttatcaaaacatcttggaattcctctcactatgaatttctagtaggtgttaatcctcactactgcccttactcagctcaactccacttaaaggcattttagaatctctgggcctactctacccatttgacaccacagtcgacaacctctactagtccaaatcctgtctctgtccttctcattcttcaatgccatcgcactaacggctcagtcttccatggctccacactatacaatcagcattttaagaataattcctacaatctacactaaaaaaaaatacttaagatcctcacatcatgtgtcagtaggcactttctcctcccacttcagctctagatgagatgttttaataacagccacttatgggggaaaacagctaagaagggaacaaaaagtataatcacaccttatacaaataaagagtagcagagacctttagactaatccaacattttagtggcacattacccactaggcccaactcttccttcagtaactctacaaaagcttaccttgtagaagattgattctgcagtgattatagtggaaactgactcaggagctttgatgggctatgaaaatacaaaaaacattagcacattcatagtatgtatgtgtctacaggcattttcccagccctatgagagttctgcaatttgagaagtactaaaatgtattgtttggtgacaagaactgcaataaaaagataaatgattttctgaatgttgtggcaaagcagtctatttccactgcaatttctgctactattagcttaaaaattgctgagacaaaggacaaccttctgattatgctgctgagatctaatgcaaagtcctctcagagcttcactacacataaacattccagttataaaaatgtacctgctctaatagcctgagcatgacagaatgcaagtaacagaaaatgtacagatgaatacaaagtgaaaaagtgtctcctcaaagacatttcccaactcaactatggaactagccataatactcaacataggttttctagcaagctgaaactaaggctttagaaactttgagagttcttagtaatttgctaccatccaaccatttttgagatctctactaaagctt

SEQ ID NO: 61306 - DNA, 2282 bp, Homo Sapiens
ttctttaaattctacaaagagatacacttcccccaaatacatttactttactgacagcaaagttagtttccatttggaaaagttatcctgtttccaacatcgagttatctctgttgccagaaaatcaaaaggcagccaatccgatttgtaaacctttcctctggcacattgtcaagatctcttgcaaaacgaaattgtcctacagccctcccctcccctgtggctctaagtgcagttctgccccatctaaatattaatattttgcaatcgtgctctttatgagcccctggcagagtggagatacgccacagacgggttgaggagagagtcgtggggaccacctggccagtggctgtggtcttaatggagattgacaagcccaaaggaggtttgcaaataccctgatgcctgcagccggctttgcatccagcagctccctccacagatttacagtggcctctattgtccttgaagagctgcttagaaacaaggttgcaaagctttctccttggggccttgggaaggctggatgaaccctcgcgtctccacctgatagggctgatccaagtgtttctgggtggtggttttccacactggttttatttaaggtctatcaacaggtgctgagtgtgaggcagggaggcaagtgtttttctttttttttttttgagacggagtctcgctctgtcgcccaggccagactgcggactgcagtggcgcaatctcggctcactgcaagctccgcttcccgggttcacgccattctcctgcctcagcctcccgagtagctgggactacaggcgcccgccactgcgcccggctaattttttgtatttttttttagtagagacggggtttcaccttgttagccaggatggtctcgatctcctgacctcatgatccacccgcctcggcctcccaaagtgctgggattacaggcgtgagccaccgcgcccggccgcaagtgtttttctgtgggtgtttcttccttttaaccaactgcaccacatgcttctggtttcaaagcagaaatttcttctctgccactttcatgttttatgtcttttgacttataggagtgccttagttgaaattccatgaaaagggtgtgaagtgtggatcaccttgcttagactctgttaggaggttgagtgcttgtgcaggctgggagagcatgcacttcttttcaggaggcaggtgaagggagcaggtgggatgaggcagaagactggccagaaagaacacttttctccccatgagttttgcagttagacagaagtagtaaggacgattgtgaagttcttgaaagtgagaagagagaacatgttcctttgaaattaaaactcagtttttcctgatttttcacgttagctaaaacgtgccaggaaacgggcttttcctgatttctttttttccctagtacaataacataatgactaaatttggaaaagtactttgcagttttcagagcactttgttattcacagtaactgcagagatccccccgttttagatgagaagggaaactgaggtgtgaagaaggaaaggaacaggagagaagtgacaaagatgagtaaagtattggtaatttcttttctctgggagttctaacattctaacaggcttgtagtttaagacgtttctagatagcagattctcacacctaactcactatattttccaaacttatctaactataagaatccgctggtgtgcttgttcatatacagattcttaggcccatcttctagttattctgatttcagttggtctggggtgatctaggagtctgctttttttaacaaggtcatgtggggattcttatctcttggcatgtttgggaaattttacatagccggcagctgaagtgcacatggaaataagttgtccaaggtcacgcaatctgaactccctgatccccacctggtgtctctggtccctgagcccacatccccctaccacccactgttccacagctgccttcccagggacacagagtttgtgatcaatactgaataattctgccacgtctttattgtcatgccttcatcacctactacgtatgaagctgtccagaaacaggagggatttaagggtgagggagagaatgaagaagacagacacaggcataagagacaaaaagaaacctcaatgttattaaaaattcaagccaggtgtaggggtgcacacctgtagccctagttactagggaggctgagacgggaggattgcttgagcccaagagttcaaggccagtctgggcaacatagcgagcctgcctc

SEQ ID NO: 61307 - DNA, 568 bp, Homo Sapiens
  misc_feature (111)..(111): n is a, c, g, or t
  misc_feature (208)..(208): n is a, c, g, or t
  misc_feature (383)..(383): n is a, c, g, or t
  misc_feature (402)..(402): n is a, c, g, or t
  misc_feature (526)..(526): n is a, c, g, or t
  misc_feature (545)..(545): n is a, c, g, or t
  misc_feature (555)..(555): n is a, c, g, or t
aaccaataccccatctcttaaaaaaaaaaaaaaaagagatggggtattgctatgttgcctaggctcgactcaaattcctgggcctaagcagtcttctgcctcactctccanagtaggtggaactacaggcatgagacacagcatctacaggcatgagacacagcatcttcctgtctttttggctcctttagtcccatctttgtccctntgccccacccctacaggtttttttgttgttgttgtttttgggatggagtctcacactggcgcccaggctggagtgcagtggtgtgatctcggcttactgcaacctcctcccgggttcaagggagtctcctgcctcagcctcccaagtagctgggattacaggcacctgccaccgnacccagctaatttttttgnatttttagcagaaacgcggtttcactatgttggccaggctggctcaaactcctgacctcatgatctgcccgccttgggcttccaaagtgctggggatacaggcgtgagccaccgggcttgggcnggttggttggttttttganacagggcttnttgggcacccagc

SEQ ID NO: 61308 - DNA, 497 bp, Homo Sapiens
tgcctcaagctctctttcctatgtaatttttaaaagcatataatttaatgaaaataaaaactctttagcactagaccatgttcctgaaaatgcacaaaagcctacagttcaacaatgtatcatctctataaaatggaacacaaagatctggatgtagttcttttgaactagtaccataacatcttggaactacttctagataaaataattgcacgccatgggttaccctgatatggagtatagtaagaaaagtagtctactctaagctcatgttatcacatattagtaaaagtggcttcaatggatagttgaatctgctatttacttctaaaacccttttgagagttaaataaggaccccaatagacattttaactgttatttatagatcaaaaaaaccacgtaaacactgaaaacttgcatttatcctgagcagaactgcttttacagaatccacaaatcctatgaaaacatggttacatttgttcacaatatgtg

SEQ ID NO: 61309 - DNA, 596 bp, Homo Sapiens
  misc_feature (546)..(546): n is a, c, g, or t
  misc_feature (548)..(548): n is a, c, g, or t
  misc_feature (572)..(572): n is a, c, g, or t
aacttttaaaatcagaagtaggttttatatctttattcagaggtgattcaactatagaataaagcccttttagcactataaaatccaatgttttgaattttttttttttttgctcagcaatacagttgcattttacaacttttataatcctgaagagattctcttatttggagttttttcatgcattcaggtatttagcatgatgtctgatgtggtcagtaataaaggttgcaatgaagtagtagctatgatcataaccctagaagataaagagatgataagacatttatctaccattcaggaacatcagtattaggaacattaaatatatctctaaggtcgtttaatttgcttacaaatagtcataacattaaggaagtatgaggaaggtttataataaaatcaaggttgtcatccttgtactttaacattttcactgtcattaaaagagcagcaaaaatgtgaaggaaaactaaacattctgcctagcttctaaacatagcctaacttctaaagctggcattaatatgtaaagagtggaagtancncattaattaaatatgcccgagtanactggcatatcaccctggggaggg

SEQ ID NO: 61310 - DNA, 514 bp, Homo Sapiens
  misc_feature (483)..(483): n is a, c, g, or t
  misc_feature (497)..(497): n is a, c, g, or t
  misc_feature (513)..(513): n is a, c, g, or t
tagcaaaggtaccatttttcacaggctattttctactttcataatcatctcataaaggcagtataggttcaaaaggcaaatttttaggagacaacctgatcagccaccaagaatcgtttttgatttggtatcaaaagacataacatttgatcagtttgcaattttgtttgggataaatatccacagtgatactttgactctgaaaaaacatcaaagtgccgctttgggggagatcatgaaaacacagcatgcaggcctaagagttgctaggaaggctacgacagacgggacagcagcaggttctctctcaagactagacccgtcaacagagcatgcagagaaagaggcacagaggctgttgcttcacaaaactgaggacggtcaggatcagccaccaccacttcctggatgtttctggcatagttcccaagtccagcattaaccaaggtccattctgtctaaaatgcacgaaaagcccagctnctgcacagcacagncacagcattaaaatant

SEQ ID NO: 61311 - DNA, 1863 bp, Homo Sapiens
ggattaattcatgatggacaggtgaactccagaaaagcagtcacccttggcagctttcgtccatcgagcgattctgagagagggaacctctggggtgagccccgaaacgttaggttgcgctcagatcagccctgcactttgggatgtcactgagcagacttcccgagtctccatggcttcctgtaacctgccctttccattggctctgatttaagctgcagcctctggcacaccgatggaagctcgcggcatcgtgttttccatccacgtgctcccacagagccaggttgtccaaaaggaaaataatcccactctggagaagcaaaaactgctggggctgctaagaggagcacactgagtaaaccacccaccttccaacagaatccgccttttttgttatttttccattgcagaaagacgaatggcgggacaggcagggcttttgaggaggtgtggatttcatcctccatcataaacaagcagtggctcaggccagctgatgctttcctcactgagctccttctctgcacatgaagcggaagatggggcgtgccatcctgaggtcgggctgctttccgccatccacccaagccaggtccctactgccccgcactgtgcaccttgcctggttaggacctctttgctctcccacctccagtctctccagacccttcgtccagcttcaattccacatcccccagcgagcctttctcaaacacctgggtgcacgattcgtagtttacaagtattgtggaatcgtgcctttcaacttgtattccttggagccctagagtttctgcggtgtcccaggagctgtcacagtggggagagagctgggtggaagggattctgaccccccactcaccgtccctgcctcaagagccccagtcaccccgagtatgtcacaggccaccttctctccatttctaggagagaaaagagtctaaactttcattccatggatgacaaaacagaggtcctcagaggtcagcctattctccaaagacacatatcaaactcatggcagcaccggacctagaaccttggtcttctaatcaccgccattgctctccccttcaagccttctctcctcctctgaacttggaggagacacagcaggggaaggaatccttggctgggaggaggactccaggctgtgggccaggctggatgaccctaggcaggtccctcccccgctggaccttgggaaatcttttggagacagacagaagctcccttaggtctcttccttccactctgggatgctatgaagaggagcctttagctgtctcctctaggcccttcagggccgtgctggctcatggagcaatcatgtgtggctctttaattaaaattacattttagaaaagcacttcctcaatcacaccagtccctttaagtgctcagcagccacatgtggctttagtttctgtgtcaacagcactgtggtagaggaacccacctgttaccagtacacctgccccagccccttctcagcacagaggtgtgctttagcgtccagaaggaactggccccagtaagtctgggataattgcctattcgctaaatgaaaatgagacacttcctgtccggggtaggcataaaagaaacagaaataaaagccaattaaataggaatgacaagatgatagtgcagattcaaaagaaataggtatgcacaagtgacttaaagcagagtcctcctctagcccaggacactcttcagtctggctgcagctggctagcttctttttttttttttttaattctaagaaatagattgaaatgaaacgatggaaaagaagcaggacttctccccgtgggtgtctgtgatgtcctaaaaaaaaaaaaaaaaaaaaaaaaa

SEQ ID NO: 61312 - DNA, 1092 bp, Homo Sapiens
ccctgagcagaaggctctggtgattggtggagaggcttgtatgtggggagaatatgtggacaacacaaacctggtccccaggctctgctaagggttttcgggggggaggtggagggttgggcctgagagcaggagttctcccttagagacccaatcccatctagccacctctggactagtacccttctttcaggcctgagagagagcaggccgtgcaacgagccttctgaagatttgtgtgcaatattcactctccacatgacttccgtctatatccctccagctgccctttggtatgtgggatagggattgttaaccttacttcccagagagataatgaggcctggagaacataggtgagttgctcaagacccagcacaagcatccatgattcctgtaataaggcttccctctgctgttttcactgcagccttaccaagtatggttgggtgtgcaaagtttacattttaaggacctctgctgctgccactgtcattgtggttaatgatggctttaaggtttattcttattcccgtatctttgagagaggaagagagtgggattgctacccacattttaatgaaggtggagctgagccgtagaactctctgggagccatccaacctggctgtggctcataacaaggtattgatcacttcctttggcctgagtgagtccagggtgcctagacaagaggtagcagcctgtggatgtccagcacctttgcagggaatacagggcccaatctggcacatgccccttttcctccaggcccagagcaggggctgttgccgaaaggctgtggagcaacaagttgacatctgacctgacatttgcctatgaacgtttgtcacacttccgctgtgagttgctgaggtaagcaagctgtggggccttcgcaaggcggagcaggccagatccagggctggggaaccccttagagagaggaagacaataattaacaatagctaacacttacagaggcttatagtcagccctcatccacggattcaaccaactgcgataaaaagtattcaggaaaaaaaaaatacaacaaaaaatggtacaaataaaaaatactgtataacaact

SEQ ID NO: 61313 - DNA, 505 bp, Homo Sapiens
tttatggtggtggtaatctttaagaagtttggcataaacagtaaccaagtctttggtcttcaatgcattctctagcagcctttctcaactcgggttcagccaaagaatttaaccccatagaaaatgatttgaatgactctattctcaattctcccaggaatgagtaagttaattcattaaatatttattaattcattaaatatactttaggatattagggtataattctctagataagcctttgttgagaaaggctgcatgatgattctttcaatgatgtaggtaatacagtaagattttaaactgtaacacaaacacacacatatacacacacacacaagcacaattacaaaatgccttcggatagatgactagaaataaaaataattccacaacattctaaaagcatctttatcaatatagctaatttaatgaataaatgttatttgccatctgaagtaaaactttgagtttcagagctttactttacatcacaccagctgac

SEQ ID NO: 61314 - DNA, 3703 bp, Homo Sapiens
gggactgaagacatatatgtgttatttctaagcacatttcctatttatgtgataatggagatcgccctttaaccatcacttggacgtgaaggaggattcttcttcctccattagtaaatattccttgacttgataatactgaaaatatgtgaggtgaatgagctttaatcctgtggtttggtttggtttttggttgtttgcagtcttggactgttcacctgcactgtcttgtgcctttgagtatgattaactgccttgacgccttacagtgcattacacaactctacttcttccatttcttgactaatctctcatgctgtttgactgcccattggaatctttaagttagctacttaggaaagactttaggaaggagaatgctaagagaactggcagagaagtcaggagcctgggctctgtccaggccctgcgtaagtcctttcacctcttcctttgactcctttacaaaatgaagttgaactcattcgagctttaaaaagatgacgccaagaggcaagacagagggcagtagatgtgaaagtaacatgaaagagaaaggaacatctgaaaaaaaaaaaaaaggtagaaaaagattttgacaaatagtactaaaaacaaagaaagaatatagaatagagagacccaattatactgataattacaattatcagtattgtaaaaactacagcaaaaaagctaaaaacatattcagcttttattgtccataaaaagtgatcacaccatgtctaactgtaattcgtttgtcaaagacactagaggccaaggactaaattgcggattaagagtttcttccttttatttcctgcatatccagaaacctggggtcatagatactcttccatggtgtgttgtttggcacaacttgcaagtattttggcagatggttagaaaaaaagactttaagaaatatgcaatagtactcaggactctaaatataataaataaagctaagataccagtatcctgccattcattacaatcaacatttattgaacagcagttatatgccaggtagcagggatacctagaacttgcccctcccactagcactccagaagagttcctgctttcccagcctaaagcaacagcaagtcttacatgagctaggcttactgtgatagctgtcctgacggcgagtggcaaacatggcccagtgccttcctcatggatgaacatgactctacactgggactccccggtagacctttttgtgatgatgagaaagtcctgtgttggtgatgttcagtatggtaactagtgactgtatgtgctgttgagaacttgaaatatggctactgtgactgagggacagaacatttaattttatttaactttggttgagtttaattcaaataactacatattactaatggctactgattggacagcagctttctagacccattgttaaaaataattataagcaatgagtacctcttatgagatagaattaataatcccatttattgagggcccatgacagattaagaattatgtttgacatatattatccctaatcctcacaagaatggttcatttgacaaataagataactgaagttctgagagataaattgctttgttatgtcctcgcaaggaattgtgagagctggaatttgaacctaattggtcagactccagagctgggtgatttctagtaatctgccaaatctgtgtatgtactgtccggatgctgtgtcttctgagtacatcttctccttgctttatggattagttagcaatgtctttatcttggtcacataggacagttacagggtccatcttatctcttctgaatatggacgtatcactgctctggaaccattcatttctcttactgaggcctatgtccttcaaaaaatattaagagttgagggtccaacccagcttcttgagtagtaagctaatcacctacaagtatatttccccagtagatgctgagagaagcatcaaagtacatgggtagttctgtggacatcagtggcactcagtaaactcttggcatttgagtgtttaactgtcacagttgaggatatctgtgaactctcccaaggcctgagtcactgaatgagcccagccagtacttgggcgtctgtggctccattctgctttgctgttttctgctttccatggaacatacagtaactctcttgaagggtctgaaagcctcaattacaacgtttcagtgattctgaactgatttttcttaggaaagtatatatgcagatggtacttgcaggatcaccagggggtagtaacgtggaggagtggtaaaggtctactggacaatcaggtggctaccacccaaccactcatggtgatgtgatatgaagccacttttctttattccttcagatttaaggtttccccttcaggaagcaggttacttaacaagtacttgatttcaccataacatgcattatgacattatctttttttcttttctctttttttttttgagacggaatcttgccctgtcgcaggctggagtgcaatggcacgatctcggctcactgcaacctccttctcccaggttcaagcaattctcctgcctcagcctcctgagtagctgggattacaggtgcatgccgccacacctggctaattttttgtatctttggtggagatggggtttcaccatgttggccaggctggtctcgaactcctgacttcgttatccacccacctcaacctcccaaagtgctgggattacacgcatgagcctccgttcctggccgatattttattttcttaaaaggtcattatcagatgccacaagagtatttctataaactatgacccaagtatagcctaatgttaatagcttaaaataggttttatttaccttttttgccctttaaaagcaaggaattattttttaatggaaagaacatagactttgatgatcagttcacatccttgctttaccccttgaaaaatgtgcaacctggaaagacagcttaacattcctgagtcacatttgtccaaataatacaaacaatggcaacaagacttcagcactaatgtctgatgttttttgtatgattaatctgtgccaggttccattctagtttctttacacacattataccatctaattctcacaacaactttgcatagcaggcattgtcatttccactttacaagcaggaatctgaggaccagagttaaaagtaactggtccaagattgcctagttaataaatggtggaatttgcagtcagacccaagctggtttgggccaatacacttgaccttcttatgatacgtcagccttgtgaaatagggcagatactattaataatatccaccttgtgtgatcattatgaaggttagatataatgtatgtggaactcttgccaccaaagtggttccacaagaggccctaaacaaatgagtaatcattattatttaaaaatgtccgtaagtgaaaccgatttgccaagaccagtaaaaatgagagcttcttaaggaaaagagtaggaggcatacctttgtttcattttgtttgttggtttctgtgcttgctttttgttcttttctgttaggcacaggttttatttagaataaattaaatttttttttctttgatgagtgcggaaataatagttggaaacattgaatggaacagctaatgtaccatagtaatacttcttggattactaaaaaaaaaaaaaaaaaaaa

SEQ ID NO: 61315 - DNA, 717 bp, Homo Sapiens
ttttttttaatgtactgttcttctagaaaattagcacaatttactatggaacaaacatgttttgaccaatgctgagctaagggagcttcacatgaaagcctacaaatatgaggaggaaaaacctagccacggcacatttccaacaatttcttaataattcctcttttcttaaccacagaaataaatcagagcctttaaaagttaccttacagataccagcttctcagaaattattttgcagttacgtgagagtatgtgccttcacaatgtcagcaccaacatctttagtattttaagaggaaaagtcaagtccactgaaggaatttaacagatttttccagaaacacttaagacatctataattaggttttaaaaggagtgacagaatgtcttgaatcacaaattaatctgaattcaggacaataataactttaactcttacccacttttataagccattattcccattaatggctgacaatctatatttcccaatttccatgccaaatgagctgagcttccattcttttgaggatgaaaaacaaaaagactttttgaggatctggtatttgccaggatatcagttaacttttggtggctaacaagttgcgtccaaaaattaatggcttaaaacaacatttatttggactgttagaaaggtgatagaaccttatcaatttgggagacaaaacaaaaaaacaaggttaacttattgcg

SEQ ID NO: 61316 - DNA, 565 bp, Homo Sapiens
aggtgagtccagtacacagccaaggttgaagatcactgacctagactaaaatgagaggattcagaagtctgaccttagaacatgagagagtggaaaacctcaggatgtttcagccaaacaagaagagaagaaaatattgttgaaattaacaatgatcagggaaaatatcatctattaagaacagggaaccacattttagctgtagattaggaatggtaatttttatctggtgttttagttttcaaaacatttacatattgatctactcctcgccctagaccaaacctaattccattcttactgatatgcacaatcactctctgtcctcattgtcacctctagcccctaaattcctccctttctcagtctacctactctttgtgactccctcatatcttttccccctggcatggatgtcctgctcagacactccacttagaagacagtttccctttttcactgtcctcccaccattcattactcctcctccagataccaactgctgatgttgctctagaaaaaccaccaaacatgactgttctttccgtgtaagctatcccacctc

SEQ ID NO: 61317 - DNA, 4410 bp, Homo Sapiens
gaggaggagctggagggggcgcggcttcctctcggtcgctccctggcgccgggcctctttctctgcctggcccagggctggcggccggcgggggtcgcggcggcggcagtgggggcgctggcgggccgcgggtggcgggggccgggccgcggctccgggtgttaggagacaagatggcggcggctctcagaaggccggtctcctcctctccgccgtcctccgccccgccgctcgccgcctcctcctctcgggtctcctcctcctcgtttgctgcctcctcctcctcctgcagcagcaccagcgaccgccgaagcgccggctcgctcacccggagctccggaggtggatagacggggcagctgcaggctccggcgaccgaggccgagctggggccggggcggggacggcggcggcggcggcggcgacggcggcggcgccgggtggggatggggtcgcagacgctgcagatcctccgacagggggtgtgggccgcgctcagcgggggctggtactacgacccgcaccaggccaccttcgtgaacgcgctgcacctctacctgtggctcttctgctgggcctacccttcaccctctacatggcccttccttctaccatgattatagtagcagtttattgtcctgtgatagctgctgttttcattgttctgaagatggtcaactatcgactacacagagcacttgatgctggagaagttgtagataggactgcaaatgagttcacggatcagcgaaccaaagctgaacaaggcaactgttcaaccaggagaaaagacagcaatggaccgagtgatcctggtggagggattgaaatgtctgagttcatccgagaggccacacccccagttggttgcagttccagaaattcttatgccggtctagatccaagcaaccagattggatctggttcctcgcgtcttggaacagcagcaactattaaaggagatacagacactgctaagacttctgatgatatcagtttaagtctgggccaaagttctagtctttgtaaggaaggaagtgaagaacaagatttggcagctgatcggaagctctttcgtcttgtctccaatgactccttcatctctattcagccttccttatcctcttgtggacaggacttgccaagggacttcagtgacaaagtgaacctgccaagtcataaccaccaccaccatgttgatcagtctctgtccagcgcctgtgacacagaagtagcttctcttgtacctttacactcacactcttatagaaaagaccaccggccgcgaggtgtaccacggacttctagctctgctgtggcttttccagacacttcactgaatgattttcccctttatcagcaaagacgtggattagatccagttagtgagttagaatcttccaagcctctttctggatccaaagaatccttggtggaaaattctggtttatctggggaatttcagcttgctggtgacttgaaaatcaatacttctcagccacccacaaaaagtgggaagagcaaacctttgaaagcagagaaaagcatggacagcttgaggagcctgagcacacggagtagtgggtcaacagaaagctactgcagtggaacggaccgggacactaacagtactgtcagcagctataaaagtgagcagaccagctcaactcacatagagagcatcctgtcagagcatgaggagtctcctaaagcaggaacaaaaagtgggaggaagaaagagtgctgtgcaggcccagaggagaagaatagctgtgccagtgacaaaaggactagcagtgaaaagattgctatggaagcgagtaccaacagtggggttcacgaggccaaggaccccaccccctctgatgagatgcacaaccagagaggtctcagcacctctgcatctgaagaagccaataaaaatccccatgcaaatgaatttacttcccaaggggacagaccacctgggaacactgcagaaaacaaagaagagaagagtgataagtcagctgtttctgtggattccaaagtgcgtaaagatgttggtggaaagcaaaaggaaggggatgttcgacctaaatcttctagcgtaatccatcggacagcttctgcccacaagtcaggcaggagacgcacaggaaaaaaacgggctagcagttttgattcaagccggcatagggactatgtttgctttcgaggtgtttctggtaccaagccacacagtgctatattttgtcatgacgaagactctagtgatcagagtgacttgagtagagcatcaagtgttcagtctgctcaccagttcagcagtgatagctcttctagcaccacttctcattcctgtcagtctcctgagggcagatacagtgctctaaagaccaaacacactcataaagaaaggggcacagactctgaacacacacacaaagctcatttggttcctgaaggaaccagcaaaaagcgtgcaacacgacggacttctagcacaaatagtgccaagactcgtgcccgagtgttgagcctggacagtggcacagtagcatgtttgaatgactcaaacaggttaatggcacctgaaagtataaagcccttaaccacttcaaaatcagatcttgaggccaaagagggagaggtgctagatgagctatctttattaggacgggcttcccagttagagacagtcactcgatctaggaatagcttgccaaaccaggttgcatttcctgaaggggaagagcaagatgcagtcagtggagcagcacaagccagcgaggaggcagtgtcatttcgccgtgaacgcagcacatttaggcgccaggcagtacggcgccggcacaatgcagggagtaaccctacccctcctacattgctcatcggatcacccctaagccttcaagatggtcagcaaggccagcagtccacagcccaggtcaaagtccagtcccgccccccttcccaggctgcagtgctcagtgctagtgcctccttgctggtaagttctcttctacgctgtatgagactggtggctgtgatatgtcacttgtgaattttgaaccagcagcaagaagagcatccaatatctgtgacacagattctcatgtatccagttctacctcagttcgattttatccacatgatgtggtaggtttttctttatttttacaacatgataaattttcagattaaatctgaaatatgtatttacatagatagctataaaagccataaaaattgatgaagttacacaaaaattttttgaaaactatggcaaaatcactttgctgccctccagtggctctctttttctaagtcctttgataagaaacaaaagtacaaggttaagaaaccctggcatagagtattttaaaaagtgttttggaaagtatttgtcaatgcttagagatagaaatggctgtgttatatataggaagtaaattttctcaactatacccagatatgtgtttgaaaagtaaaaccctccctactttttggctatagtgtattcctggaaactgcataggaaagcaaacatgggaagatgattgttttattgttttctacttttaaatggtatgggaaccttgagatagcaaaatgctgcctagtactatgccaaatacagtcaacttttgatgctttctgaggaaaagaaaactggtaaactgatggatggatgagttgaagttaaatatagtatagtaatttgtatagcctcaggtgagcagcttgccaaaacaaacaaacaaacaaacaaacaggggtgagggatttggaaatatagtaacaacaatgataagagactgtgggaagaaatgagagttgctgccatcagatccaatgcagtggggctcagatttaacactgataatgaggttcaaagcttaaggagaaaagactataaatgtgagaagagaagccactaacgattcacagtaagtggttttagtagattcgctagctatacagttataaaatcttaaggttttttcttaagcattccctgagaaaaatcttaagattttagacacttttctagtcaattatttacaataggtttattgattaattaactttgttttagttcacttcctattgtcaccttctatagtttctggtaatcataacatattcataaagagtaggctgggcgcagtggctcctgcctgtaatcccagcactttgagaggccgaggcgggtggatcacgaggtcaagagttcaagaccagcctggccaagatggtaaaatcccgtctctacaaaaaatagaaaaagaattagccgggcatggtggcaggtgcctgtaatcccagctgcttgggaggctgaggcagagaattgcttgaaccggggaggcagaggttgcagtgagccgagattgcaccactgtacttcagacaagactctgtctc

SEQ ID NO: 61318 - DNA, 1862 bp, Homo Sapiens
cgacgcgtggcttttaaaaaattattatcttttatttaaaaaattttaacttacatttaaaaaaatggagatgggctctcactgtgttgtccaggttggtctcgagcttctggcctcaggtgatcctcccaccttggcctctcaatgtgccgggattataggcgtgagccaccactgcacctacacctggccatgctagggcttttacatggattatctcatttaattcttccctggtttccataaggtaggaacttatcctcattttgcagatggggagactgtgcagggattcaaacttgggtgctccagctcctgactctgtggccttggagacgccctgcactccaggacttgtgtttcctcacttggcggtgagtggttgggctggtccttgaggcctccaccctcaccagtggctgagcattcattcaatgggcagagagaacgttgggctgcagcagaatgggatctcccgtacagcagttggcaacccacagcggggttgccaggtcagcattgatgccttggctactgacttcacctttaaccccactggccatttttcaaatgaatgtggttggtcctaagggagagcaggtggaaagaccctggccccagcgtgaatccaggcactgctgtgcctgtctgagtagtgccctctggggaaccagctagccaggcaacctgccatcatgttgcctagtgagctcttgacatcagccatcttgaaaccattgggttcctttcgtccttcatctgtccacccatcagattcatagtcattcagcagtgactcctactaggaggaactgattctaggtataaggcactggctgggtgctaggaatatggagggaaaagaaacataggcccttgtttctgggagctgatggtctcccaccagataccgatgctggaaacccagggagaaggcaggggggagtctgagaaggcttcctggaggaggcagccttcgagattgtaaagtagagacatggtgtggcaagtccagggagcaggggtgggacctcgttcagttgcccagacgcaggcagagctttgttcaggggtgattcaggttggtgaaggccctgtgagtcacctggggctggtgaaacgtttcctctcctccttaggccacgacccagcctctgcataggccaagacggcccgtgaaggcttgtttccttgccccatttcccaggaaatgtgggagtgcaggattccactcccaggtcactcaccttgggggtggatgctgggaacgcggcctgcgccctctggttgtgtggccagcatgtttttctagccaaaggacttgggatgagatttttcatggaatattgagagagacgtaattgttattagaatcagttctgtttttatttattattattatttgaaacagagtctcactctgtcgcccaggctggagtgtactgtcacaatcttggctcactgcaacctccgcctcccaggttcaagcaatcctcctgcctcagcctcccgagtagccgggattacaggcgcgtgccgccatgcccggctaatttttgtatttttagtagagatggggttttgtcatgttggccaggctggtctcaaaaactcctgacctcaggtgatccgcccaccttggcctcccaaagtgctgggattacatgcttgagctaccatacctggctaatttttgtatttttagtagagatggggttttgccatgttggctgggctggtcttgaactcctgatttcaggtgatccacttgcctcgacctcccaaagtgctagaattacaggtgtgagccaccgcgcccagccagttcttctgtttttaaagtaaaaaaaaaaaaaaaaagg

SEQ ID NO: 61319 - DNA, 568 bp, Homo Sapiens
ttttttttttcagtctattccccctgtctggaaggcccttcatcctactctcttggcctcttctaatttttttcagtggagtccaaagtactcataaacacattcattaaaaatgtaagaagccaaagggcaaaaaaaaaattttttttaatcagggatgaggagggaagctaagaattttaaaatagtaaatgaaaaatttagaaatatgtattttgtagaaaatagtagacttagcactaagatgaaatgtttttggtaaagtttttaatttgggagttttgctgattccttcttacccttcaggacaattcacagatatcaatcctttctggagttacccctgactccctcaacaccccaaaactctaaatgccacggtcatctgtttctatatcaaccttttaacatatttatggccaggcgtggtggctcatgcctgtaatcctagcactttgggaggccaaggcaggagtcactgcgcctggccaattttcatatttttagtagagacggggttttaccatgttggccacgctggtctcgaactcttgatctcaagtgatct

SEQ ID NO: 61320 - DNA, 596 bp, Homo Sapiens
attttagtattagatgtggggtttaggggcgggcccttcctttgtgaaacaggaatgtaggggttcatttgtggttgtaagaattaaatgaattaatacaggtaaagcacagtgcctggcacatagtaagtgatctttcaagtgttaaccattaccagttttttttatgattagcctagagggaagaacttcttccccaacaattagattataaagcaacttaactgctcaggaattttttctgagctttttaaatttgaaagttgggattatgcaattaagattaataaaaggtacagaactattgaccttttttcccctaatgctctaagttttctatgaagaagtaataacttagtaggaaattagtttattcccctatatgagatggtaggggaagaacacctagcattctttgtaaaaaaaaaaaaaaaaaaaaaaattcccttgtcggccgcctcggcccagtcgactctagactcgagcaagcttatgcatgcggccgaatttcgagctcacttggccaattcgccctatagggagtcgtattacaattcactggccggggttttacaacgtcgggactggggcgaata

SEQ ID NO: 61321 - DNA, 484 bp, Homo Sapiens
tttttttttttttttttaaggtaactgtgcaactaccagcaggtacttttaaaatagtgcttactaatggctggagttgcttacttctttagacaaccttggaggggagtatcagtgccttgcaagtctaattacatttctaatgggcttataaaagcagtgatgacccaacatcttgtagcattgattttagtttgaggaatatagtttgttttctctggcatgaccttgcattcttcaaaacattatttgaacttctatctctgggtgctcatttcttacctagtaattcatcgtctctattacaaagaagctaagggttttggttggctttggaaaatgttgagaaatttgaggtgcatttgaacatctttcattggtgtaacgcttgacagttgaccaagcacttttgtgcatgttgtctccttccatcctgaggtactgcagagagctagtggtatttctcagctaaggaatattattt

SEQ ID NO: 61322 - DNA, 6045 bp, Homo Sapiens
cagtcagttactcaatatttatggaacacttcctgtgccaggccctggatttctcagctgtaacacagataaccaatatgtgccttatccctcaaatagctgacccaacggggcccaaaccccattttcatggtcctacctgtcctaccaacttttttttttttttttgccaatttctggtttttcttcctctagatcctgcctgcagacatttatatttgaacctgtgttcttggttccagacaatgtgggttcccaccaaaacccacttgcaccgaactctcatgggcttattagtaactctgtgaaagagttggctgcagtgggtggggtgaggggtttctggacccccttcacacaccacttagccctctctgactggcccttctgttaccactcctccgctttgctctgaacaagtgaccctttccctggcccagcaaaccaagagggcgtgaacaagccagtcccgctacctggcgcttctcccagggagcattctcctccccttctctggccccttctgtatttttatggtgttttccccaggctgctaattaattagccttctttacaaaggcggtgctctcacctcttcttcagggttggctgtgttcatttgtttagaacattgttccgtctcataaattggttggttattagactttttgttggtttatgactactgcatggaaatttcaggatagtcaagcacatttagagaaatttggtgactggttgaaataattgttagggaaggatgcagatgttctgtgttctaagcaggcttgttaaccagattggaaattactgtttatatctcatttttgctgcataggagctcattgagttagaatagtttccttttctacttctgctactgtcaaagcctcaagatgcaaaacacattcagtttagttgagcagctcctgcagtctgttcccagcaccagctatctgcaaagcgccatgttagaggtaagctgctaacttccatacagcctacaaaacccagatggccttccctatctcctggaagccttctctgactgctaccaccactttccccttccctagagttaatcttttcctttctgcaagtggcctgcgcatcctatttgggcatttgtttcatactgttcggtaattttttagcatcggcctctcttactagactgcgcactgaacctctgagtccagggactgtgtctccttcatgtttatatttccagcacccagtgggagactttaatagtcattagtaaagtactgaatgaatgaggaaaccttcaaagccagcttacatgagtgtttcatggggatttgttgaacagagatgccctgtctcagggtctcagtcccgtatctctctcctgtgctgttgcggcagcttcctgtctctctgctgctgctttgctcctgcagtctgttcccagcatgcagatcccgtcacccctcttcccggaaatctccagtgtcttccatcttacttcatggaaaagctagagcattcaattagaccccaaagatctgactcccagggccctcctgaaccccatcacttctgacccataatatacacactctaccaagctacccagaagcgcctgctccccctggaatgtactcccttgtcaaatcttctgatctagatgttcctctgcctagaatgttcttcccagatgcttgcatggctcacttctttacttcctcgtgtcttttcccagctgccaccatttcagtgatgccttatcaggacatcatctctgccaacagtctcacttcattcttttctagaatacttaccaccttttaatgtactatatatattgacttatccattgtttttttgtctccctcgctgaatgcaagccctatgaaggcagggatttgtggttcctctggttcatcatcctttccctcacactccagggactagattgcatgtcgtcatggtgacagccaacatgcagatggtgtttttgtgtcaggcgcttttctgagcatgttatacattatgattaataaacggaggaggtaagagtccaccaggcagtctgagctctgagcccttatgcttttctgcctagtagcaagtatttgttcaaagaatgaaggaatgagtacttatgataaggagataaagcaagttggcactgccttattagcctgtgttgcagttgaatgaaacagaggattcccagccttctccgagcacccaatgggactggcacttatgggagagaagaagctatgacaggggcttccatttcagttgtgccctaaaagcagctgggccaaaaggtggatcttgtggatgtaggtgaattatcatatgtaatcagccaactcaacttttacctccagactcttgcagcaaagaatggtcaaccttggaacattatctttaacatctcaaagttctttcttatcagtcacctcattttcttctcacaggaattagataaggagggaaggacagatggcatcatcctcattttatgtgtgagagcaggcagagctgaagagacatctatgaagtcccacagctgggagccagaatcctaacccagatccccagctttctcctgtcaccttcaggcctccctctggtcagtgtgatcatctttagactctccaggtggcagcaagctttgagaagttcctgctgctatttttactattcctgattctgttgacccccaaaacagactgctgagaggatgctagaccatgctcctggggagcaccagaaagggttcctggagctccagtgttcagctgcaggattgaactaagcacacctgttgagggggaccttgagaggggaggctgctgtagtttacaaagaaatgaacaaatagggcatatcagccctgcagtgcagctttaaggacatctcccatggtttgagccttgcggtgccatcctgccctgctggacttgaggtgcaaggtgtccattcatctagggctgccccagattctgcagatgtctccaatgcagtaccttggaagctctacggggcacaggcagctcttccaagaagggctaacaggtggaaaaggagcatttatggagcacctgccatttgccagcattctgctcagctccatgtcttactatctgttagcctcactctttgcagacaagcaggagatgagaccagactgggtaacacacccaaagcaccacagtggtggggcaaggctcccagtctgctccttctgacttgaagcacattccatcgccatatcactcatcacttcctccttgtcaaacaaagcaagactctgcactagcttcaggcttttgttttgttttttgacacagagtctcgctctgtcgcccaggctggagagcagtggcgccatctcggctcacggcaacctctgcctcccgggttcaagcaattctcctgtcttagcctcctgggtagctgggattacaggcgcgcgccactatgcctagcaatttttttgtatttttagtagagatgggattttaccacattggtcaggctggtctcaaactcctccactcaggtgatccaaccaccttggcctcccaaagtgctgggattacaggcatgagccaccctgcccggcctctagcttcagtgttaacctttgtgctgcttcctgtaccccatgaggctgaacatgaataagaagtcaagtttctaaagagtcttcaaactcagtaggtacagagatactgccctcagctgtttgtagatgtcatgtaagtagagatgttccacagttttcttgccagccatgaaagcctaaacaggagctttcagccttcgtgggtcttcattttcccagcctaatccaggactgggtcaagccaaatccaaggtgcagagagaaacattcccacttggcttcttctgatgtaaatgatgtgatctggtctagatttcccggttgacttatcttttctgttcagtcacatgatttggtgtatgtggatttttaaatctctttattataaaatttaaaggctgcagaagttatccagttgctcctaaagaattacaggttgagcgggctggcatggtggcttacgcctgtaatcccacactttgggaggctgaggcaagcgaatcccctgaggctaggagttcgaggtcagcctggcaaacatggcgaaaccccgtctttactaaaaatacaaaaattagctgcgtgtgatggcatgtacctgtaaccccaggtactcaggagactgaggcaggagaatcacatgaacctggcagagggaggttgcagtgaaccaagatcatgccactgcactcctgcctgggtgacacagcgagactccgtctcaaaaaaaaaaaaaaaaaaagatttacaggttgagtatccctaatctgaaaatccaaatgctccaaaatctgaaacttgctgagcaccaacatgacactaccatggaaaatttcacacataaaagtactttaactttgtgtaatgctcaaatgtatttaaaatatttttaaaaattacctttagcctccatgtttaagatatatatgaaacataaatgaattttatgttgagatttgggtctcatctcaaagatagcttattatatatgtaaatattccaaaatctgaaaaaatccaaacacttctcatcctaagcatttcagataggggatattcaacctatataaacaaagttgcttgcattagccaaccagaaaaacaaccaaaaaacactttaccttttccaatgcccatgcccccactcagctctgatcatcagtaactccattgatcactgtgtgctttcattcttcctgtctgatgacagctgtcccaatgggatgggcagagtgtcaaaggccagccagcaggtttcctgtcacctaagaaagcaacggccaccagtgatcactgtgcccccattcagggtctcacaggtctgtacagtcatgctgtctgccttagtagcagcattcagactcaagttacgttgcgacccatggcttaacaggtgcctggattgtgatgaaaatcaccatgaatataaggagtcatttgagggtcttctgtctagttgtctgtctctggtggtgcccagggctgtatgggtcctggggcactctgcttacccactcacccactgtgcatcattttcagaagagtaagctgcatcctaatatcccttaataatccaatatgtttcttttcatctctgaattattagacctccctggaattctatttgcagctgataggaatccaagttctaggtttcctgccaactcttcagtgaagcattttgctcattaaccaccaaaactcattcgggctggagtagtcaaatcccctcatcataggaacacatgagtggagggcaacagtgggtttgcctgccttgttggaatcaggatccttgatttaaggagactctaagagaagctagcaccaagtaacctagtagtaacctatagttgcctttctcagcaggcaatgcctttctcagcatttcctccttcaaggagatgggaagaagcaataaccctaagaaataatcagtatcatcatcttcctttttctgatgaggaaactaaggcttcagactgttaggtattttgcccaaaggctcacatagctggtaaaagcaagaggcaggatgtgctctcagggccagctgcccacagagccttcggtgggttttgctttgctccttcttactgtcttttggctcattaaaagtaacacaaggccgggcgcggtggctcacacctgtaatcccggcactttgggaggttgaggtgggcagatcacctgaggtcaggagttcaagaccagcctggccaacatggcaaaacctcgtctctactaaaaatacaaaaattagctgggtgtgggggtgcacacctgtagttccagctactgaggaagctgaggcaggagaattgcgtgaatccaggaggcggaggtatcagggaaccgagatcgcaccgctgtactccagcctgggcgacagaacaagacttcgtctcaaaaatatatctatacaagcacaaggtt

SEQ ID NO: 61323 - DNA, 650 bp, Homo Sapiens
tttttttttttttttttgaaatttcaaatttaattttttacagaagcacttttacataatagtataaatatcaagagatatcataattacaagttaaattatatgtgcaggatcagaaatccaatcaagaattctgtctctaccacttaacagctagtttgtactttagcttcctcactgcaacatggggatagaacccacctcagttgtatagtttaagtgacataagacatacagggattacaattatcacctgatacagaataagaacttggtaaatctgagttactgaaatgatgatgaaaatcatcgcagagataggtatacagatatatgatctaaacattggggaccacaatacaaactcagtctatactgagattcatcctttcaaatgtactaaataacatttggcacactaagagcaggcaaataacacagggagtagatgtgtaaattaaattttgaaccactcctggttctagttattatcacaaagtatatccacaatacaacttgtacatgcatattcatactaactttatttttaataggcaaaaactaaaagtaatctaaatgttcatcatcaatagatgaatatattaaacagaccatggtaaattcacagaatgaaatactactgagcaata

SEQ ID NO: 61324 - DNA, 573 bp, Homo Sapiens
  misc_feature (477)..(477): n is a, c, g, or t
  misc_feature (481)..(481): n is a, c, g, or t
  misc_feature (484)..(484): n is a, c, g, or t
  misc_feature (564)..(564): n is a, c, g, or t
acaacaattcgtttgttttttataaaaaaaaaaaagaaaggaaaaaaccaaagaggcgaaatgaggactcactgggagagcgcggccaggctgcgtcttccatgcgatccggatccacccagcatgtccgcagttgggaaggggcggcggggcagagagatacggagacctggccaggccgggcggtcagggcgtgggctgggcccgcggaggggccatgtgatctgtggctgaaatgcacggtgcaggatgctcccgtgttctccctttgtgttaacacgttggtctgtccctgtgacgaaagtctgggcttgtcctcagccaaatctactcctcccaacccgttccctcctcacaggatcatcagagagctgattgttattttttactgtaatctctctaatagaagcccatcatgtttagcgatcagagagcactgattgcttcgggagttccagaaatgttattgctgggtantcanggncaggatctcaataagttttcctgatgaagactttatatgcttaacttccaataatttttccaaggtaagtaacttggtcnaaggaaaaa

SEQ ID NO: 61325 - DNA, 454 bp, Homo Sapiens
gcgtcgactttttttttttttgagacagagcctcactctgttgctcaggctggagtgcagtggcacaaactcagctcatgacaacgtatgcctcctgggttcaagcgattctcacgcttcagccaactaagtagctgggatttcaggcatgcgccactcctggctgactttttctatttttagtagagacagagttttgccatggttggccaagctagtctcgaactcttggcctcaagcgatccgcccacctcagcctcccaaagtgctgggattacagacaggcgggagccacagtgcctggccttgcattaatttttaaaatgagaaataatacagtcttgctttcatttaaaactttttccaagaaaccatgagcaaacctgtgtttaccatatatactgtactgaatatttggacatcaccatttcaatgtaaagtcagatgctaataa

SEQ ID NO: 61326 - DNA, 551 bp, Homo Sapiens
ttttttccaacaagcagtgtttctatggaaggatttagaataaaaatatgatgttaacgataactgatagttacaaaaaactctaagaggatgtctgttctacactctaagtaaataactgaggaaggagaaaagagaattttgcgacttaaattttggattttaattttgcaggatgagctgtcaggagtcttaaaatgcggccccacaaggagtatacaggtccctattatgttctcaaaaaccaaaatgtaaaatggctgcttaagtaactgacaatgcaaaacagtttcaaaatagaaaacattctatttttcaatatggatgattttcataacttaaaaaagtttacataagacatatcttgaaatacacatatttttacccttaaaacatttatctaaaggtaaactggaccaagagaagttgcctttttttcacagtaatttactgggtactggtgtccacatcaacttttgctttatctggaagttatttttcccatcacagatcggcactcagattttgcaagagaagcctttacttcactg

SEQ ID NO: 61327 - DNA, 511 bp, Homo Sapiens
ttttcggtgtttgtgtctttatttggagaccaggagacagattacagcttaatgagaggaacaacgactcaagtgatctgatgggaagggtgagtttcctggcccttaggaagcaacagatgtgatttctaatcaacaaaaactagtaagtctggaacttttcagacaggaagctgagaggctaccaaaactaaaagtgaaagtgtctgccatcaatgtgtaagtctaaattacaaataaatacattaataaagcccctaacaggggttacaaaatttgtatgactgtaataaagcacagaatataaaatctgaaaagcttaactacgctgggctttttgcaccccattctctgagacaggaaccacacatgaaaggtcactggaacccccacatgcacctctgggaactgtgacttaagagaaaatggagacttcttgaaagataaagcagaaaccacaatttggcaaggacagcattttatctcaattcctttacttttcactcccttg

SEQ ID NO: 61328 - DNA, 534 bp, Homo Sapiens
  misc_feature (460)..(460): n is a, c, g, or t
  misc_feature (488)..(488): n is a, c, g, or t
  misc_feature (507)..(507): n is a, c, g, or t
  misc_feature (534)..(534): n is a, c, g, or t
cattgaaactccactgaaaatgccatgggtggtttatggcaacttttacatgagtctagcaaaaggaaagaatgtgtcacctcttttctatcacaattgggggcttaagaatgcaggggtggatgtatcaacccccagaaagttacaagtttaagccaggaattctggccaggcaatcatttttagtaatacccttgagcttatgggagtggaagtttgtatttttttttttccaaagtacattactactaatgataatagttttcattagttctagtcactgggcttagcgttttccatattttaccctcatagcaacctatgaaacctgtgtaggaattgacatttgatgacaaggtctgttcaaatccagcacccatgtgttacttaccactctttataattttttaaaagagatttctccttctgaatccctatttttttttgaatggccgaatangaaaaattaaaatctgaaaagctcttanaaaatctggttcaatattngaacctagaaatggctggttcaaggan

SEQ ID NO: 61329 - DNA, 2740 bp, Homo Sapiens
agactaccggcggcgacgaccacgggagcatggcggacaccgacctgttcatggaatgtgaggaggaggagttggagccatggcagaaaatcagtgatgtcattgaggactctgtagttgaagattataattcagtggataaaactaccacagtttctgtgagccagcagccagtctcggctccagtgcccatcgctgcccatgcttctgttgctgggcacctctctacatccaccaccgttagtagcagcggggcacagaacagcgacagtacaaagaagactcttgtcacactaattgccaacaacaatgctggcaatcctttggtccagcaaggtggacagccactcatcctgacccagaatccagccccaggtctgggcacaatggttactcaaccagtattgaggcctgttcaggtcatgcagaatgccaatcatgtgactagttccccggtggcctcacaaccaatatttatcactacgcagggatttcctgtaaggaatgtccggcctgtacaaaatgcaatgaatcaggttgggattgtgctgaacgtacagcaaggccaaacggttagaccaattacactagttccagccccaggtacccagtttgttaagccgacagttggagttccacaagtgttctcccagatgacccctgtgaggccaggctccacaatgcctgtgaggcccaccaccaacaccttcaccaccgtcatcccggccactcttaccattcggagcaccgtcccacagtcccagtcccagcagaccaagtccactcccagcacttctaccactcccactgccacacagccaacctcactggggcaactagctgttcagtctccaggccagtcaaaccagaccacgaatcccaagctagctccctccttcccctctccacctgcagtgagcattgccagctttgtcactgtgaagcgacctggtgttacaggcgaaaatagcaatgaagtggccaaattggtgaatacccttaacaccatcccttccctgggccagagtcctgggccagtggtggtgtccaacaacagctctgctcatggctctcaaagaaccagcggacctgagtcttcaatgaaaggtacaacaacctgaaagactctgagcagccagtcattcaaaaacattaataaagtgtttgttgtatcagagctttatactcagaaatagaaaaataaaataaaatacagctgctgtagtttgttcttacagaaactttagtaaggagaaagccacttacaaaaagtgtaactgaatcagctccaagaaattatgtgtgtaattgtgctttggagattagtgaaattgattgattaaagatgggtgagataatgaaagataacttcatggaagagatggatttctgagcaaggttttaaagttaggatttggtagagagatcttcaggttgagaatgatgagcatgagggttttcagtggtctagagcaggggtcggcaaatgttttctgtaaagggcctagtagtaaagttgtaggctttgtgcacaatatatagcctctgttgcagctattaactgtgctgttgtggtggggaagcagccacagatacataaacgaatgagcatggctgtgctccactaaaaactatttatggactctgaaatttaagtttcataaaattttcatgtgtcgaaaagttttattcttttatttcaaccatttaaaaataaaaaccgcaaggtatagtggctcacacctcatcccagcattatgggaggccaagacgggaggatcacttgagcctaggagtttgagaccagcctgggcaacatggtgagatcccatctctacaaaaaaaaaaaaaaaaagattagccaggcgtggtggtgtatgtctgcagtcctcgctactcagaagtctgaggtgagaggatggcttgggcttgaacccagaaggttgagcctgcagtgagccatgagcatgccactgcaacagaacgacaccctgtctcaaaaaaagtaaaaacctttaaaacatggtgttgggaaaactagatatccatgtccaaaagaagttggatcttaccttacaataaatacaaaaattaactcaaaatggatcaaagacctaaatgaactaaaactataagactcttagaaaaattataggacaaaaagcttcatgatactggatttgacagtgattactatttcttggatatgacaccaaaagcatacgcaagaaaagaaaaaatgagtaaattaaattatatcaaaatttaaaacttttgtgcaggacgttgtcaacacagtgaaaagggaagccacagaatgggagaaaatatttgcaaattatgtatctaataaggggttaatatccagaatatataaagaatttgtgcagttcaacaacaaaaaaactcccaaacaacctttttaaaaaatagacaaaggactcgctgggcgtggtggttcatgcctgtaatcccagcactttgagaggccaaggcaggtggatcacgaggtcaggagtccaagaccagcctgaccaataatggtgaaaccccgtctatactaaaaatacaaaaattagccaggcgtggtggtgtgtgcctgtattcccagctgctcgggaggctgagacacaagaattgcttgaacctggaaggcagaggttgtggtgagtcgagatcgtgccactgcactccagtctgggcaacagagaaagaccccatctcaaaaaaaaaaaaaaaa

SEQ ID NO: 61330 - DNA, 563 bp, Homo Sapiens
ccccttcatgaggaaaggtgggtgctggccagcacgggggtttggggcgggtgggagcagcagctgcagcctccccataggcacttggggcctcccctgggatgagactccagctttgctccctgccttcctcccccaggcatggctggggactggaagaccaccttcaccgtggcgcagaatgagcgcttcgatgcggactatgcggagaagatggcaggctgcagcctcagcttccgctctgagctgtgagaggggctcctggagtcactgcagagggagtgtgcgaatcaaacctgaccaagcggctcaagaataaaatatgaattgagggcccgggacggtaggtcatgtctgtaatcccagcaatttggaggctgaggtgggaggatcatttgagcccaggagttcgagaccaacctgggcaacatagtgagattctgttaaaaaaataaaataaaataaaaccaatttttaaaaagagaataaaatatgattgtgggccaggcagagtggctcatgcctgtaatcccagcaatttgagaagttgaggctagaggatc

SEQ ID NO: 61331 - DNA, 1213 bp, Homo Sapiens
tgacaaacttgacttttggagatgtagccaacaaggctacgctatgctctatgaaaggctgcatgagagcacttgtggcccaactaaaatctgaaagtgaagacttacagcaggttattgcaagtgttttgaggaatttgtcttggcgagcagatgtaaatagtaaaaagacgttgcgagaagttggaagtgtgaaagcattgatggaatgtgctttagaagttaaaaaggtacctttgaaaacatttagtactataatatgaatttcatgtttggcttttttttgctgccttcttttagccatgagatttcctaatttcttacctgtgtattattcagtactataatatgaatttcatgtttagctttttttgctgccttcttttagccatgagattccctaatttcttttttgagatgggatctctttctctcgcccaggctggagtgcagtggtctgatcttggctcactgcaacctccgtctcccatgttcaagtgattctcctgcctcagcctcctgagtagctgggattacagtgcacgccaccactcccggctatttgtatttttagtagagatggggtttcaccatgttggtaaggctggtctcgaactactcctgactttgtgatctgcccaactcggcctcccaaagtgctgggattataggcgcaagccatcacgcccagcctagattccctaatttcttacctgtttatctcaccagtccatagttttagagtaccgcaaactcctaaagtactaaggtagaaaagattatataaggggatttaatgtatatcagggtttctctgcctcagcactatagacatttttgaccagataattcttcgttttgctggggctgacctgtgcactgtagattgtttagcagcatccctggcctttgccaactggctgccagtataccctccccctagttatgccgatcaaaattgtctccagatactgtcagatgtctgtgggagggaggaaggacaacgtcaccaccaattaagaatcactggtataagtgtacctttgtgctctccaaacctcaatcccctcaaattttgatggtcaacttatcaagaggtgatcagagccaaaggtgaggaatcatcaaataataatttgtttacagaaggaaatatctccaggcagtccatctgcttcagaaactaggctaaatttaaaaaaaaaaaaaaaaa

SEQ ID NO: 61332 - DNA, 3515 bp, Homo Sapiens
tgcacacctgtaatcccagctattcggctgaggcacgagaatcatttgaacccaggacacggagattgcagtgagccaagatcacaccactgcactccagcctgggcaacagaacgagattctgtcttaaatgaatgagtgaatgaatgaagtgaattacaaaaaattttaaaatacaaaccaaatgttttgttaaattcaacagacataattatgtgtcagctgcatgcagtggctcatgcctgtaatcccaacactttgggaggaattacagggaccaggagtttgagactagcttggccaacatagtgaaaccccatctctaccaaaaaatataaaaattagccaagtatggtggcatatgcctatattctagctactcaggaggctgagatgggagagtcgcttaaacccaggaggtggaggttgaaatgagctgagatcatgccactgcactccagcccaggtgacagagggagactctctcaaagaaaaaggaaaaaaaattactgtgtctaatttctataaaatttttttttttacttattctcaatttctgtacttgtggatcagtagcaaacttcatggactggcatcagtatgaatgacatttgagtagcactgtttggtgtgcagcatactagagtagtgagagaaggaaacatctgtggacattgtatcaactgggaggccaccgaacattttgtcatgtttgttgaataacttatgcagcctaaggcagcctgtcagggcagtggtgtggcaaagccataatatttgtatggggctcattctactgagaggcatatctgctgttctgatagtgtagtctcctccatttttcctccagcactctgctctttgggaggcactgcagggtggctgtgactttggtcaggtgtagcttatgtttggccatctcttggttgatccagtttatttgtcttagtttcagtgatggccagagggttacaaaggatttggaatggagcatgtctcagggtgatgtgaactctgttgttgcctggatttccagatcatgtgacagagaatcagctggatcatttcagctgtccaggttatcagttagaataaagtttttaaaaactaaaatcttgggagcaaggaggcctctctgatgtaaagaaagatgagtagactggtttatcccttctatgcagttagtacatgagagtaccctggtcctttaagagccagagttctttggggtttttgtttgttttcccccattaaaaagcactagcatttattaggggaaaatgaggttctcctcaactcatgttttccctctctgtattgtggaaaatctgaacctcactctgaaagtgaatacatccatttgaaagggatggcaggttaccaagagtgtcatttaatgaaacccctctttttcttgaccaaaagagaccttgttttctttgagaagcaggagttcactttaatttttatgaacatctcacaccacttccacctaaccctacctactgtaatatgggctggcctgtcaagtcttgggcaagaatagtgataagatgctatcaggtcagaacccatattgttagagtagctgaaagattcaggagttcttattttgaactcttgcatgtagaatcattacaagatgtctcttaaatgcagttagagtgagaggaaagctggagctgtgggtggggaacatgtcagaggtggggctcagcaggaagtgggaccagtgcctgctggatgtggtagataagtaccggttttggattagggattgttttctcacttaccttctttaaaaaaagaatgtggccattagcctttggttctggcatggcattaggaatggcttattccagcagtcagcatgatttccaggttccatgtcttctacatggaaaacatgtcaaaggacaggagcagtgaccacctgacaacatcgcagtgggaggaaaagagaaatcatgtttattcctcaggaatgctgaagtaccctggagtaagctgtcattcttattataacaatgttattagtaatgctttaaactccagcacacttgttatgtatttgaaaccaagtctgtttcttgttttgtattttctctctggaaattgtaaggcggtggtcttaaatacattaaacaaaaataggaaaaaaagcagttaaaatttgatggcatatcagccagctgacccaattcttggcacagtcaacaagtatctttgatttgttttcagcagggctaagtcatcagatatgtcagaaggggtaaaaaaaaaaaacacctgtcttttagtcatttctttgctgtcccaaaaatctaagtattatagtgagtaacattagcttgcagtttttaatagttcatcaataagtctgaatccttgtcagttgccacactggctacccagaaaatttcaggcagttatatgcctcaggcagttatatgaaggtttatttccttcttatacattaaaaatagtgtgaaacatgattgaaaatacactgttttagtctcttgattttgtatccactttcaacattttaatatgaaaccttgacagagactttgctgtaattttggtcttgaggggcggggggactcatccaactcacagtacccagcagtctgagttcttcagataggcataaagaaacgagaagttacataatttttgttgaatgggtatggtgatgttggcaaatgattaagcctaagaaaaactgtttgtgtaccaggcacctgtaatcccagctactcgggagggtgaggcaggagaatcacttcaacccaggaggcagaggctacagtgagctgagatcgtaccacagcactgcatcctgggcgacagagtgagtgagactctgtctcaaaaaaaaaaaaaaaaaaaaacagaaaagctacaaaacattcacacattttgttgttttctatgtctctgtataaatgatgagctttaaagttaatcctcaattttaaatatacaaaatttttaatttgtacttttgataccatgcacttttggaaattttttattttttgagagcatgatacttatttcttacgctcatgtttgaaaaggtttagaaatgtggttgctaaattagttttaaaacaacaactgtgactgttttacctgtgtccaacatgttgagaactcaaaaagtagtaaatcgggctgtcttaatagtgcgcctgttactaatggaatttacttaaaaagtaagtttgccatatgaaagggtattaatatccttttcaagcataacatacaaatgaattttcatcttaaatatattaacttctgataagaaaacagatgctaggcctaaagatatttgctacataggaaaaatgatttttaaaaaatttgtctggggtgcctgtagtcccagctactcgggaggctgaggcaggggaatggcgtgaatccgggaggcgggtcttgcagtgagcagagatcgcgccaccgcactccagcctcgccgacaaagcgagactctgtgtcaa

SEQ ID NO: 61333 - DNA, 5683 bp, Homo Sapiens
ctcgatttgtgccgtcagtctaacaacctgtgcttgcaaagggaagaggatcttcagagaacaagagattaccatgactgtatgaatgttgttgaagtgttcctagaaaaatttactacagaatgggataacttggccagatctgatgcagagagtacagctgtccacctggaagctttgaaaaagttagcattggcattgcaggagagaaagtatgctattgaagatctgaaagatcaaaagcagaaaatgatagagcatctgaatttagatgacaaggagttagtcaaagaacagacgagtcatttagagcaacgttggtttcagcttgaggacctcattaaaaggaaaatccaagtgtcagtcaccaacttggaggagttaaatgtggtgcagtccagatttcaggagctaatggagtgggcagaagagcaacaacccaacatcgccgaggcccttaagcagagccctcctccagatatggctcagaaccttctcatggatcacctggccatctgcagtgaactggaggccaagcagatgctcctgaaatcgcttataaaggacgcagacagggtcatggcagatcttggtctcaatgagcgacaggtcatccagaaggctctctctgatgcacaaagccacgtgaattgtctcagtgacttagtgggccagcgaagaaagtacttaaacaaagccttgtccgagaaaacccagtttctcatggcagtgttccaggccaccagccaaattcagcaacatgagcgaaagataatgttccgtgaacacatctgtctgttaccagatgatgtgagcaaacaagtcaaaacatgtaagagtgcacaagccagcctcaagacttaccaaaatgaagtcactggactttgggcccagggtcgcgaactaatgaaggaagtcacagagcaggaaaagagtgaagtgctggggaagcttcaggaattgcagagtgtctatgacagtgttttacaaaagtgcagtcaccggttacaagaactagagaagaatttggtttctaggaagcattttaaggaagattttgataaagcttgccactggctaaaacaagcagatattgttacatttcctgaaatcaacctaatgaatgagagtactgagcttcatacacaactggctaaataccaaaacattcttgaacaatctccagaatatgaaaatcttctacttacgctgcagagaactgggcagaccatattaccatcgctgaatgaagtcgatcattcctacctcagtgaaaagctaaatgctttgcctcgacaatttaatgtaattgttgccttggctaaagacaagttctataaagtccaggaagcaattcttgctcggaaggaatatgcttccttgattgagttgacaacccagtctctcagtgaacttgaagcccaattcttgaggatgagcaaagttcccaccgacctggccgttgaggaggctctttctctgcaagatggttgcagagccattctggacgaggtggcgggccttggggaggcggtggatgaactgaaccagaaaaaagaaggttttcgcagcacaggtcagccttggcagccagacaagatgctgcaccttgtcaccttatatcacaggctgaagcgacaaacagaacagagggttagcttattagaagacaccaccagtgcttaccaagaacacgagaagatgtgccaacagctggagagacaactgaagtctgtaaaagaggagcagtccaaagtgaatgaggaaacgctgcctgcagaggagaagctcaaaatgtatcactccctggcaggaagtctccaggactcagggattgtactgaaacgagtaaccatacatcttgaagatcttgccccacaccttgaccccttggcttatgagaaagccaggcatcagatccagtcctggcaaggggagttaaaactgttgacttctgccattggtgagacggtgacagaatgtgagagccgaatggtgcagagtatagacttccagactgagatgagtcgctccctggactggctgaggagagtgaaggcagagctcagtgggccggtgtacctagacctcaacctgcaggacatccaagaggaaatcagaaaaatccaaattcatcaggaagaggtccagtccagcttgagaatcatgaatgcgctgagtcacaaggaaaaggagaagttcacaaaggccaaggagctgatttctgcggatttagaacacagcctcgctgagctctcagagctggatggagacatccaggaagccttacgcaccagacaggctaccttgactgaaatatatagccagtgtcaaaggtattatcaggtatttcaagcagccaatgactggcttgaggatgcccaagaaatgttacagctggcaggcaatggcctagacgtggagagcgcagaggaaaatctcaaaagccacatggaatttttcagtacagaggatcagttccatagtaacctggaggagctccacagcctggtagccaccctggacccactcatcaagccaaccggcaaagaagacctagaacagaaagtggcttctctggaactcaggagccagaggatgagccgggactctggtgcccaagtggatctcttgcagagatgcacagctcaatggcacgattaccagaaagcaagggaagaggttattgaattgatgaatgatacagaaaagaaattgtctgagttttctttgttgaagacttcgtctagtcatgaagcggaagaaaaattgtcagaacacaaggctttagtgtcagtggttaactctttccatgagaaaattgtggcccttgaggaaaaagcttcacaactggagaaaaccggaaatgatgccagcaaagccaccctgagcaggtcaatgaccaccgtctggcagcgctggacacgccttcgagctgtggcccaggaccaggagaagatcctggaagatgcagtggatgagtggacgggctttaacaacaaggttaaaaaggccactgaaatgattgatcagctgcaagataagttacctggaagttcagcagagaaagcatcgaaagcagagctcttaactcttcttgaataccacgacacgttcgttctggagctggagcagcagcagtcggccttgggcatgctgcggcagcaaaccctgagcatgctccaggatggagccgccccaacccctggggaagagcctccgctcatgcaggaaatcaccgccatgcaagatcggtgcctgaacatgcaggagaaagtgaagactaatggaaagttggtgaagcaagagctgaaggaccgagaaatggtggagactcagatcaattctgtgaaatgttgggttcaggaaacgaaagaatatttagggaatccaacaatagaaatagatgctcaacttgaagaacttcagattctcctaacagaagccacaaatcaccgacagaacattgaaaaaatggcagaagaacagaaggagaagtacttaggtctttataccatattaccttctgaactctcccttcagttggctgaagtggcgttagatctaaagatccgagatcagatccaagacaaaataaaagaagttgagcagagcaaggccacgagccaggaactcagccggcaaattcagaagttagctaaagacctcacaactattctaactaagctgaaagcgaagacagataatgtagttcaagctaaaactgaccaaaaggtgctgggagaggaattagatggctgtaattcaaagttaatggaattagatgcagcagtacagaaattcttggaacagaatggccaactgggtaagccactggccaagaagataggaaaactgactgaacttcaccagcagaccattagacaagctgagaatcggctctccaagctcaatcaggcagcatcacatttagaagaatacaatgaaatgcttgaattaattttgaagtggattgaaaaagctaaagtcttggctcatggaactattgcatggaattctgcaagccagcttcgggaacaatatattttgcatcaggtaaccttaggaaaaataatctttaaaaagtaaccaagggcaatttgatttaactgggtagactgacacaacacttagagggctgtgatgtaaaatttttggagctaccagataaaaagaatgctaaggtacccctaagttgttcagtagttggacagaaaggagcttctcatgaaatttcatgaaattgaataaataaatatccttgatcttccctaaacctaccttacaccaagacccaaaccaatcagccttgtagaactcattttctgtagcttctttgaaataattatctgcagggatctggtgggaaattctttcctgtgaagagatgcaatgaagtgtggaaagattctagactccacactcagactggtgggaaaaccaacctccgccatgcagggctgtgtgatttggagcagaatgctttgcctctctgaattctgtcttctcatcatttgtatgaagacgtaaataatattcgtatttcagacttatgagatcaagtggtttaaggtacacacgtgcaaacgtctgcctggcacatgcaggtgctcagtgggagatctcccgcctcctccctcagccctcacccaggcctgtcatctggccttccacaggaggtcgggcagcccagagcaagccatgagtccacatcacatgctggctatgttagttcatttcctctgaagttacatgagaaaaatgttccttttctgtcagtcacgtcatccaggaaattatttcatccttttgtaacttaagcttaaattagacacagatagttaataggctagttatcatataataaaatatagggtgacttttataggagttacatgggtatcgagtattctagatttttgtctcttatattatttatgtatccttgtggcctttaaatgaatccctgtttccattcttgtttacagggttctagatcaaagcctcatttttccatttttggaatgctttaacagcttctaatttttccctatattcacagtctttcttctctgatcaatcttgcgtattcttcccacaatgtctttcttaagcaactccaatcttttgctttaagatatgcttagatatgaacagacaggacttaagttaccactgatttgaaaacaatgaaaaaaagccaacatccttagaagtctagaaatgcaaatttcagcaaaaaaagagaggaagaaagacaaacttaactgtcacattcatactgtttctttcaagttcatatttaaggaagtgagagctctcaaacattgctggtatcctggtaaaatctctttgaaaaataattggcaaaatgtatggtgattgtcaaaaatgttgctactctgggccacgtgcggtggctcacacctgtagtcccagcactttgggaggccgaggtgggtggatcacagggtcaggagttcgggaccggcttggccggtatggtgaagccccatctctactaggagtgcaaaagtcagctgggcgtggtggtgggcgcctgtagtcccagctactcgggaatctgaggcgggagaatcgcttgaactcgggaggtggaggttgcagtgagccaagatcatgccactgcactccagcctgggtgacagtgagactccatctc

SEQ ID NO: 61334 - DNA, 553 bp, Homo Sapiens
  misc_feature (450)..(450): n is a, c, g, or t
  misc_feature (517)..(517): n is a, c, g, or t
  misc_feature (519)..(519): n is a, c, g, or t
  misc_feature (528)..(528): n is a, c, g, or t
  misc_feature (544)..(544): n is a, c, g, or t
  misc_feature (547)..(547): n is a, c, g, or t
  misc_feature (553)..(553): n is a, c, g, or t
gcagggggagggggatggtgaggtaggggaggtgatgaatttaactgtactgaaaatggtacaaggaaatcaaactgcagaaaaaaacagttccacatttagttacattttagttttgggttttccccagacattgcaggccaaattagagttaagatgaggaaatcctttcagtcctcacagaccagacttggctttataaaacataatcaagtcccactatacaacctaggtgttaggaagcaactagagttttcaaggtagatctgggcaacacgcagacacctccatttctgaggctgaaggaaacatgcaccagtgctaactgccacgcatatgaaaaatgtgaactcctagcacggtgacagtagctgtatgctgaataccatttaatttaataagcatttgtttgttgaataccttatgcattcaaataacagagcacttctnatcaacaatgcttcagcctaccaggattctgaaaaggagtcccaaatagctcaattttacctttggnantttctgctnaaaaataaaagtgaanccncccctn

SEQ ID NO: 61335 - DNA, 525 bp, Homo Sapiens
  misc_feature (315)..(315): n is a, c, g, or t
  misc_feature (434)..(434): n is a, c, g, or t
  misc_feature (437)..(437): n is a, c, g, or t
  misc_feature (446)..(446): n is a, c, g, or t
  misc_feature (450)..(450): n is a, c, g, or t
  misc_feature (484)..(484): n is a, c, g, or t
  misc_feature (500)..(500): n is a, c, g, or t
  misc_feature (514)..(514): n is a, c, g, or t
atgtagacacagtgatatgacaggctggagcaaggtggtgggattggtgaagatgtatatatgctggaaatcttgaattcatcaggctgtcctgtttggcttcctcaaaatcaatactgcctccactgtcccttcccctcaccaaaaattaagtatagaccacctgactgcatccatttatcaatattaactcagctctggcttcatcagatttctccttaggtctgatttcttcactcatttaaaaaaagattgcttctcaaactatttattttctgagatagggttttgctctgctgcctaggctggaatgcnagtggtggaatctcagctcaatgcaaactctgccttctgggttcaaggcccatcctccaccttaagcctcctgagtaactgggaccccaggtggccaccaccacaccgggctaattttnggntttttattnaagncaaggtttaccatggttgcccaggctggtcttcnaattcctggctcaagnaacctattggcctngggcttccaaa

SEQ ID NO: 61336 - DNA, 1830 bp, Homo Sapiens
ctagagagaggacatttcctgagtaaaatgaaaatcaaagctaggagctaatcatatttttaaagtcagatatgttgggggtataactggaagctaatttttaaaagaatcctgccatatctttgataaggaagttctatggcttaaagagtgtaaccactagttttagcagagatgtttcctttagttttgaaacattcttcaacatttcaggttcatgatgaaaaatggctgactggatttaagtcctttattttctatactcctgagcaaaattctgaaaaactggctggtctagtttagagaagaacgctgatgtgggagtattttcaccatgcattcctgctctaaatcctttgcttctactgatagactattctactttcgaaataagttcacattgctctaacacttcataagttcaatctttttctcattctgtttaaaataaccaccatgaccaccaaacgcctgaaattcactgtagttaaaattatgactgaaatagacagggaaaacctgagagtgaacgttacccagcaaatctgggttaaacaggttcgagtttttccagagcacactgtttaggatttcagcttcctgttcaaccatctcggaaacagggtgtttctctgctcctttgtgaggactaaccatgtgtccccgccactttgcaccaaagctgaatatcatcccaaactctggatccttctgacgggcatttgtgtggtacacaggaaggggtgcattatgaatatgcaattactggcatgtaatgttgtcttctgctaaaaatacaaaaagggtactctgatctcagagttgggagctgatttctgatttcagcctagacaggtctgcttaaaactataatcaagctgattgtattgccctggaattctaatttccaatttagggttttgctatataatctctagtagagtgtgtctaatctttatgaaacccagagtctttgtataaactctatggattttcttccatgcgtctaggctgagctgagctgtgtctttaggctgagctgtagagacattaaattactgagtaaatgaaggtaacgttgttatgtcactctgtttctgaaagaccaactcaaattctgtctgctgtagctttgatccttttcatttaattctaagtacacttgttattatagtaactgttgtttgtatgttattttagctttttacttaagtagctatttagcaatttaaatgaaaatgtaattaggttacatctgttttacatgcatgtaataccacgcagatgtaaacttctattaaagccatattttctttttggcaagaaaaggcagaaacaaaatcgtgccagtcgctggaatacgtcttgctctaaaaaaattaaaaaaaaggatatacagagcactgtgccattatttatatggtggttagagtacatcacttctattttttgaaaattaaaaaaaatattaacaagtgaaaaacaagcattctattccatgttccctcttacagtttatctggatacggtgtttaaaatgacaatacagccaggcgcggtggctcacgcctgtaatcccagcactttgggaggccgagacaggtggatcacctgaggtcagaagttcaagatcagcctagccaatgtggaaaaaccccatctctactaaaactacaaaaaattagctgggcatggtggcatgcgcctgtaatcccagctactcgggaggctgaggcaggaaaattgcttgaacccaggaggcggatgttacagtgaaccgagattgcgccactgcactcaagcctgggccacagagaaagactctgtctc

SEQ ID NO: 61337 - DNA, 2423 bp, Homo Sapiens
gttcagtattcaaagaatgtcttaagattatgataattaaagaagtcccaggacgagacaaaatgaatcaaagattttgtatgcaagtccacaaagtctgtcagacatattgtaaataatttaccattgattttattttcaacaatgttaatgtattgacatttagcatatatctgttagatagatattctatcacaatgttttattccttgcaccagccctttactattttctaacaaaaaaaaaaaaacacaatttcagggcataaacaagaagtgtttatttttccgtagtacatctttgggttgactagagattggctgttctaagatgtgctcatgcaggcttgactctaaactatgcatttagagtcattttgttctggtctggtctacacgtaggttattcttttgaaagcagtactctgtcttaagcatgttcttctcttagtggagtttggagatgctaatatcgacaggtggaggcagaatgctccttaaagtctaaactagaattgccacactgtcttcctaaggttcataagccaaaggaaatctcatggcaatttccaacattagtgggacaagagattatactactcccaaggaagtggaggtggggaaaggaatgattatttctgtatcataatctaccatagtccttaagtgactgcctcttgctacttcccaatgttttactaatcacattgacttttaaaaaatagattccctaggaattcaagaaaaatacttattttctaaataaatcacagcaagacagacacaattgtctcactacccccaatatcctaacacactaacaaatacgtgtataatcatacacacacaaacactacaacatacacccctctatgatgttattaatgttatacagataaatagatgtaatatttctgtggattgtgctgcggctgtcctaaatcattgcacagaattataggtaactgcaattcatagggcttataatgttaatcattctaggaagtaattagctgaatgccttctgtacatttgctaggctaccagctcagcgacatgtattccatctgaaggacactcttcttgaaatacattatgctcccagtgtggttgtaatattatcatcttattatcaccaattcccttgcatggtggctttgctgagcagctgtttcacagacaagccaatttcttttaagtattgctctatcagactctgaaaccagttctaccagaagggttcttggtaatgaatgttaatgagcagacaagtatcctttctctgacagaggctcactaatcctttgagtaagtatgggtgaattacaggagaaattttatttaagttaaattgatctgctactaagtagagaaaacttattttcttattttaatgaaaatcaagaaaaaatatttaatggggatgtaaattacagctccctggaaacatttttgtcttctgactggagaacacagtagctcagtagactggttcaactgcatagtgtgcttaacactagcaaactcatgatctccagtgaggcctgatcttcagtgggacagtgggaaatggagtagaaaccactcactctctctgggatttggtaccagcagattctttatgttccttagtgataagtaatagggataaaaaattattctttcttcttccactgagccagtgtaagagttcctttttttttccaaaacaaataagatagtaaagccataagaacagcacttgtatgcttttgtattctaagaatatgagaaaaataatttcagtgaacctttatctgaaaggatataaccatgtcctgatggaatactgcgatgggcaggtagaagggaatgagatgggccaggcgcagtggcttacgcctgtaatcccagcactttaggaggccgaggctggcagatcagaaggccaggagttcaagaccagcctggcccgcatggtgaaaccccgtctctactaaaaaaaatacaaaaaattagctgggcacgggggcatgcgcctgtaatcccagctactcgggaggctgaggcaggagaatcgcttgtacccaggaggcagaggttgcagtgagctgagattgtgccattgcactccagcctgggtgacaaagcgagactccatctcaaaaaaaaaaaaaaaaaaaaaggagaggaatgagatgggcagaaagatgatcattgttgaagctggttgatgagtctttagggagttcatagactattctgggttgtgtatagtttctgaatttccataataaagagattaaaagagagagagaaagagagttggccagcacagtgcctcgtgcctgtaatcccacactttgggatgctgaggtgggcggatcacctgaggtcaggagtttgagaccagcctggacaacatggtaaaactccgtctctact

SEQ ID NO: 61338 - DNA, 506 bp, Homo Sapiens
caaaagataaaaacagtgccttagtgatttaaataaaaaaacaaaacaacagcaatagctcctttctacagcatgcaacaatataaaatggtgaactggagccacagagagccttacagagactgttctgaaattttagctttttccaactcccagccaaagccacgagaggtaatgaggaatgcacattagaccattgtctttttccttccatcgttttcaatgcgcaattctgttttctttcaaaaacccagatctgaaattctctcctgtaaatatcatccatatttgtctttacaatgtaatgatttccaatttccccagagcaacacaaaccaataatttcttgaaaactaaacgagaatagaaagaacttcgtgactgatggaccaagtcaccagtttcttcctcaagaaattcttgcaacttccttttgcagcaaactgtgcgtgtggagaatgagttctccagaagaacctggattgttaaatttttcaaaaatggct

SEQ ID NO: 61339 - DNA, 496 bp, Homo Sapiens
ttcctacctggtttagtactatatttgatccattctataagttcttcttggggcaaattgctgaactcccctacaatattccactgggtttgcagatttgctgaaccttgtattgacattgctgctaatatagcaaacacaatagcaacaggatgtactttgcaaaagagccatccaaatagctgaaaccaaattaagaatacattggtaattgttagtataagtagtatgcatctgttatgcaaaacttcttcccagagaagaataaggcctctgctagagtcccaaataaaggattaattatcctaaagaaaaagccccaaaataataatctttgggatcaaaaggattctaccatcagcctcatataagtggaacacaatgtaggaagctcttttctcaacctgctttcactactcccagattcaagtaaagccacaaccaatttacaaggcccagtacaaaacaaaaatgtggggtctcttgttaaaaaatt

SEQ ID NO: 61340 - DNA, 1247 bp, Homo Sapiens
ggcacgaggtaaaaagagactgtaaaagatagcaataatttttataatacatgttgaaataacattttgagaatattgagttaaataaaatatataattaaagttaattttactagtttctttctactttttaaatgtgactactagaaaatttaaaaatatataagtggctcacattcgtgactcagattacattcatcattcatactggacagtgctgggctaggcagtcaccacaggaaatcagaaagggcatctctcaagggttgcataccttcctggtccaataagaatatgagagtcaaatgcagcttctacttctcccaggcatttcaaattagtgccttgctgtgtgatagtgagttctttgctcaacccctctggactctcaccatttcatcccattctttattccccagaccaactccaggctgataggaaaaaagatgaaaacagattcttcaaaagcatgaataaaaatgacatgaagagctggggcttgttacagaaaaataatcataaaatgaacaaaacctcagagcccgggtcatcttctgcaggcggcagaactacatcggggccaccaaatcaccactcttcagccccatcccactccctgtttcgggcctcgtctgctgggaaagtcacttttccagtatgtctcctggcctcttatgatgagatttctggtcaaggagcgagctctcaggatacgaagacatttgacgttgcgctgtccgaggagctccatgcggcactgagtgagtggctgacagcgatccgggcttggttttgtgaggttccttcaagctaagccagctcagagaacacggggagcggtggtgctacacggacttcggagcatagagtggcgctgatggaaaaaggaagtccctgcagcagtccccgcactctttaagcagctgtttaccgaaggcaccagttcagccaggagtgaaatccggagaggagcaacgccagcctgggtcacagtccatcaaaccccatgagcccgaccactctcgctcttccttacattcccacgtcccccttctctcccaacccctcatatcagcaagggaaattaattaatgagatttgataaatcagtagatagaatgaggtccccattctgaaatatttagcagactggaaccaccacgcaagcctctgtagggggtggatggagacacttctaactttaataaactgcgactgaacgtgaaaaaaaaaaaaaaaaaaaaaaa

SEQ ID NO: 61341 - DNA, 483 bp, Homo Sapiens
  misc_feature (435)..(435): n is a, c, g, or t
catgttaatcattcagttaattgtgttacaatacaaatgaaaccaaatccatattctagacaaacatttaacataaatgcagtcagggtcaaagactttccacccatttatcaatatgaatatacagagtaagaaatgtgatatattgtataagaaatacaatatatgtaaatccatgaacaatctttgaaaattcaattctaagctttgatttgacatttttggtactgggaccaatcattcatcaatctgaaagacttagcgaatgactgttctgacttgggggcaatccaagttaagtgaatttagagttaatctttaaagaacaatctgcatttgagaaattatccatcaccccaatttcttgtaagacaatatagagcctgggctcaagctatcaaatacaaacaattaaaataaaaactactaaatgtntggaaaggacataaatgagaaatcaacagaaatgcaggctgatgctgc

SEQ ID NO: 61342 - DNA, 1170 bp, Homo Sapiens
ttggctcactgcaacctccgcctcccatgttcaggctgaggcaggagaatggcgtgaacccgggaggcggagtttgcagtgagccgagatcgtgccactgtactccagcctgggcgacagagcgagactccgtctcaaaaaaaaaaaaaagaaaataaagaaaagggatgaggagttcctggcatttttatttgtccccttttctccctctctagctctattaagacaaagcttttcagatttcacttaaacattaaccatagtttagaaattataattatcaccctatgacagaaggtaccctttcttggtacataattcaagctattaggaatttcttctgcattcactgggtttcatgaatgcaagtggtgtttgctaggtgcattctaaatttgacaaacatgagtgttgtcttggcctgcagacttaaaatagccacctgattataaaagaagtacaggtcttaagtgtatgtccaaatatggaacttgaatgatatggcaaaattagaaatgcaattttagaagtaattacactgttgtgtaaatggccacctcttttgaagtctttgctacattgcttataaaacactgagttgaacatgagaaagccttttgtccaaatatggaacttgaatgatatggcaaaattagaaatgcaattttagaagtaattacactgttgtgtaaatggccacctcttttgaagtctttgctacattgcttataaaacactgagttgaacatgagaaagccttttgtctgcagctgtacttttcaactggacatgaaccatgtacttttatggcacgtagatattcacatcaaatttctgatttgcagaccgattttatttttagttaacaaataagcttatcaaatgtggcttttgaactaaagcgcttttaattaaggagttataacagcatgttattttgagtagctgttactaaaatctgttgtgatggaacaatttggagtgagcatctgatatcagagataaagagagaagcatgcagtgagcatctggaagttcttgtaaaaaaaaaaacaaattaaacattctcatttgaatgcatttaaaatttttttaaattgccaattcctaagctttttctttgttagttgtagtttgctttctcgactgtataaaagaaaaaaaaaaaaa

SEQ ID NO: 61343 - DNA, 518 bp, Homo Sapiens
ttttttttttttttgagggcaagtcttgctctgtcacccaggctggaatgcagtggcacgatttcagctcactgcaacctctgcctcccaggttcaagcgattcttgtgcctcagcctctcaagtagctgcaattaacaggtgtgtgccaccatgcctggctaatttttgtgcttttagtagagatggggtgtcaccatgttgcccaggctggtctggaacttctgggctcaagtgatccacctgcttcagcttcccaaagtgctgggattacaggcgtgagccactgcgcccggcctctatcacacttcttatgccacccaggtaagcattttcatgtgtctgtctcctctccctctctggagaacacggatcaaggctgatatctttgtatctacagcaccagccataatcaccccctcttcccacagcacacacagggcaggcatgcatggatccttttgcacacaggcacacatacatgccctacttacttgggagagatatacatacttctct

SEQ ID NO: 61344 - DNA, 2139 bp, Homo Sapiens
atggcggagctaggagctggcggcgacggccacaggggcggcgacggcgcagtgcgaagcgaaacagcacccgacagctacaaagtgcaagataagaaaaatgcctccagccgccctgcctctgcaatttcaggacaaaataacaaccactcaggaaataaaccagaccctccgcctgtgttacgtgttgatgaccggcagcggctggcccgggagcgacgtgaggaacgggagaaacagctagctgcaagagaaatagtgtggttagaaagagaagagcgagccaggcagcactacgagaagcacctggaagagcggaagaagaggttggaggagcagaggcagaaggaggagcggaggagggctgctgtggaggagaagcggaggcagagacttgaggaggacaaagaacgccacgaagctgttgtacggcgcacaatggaaaggagccagaagccaaaacagaagcataaccgttggtcgtggggaggctctctccatgggagccctagcatccacagtgcagctcgccgcctgcagctcagcccatgggagagcagcgttgttaacagactcctgacgcccacacattcgttcctggccagaagtaaaagcacagctgccttgtctggagaagcagcatcttgcagccccatcatcatgccctacaaagctgcacactctagaaattcgatggatcgaccaaaactctttgtaacaccacctgagggctcttctcgcaggaggatcattcatggcacagcgagctataaaaaagaaagagagagagaaaatgtactcttcctcacatctggcacccgaagggctgtatctccatctaatcccaaagcaagacaaccagctcgctcccgactttggcttccgtccaagtctcttcctcatttgcctggcacacccagaccgacatcctccttgccacccggctcagtcaaagctgctcctgctcaggtccggcccccatcccccggcaacatccgccctgtcaagagggaagtcaaagtggagcctgagaagaaagatcctgagaaggaacctcagaaagttgccaatgagccctcactaaagggcagagcacctttagtgaaggtagaagaagccacagttgaagagcggacacctgctgaaccagaagttggccctgctgctccagccatggccccagctccagcctcggccccagctccagcctcggccccagctccagccccggtccccaccccagccatggtctcagccccgtcatccactgtgaatgccagtgcttctgttaagacttctgcaggcaccaccgacccagaggaggccacaaggcttctagctgagaagaggcggctggcccgagagcagagagaaaaggaagaaagggagaggagggagcaggaagagcttgaaagacaaaagagagaggaattggctcaacgtgtggctgaagagaggacgactcgccgtgaggaggagtcgcgcaggctggaagccgagcaggcccgggagaaggaggagcagctgcagcggcaggcggaggagcgggcgctgcgcgagcgggaggaggcagagcgcgcccagaggcagaaagaagaagaagctcgcgttcgtgaagaagcagagagggtccggcaggaacgagagaagcatttccagagagaagagcaagagcgcctggagagaaagaagcgacttgaggagattatgaaaagaaccaggagaacagaagctacagataagaaaaccagtgatcagagaaacggtgatatagccaagggagctctcactggaggaacagaggtgtctgcacttccatgtacaacaaacgctccgggaaatggaaagccagttggcagcccacatgtggttacctcacaccagtcaaaagtgacagtggagagcactcccgatttggaaaaacaaccaaatgaaaatggtgtatctgttcagaatgaaaattttgaagaaattataaacttacccattggatctaaaccatccagattagatgtcaccaacagtgagagcccagaaattcctttgaatccaattttggcctttgatgatgaagggacacttgggcccctgcctcaggtagatggtgttcagacacagcagactgcagaagttatatga

SEQ ID NO: 61345 - DNA, 2427 bp, Homo Sapiens
tggaggagagaagatggcggaagcggagtgagtgactagatgatttaaggaccatagtacagctatggatactgaaccaaacccgggaacatcttctgtgtcaacaacaaccagcagtaccaccaccaccaccatcaccacttcctcctctcgaatgcagcagccacagatctctgtctacagtggttcagaccgacatgctgtacaggcattgcatcggccccccagctcagctgctcagtaccttcagcaaatgtatgcagcccaacaacagcacttgatgctgcatactgcagctcttcagcagcagcatttaagcagctcccagcttcagagccttgctgctgttcaggcaagtttgtccagcggaagaccatctacatctcccacaggaagtgtcacacagcagtcaagtatgtcccaaacgtctatcaacctctccacttctcctacacctgcacagttaataagccgttcccaggcttccagttctaccagcggcagtattacccaacagactatgttactagggagtacttcccctaccctaacggcaagccaagctcaaatgtatctccgagctcaaatggtaagatatgagctaccaaattttttcagtgtttaaggacttgagagatcaaaatgtttcttgatttgatacaataagaggtatttttaatatttaagaaatgtttaattgtgtgtgtgtgcatgcgggcgtgccttcagctcttgtacatttatgtcatgaaagattctacttttaattaataggtcttcttggtatcaaatagtaattattacattgagaagctaatagagattcagtaacgtaagagtgattattttttaatatcaaattcattgaaaacctttttttcatattttaatatctgtgaaatttggatgcattttataactgatggcatcttggtacttacagtggtccataaaatcattgcctgtttttgtcaacttagatttggtgaaatagagatgttaaaaaaactttgttgttaaagttataatttgtatcctaggattttctgaattctatattggagttccggatagtctcccagatgattcttaactttggtttttcccatctcaaattctgcaaggttatttgtgttcttgtgttcattttgatattttatgaatataggaatgttaatttggttattctgtatttgagtatctacagattttctaatttaattgttgagcttctttaaggaatatagaaattggttgacatgtattttatttgatgtctttacaagaagctagacaaaagcattgtccctaatatatatttatattcttttttgtccagtggactgaatatatatctggatctccagtttttgttgttgttgttgttgttgttgttattgttttttgaggtgaagtctcactctgtcacccaggctagagtgcagtggcacgatctctgctcactgcaacctctgcctcccgggttcaagtgattctcccacctcagcctcccaagtagctgggattacaggtgcccgccaccacacccagctaatttttgtatttttagtagagacggggtttcaccatcttggcctggctggtctcaaactcctgaccttgtgatccacctgcctcacctcccagaatgctgggattacagacatgaaccaccacacctggcttggatcttcagttttctatctaaaattgcaaagtttccaatcattttactcatactatgctttaaaattaggttgaaccatttgagatggttgctatttggctatttttgaactctaaaattagcagtttcatacgggtcaaactaaattgaatatctcctttttaggtttagtcctttcagggtgttggtactggaaattaccttttcaggaaagttataccatttgtcccttggtgtctgtggtggattgttgccaggccctaccctctctgtcccctagaatacccaaatctgaggatgctcaaggcatagtatttgcatataacctatgtatatcctcccatatactttacatcgtctttacatatatttagtataatataaacatcatttaaataactgttatactatattgtttagggaataataacaagagaaaaatttgtacatgttcaatgcagatgcagctattttttttaaatgaatattgttttgatctatagttgaatgacgaagcacagagccttccataggtatggagggctcatcattgtactttgttgttgaatttacttagatttagtgtaccaaagaactgaagtttaaaaggtcacttaattggtcgtttaattttctaatttttttggatccgcatttggttgaacattttaatttagatagcaagaggaactgaataacccttgatacaattttgaaataaagtatttacacattctttg

SEQ ID NO: 61346 - DNA, 2339 bp, Homo Sapiens
cggacgcgtgggggcttttagccctgcggagggtggggctagagcaggcaggaagacgagctaggagcctattgctataatgtgggtgggaggtgagggtagcttggaatgagattgaaatagtggagatagtgaaaatagatttggggtacattttggaggcagagctggtagatactgatggattaaatatgaggggtgggaaggagtgaagagaacgtacacatgagggcttaagggtcttgctggagcagccggagtgggagatgctgtttgctgagctgctttgtgcgtctgtcagaaagcagcggctctctttcgggcctgctaagctggggatacatactaaacactgaagtggagctcatgagtggcacatggatgtttggatctggaccttgttcagttgaggggtcaaggatagatacatgaatttgagagcctccacttacagttggcatttgcagtcgtgggacagggtacacttgctgagggagagaatatggatagagaagagatttgaggacagagcccaggggtgtcccaacaaggtgagttctgggagagaagtcagctggggaattgcttcagtgtcctgaaggcagatcaatgagaaggagcagttctataaatagaaatccctgcagagatgttagaaaaccagcattacagcatgccaagagatagaatagtgattaataactgcttaaaagtgtatgttctgccactggaatgctaggaaagctacccaaaaaggctgttcctaattgaggaatatggttcttaaatgtttacattgccttatatttgtgatagggattattggctttgtgagcaaagctctttgacatttgtggatggagtgtactcattattgagaggaattttctgaaatgaatgtcagttccttttttcccctaagctttgctttgaattactatacagtttacttaagaaacctgtgatcagcgagaggaaagagaagtgatttctgaagcttctatggccacttcctgctgagtcttagcattctatcctgtcaagtatgctaatgggagaaggagcaacatctctggatacaaaggatcgccaggatgctgatgtgaatagtaggggtgagctagctctgtcctcatgcccagaccttgtcctgatctgtagcacacatttgagagacaggagctgtattgattgcctattgctgctgtaacaaattattacacttagtggcttaaaagaacatgtttattttatggttctggaggtaagaaatctgaaacggctctgtagtaggctaacaccctccaggtgttaggctgtaactcctgaaacgtggatgtagccttatgtggaataagggtctttgcagatgtgattaagcaccttgagatagggcaattatcgtggattgtcaagatgggccctaaatgccacctcaaatgttctcctcacagagatgcagaggaggattactcagaagagaaggcagtgtgaccacagaagtaggaattagcatgctgtggccacaagccaaaaaatacatgcagccaccagaagctggaagaggcaaggaaccgactgtccctagagcctctggagggagcacggccctgtcctgcctaccccttcgcttctacccagtgataccaatttcagacatctggagtctggaactgtgagagaagagttttctgttgttttaagccactaagtataggtaattattaatgacaatttgttatagcagcaatagggaaccaatacagagtctcactgggctaatccagtgtcagcgggactgtgttcctttcaggaggctcttagaatctgttttcttgactcttccagcttctagagtctgtccacattccttcactcatggcttcttatgtcttcaagccagtctttgacactttttagatagtgattcttctgcttccctcttccgcatttaaggacgctgtgattgcattagacccaccttgataattatcttaaggtcagctgattagctaccttaactccatctgcatccttaattgccctttgccatgtaaggtgtaacatactcagattctggggctatgacagagacatctttaggagctgttattttgccttaaaaaggaggcaattatttaagtatataaggtgaatagttaggtctttctctccaggaaacctaacttgtcattcagcggttaccatgcatgggtatcttcttccaattgcctgagccagccagactttcatgtttgagcattcagattgggctttatttctcaaggcatgtggcaaacctcacaatgacactgaaaggttaaaaaaaaaaaaaaaaa

SEQ ID NO: 61347 - DNA, 405 bp, Homo Sapiens
ttttttttttttgagacagggtctcgctctgtcacccaggctggagtgcagtggtgagatcttggctcgctgcaacctcctcttgccaggttcaagcgattcttgtgcctcaacctcccaagtagccgggacaacaggcgcgcaccaccagccagctaatttttgtatttttagtagagacggggtctcatcatattgtccaggctggtctcgaattcctgacctcaggtaatccgcctgcctcagcctcccaaagtgctgggattataggcatgagccaccactcctggcctgaaacttggtgcttccttttaataagacatttcatggtttcagaaatgaatttgagtcaacacaaattaccacatttattaatgtttcaatttaatattgctagatatctta

SEQ ID NO: 61348 - DNA, 1548 bp, Homo Sapiens
ctgatgcatgacctctttgacagttgcctttgttcatgattcctagtttcctggtttattttattggggtacagggtgaggtctggaagacctggaaaggaaactcacttttttggtttgacagtattaatgcaatcatctagttcataccttgtaagcccacttattatttcctctgcgtgtgttttttctggtttagcggattagctgcactgtctcttcaaaggctgtccaatcaaggaggggttattaaaaccagggcgatttatgactgagaattaattagagaagcattttcatgcacaacatccaattttttgattagcaatggagcagggccgcaattaacactcgaggaagcttaaatttccagctttttgattctcaggaaatgagattatcaaaccagggtcagacacttgacagcaaagtgggagtgggggagtgtgaaattatatgtaaaaaaaaaaaaaaaaaaaaaaaattccagagtctagaaattcggtcatttttctctttatgtaatggtaagaattaagaatcctcacatctgcaaccaaaaatacaagcctggtgtgtaacactaaagggtaaaacagggatagatataagctgttatgctattcttcaggcaacactgtggataagtgacattcagatgtttactgtaaagaaaaatttgaatacatttgtattgaagggcttttagaaaagagcattactacacagaactgagagttgaaaatatgaaggtgtggaagattaagagaacgcgtttactttaaaagataatttaaaagttatctttccaggctgacacggtggcccactcctctagtcataacactctgggaggctgtggtgggacgatccctcgagcccaggagttcatagaccagcctgggtaatatagggagaccccatctctatctaaaattttttttaaaagaaaataaatatctttacagttatttttcttagtcctatgttctttattttggtgttttccattggatacctgcatgccaagtgttgtgctacagtattactgaagagtataatggaagtaatgtcctgctgaaaattttctttgagatattaatcattaataatttatatattgctatttaatacttacataggtctttagccttttaaaggatttctgtttgacagcttttataattgaaagttattccattttttttttaattttgcatgcttgaaaaagatgaaaacagtgatttaaattatgaagtatggggccaggtgcagtggctcatgctggtaatcccagcactttgagaggctaaggcaagtgggtcacttgagcccaagagttcaagaccagcctggccaacatggtgtgaaaccccgtctgtactaaaaatacaaaaattagccaggcgtggtggtgcatgcctgtaatcccaggtacttgggaggctgaggcacaggaattgcgtgaacccaggaggcagaggttgcagtgagccaagatcacatcaccgcactgcagcctgggtgacagagtaagactctgtctcc

SEQ ID NO: 61349 - DNA, 557 bp, Homo Sapiens
  misc_feature (483)..(483): n is a, c, g, or t
  misc_feature (510)..(510): n is a, c, g, or t
  misc_feature (516)..(516): n is a, c, g, or t
  misc_feature (529)..(529): n is a, c, g, or t
  misc_feature (535)..(535): n is a, c, g, or t
  misc_feature (543)..(543): n is a, c, g, or t
  misc_feature (552)..(552): n is a, c, g, or t
ggtctactgaagaaatcctactttgtgatatcctcatgttaatatcagcatactctttctgagcaaataactctagtgcaaagcacagtacctggaagtatcagaattaaccagtaatgccaataatgcataagaattgttaatgagtaaataaaagctgattatactatatttattttttagtcagaatctctcacatcaaggatcacaatccacttccaagcaatgggtaaaagggtgacagttatcttctgaagattcagatgctttaacttttgggggaaaagtattaccccatatgcttcttataaagggctaaaatgtaaaaacgcatatacagaacttaacccttaactagaaagaaattattattaatggagtgtcattcctaaaaattacacaatacatccacactaaaggctgagaataataattctgaaggttttaacgactattctcttattctgagactcttttttgggnttttagtggagacagggtttcacccgngttggncagctgggtttgnaccccncacctcanggggaaccnccccc

SEQ ID NO: 61350 - DNA, 558 bp, Homo Sapiens
  misc_feature (452)..(452): n is a, c, g, or t
  misc_feature (482)..(482): n is a, c, g, or t
  misc_feature (491)..(491): n is a, c, g, or t
  misc_feature (517)..(517): n is a, c, g, or t
  misc_feature (524)..(524): n is a, c, g, or t
  misc_feature (528)..(528): n is a, c, g, or t
  misc_feature (558)..(558): n is a, c, g, or t
gagacagagtctcacgcctgtaatcccagcactttgggaggccgaggcgggcggatcacctgaggtcaggagctcaagaacagcctgaccaatatggtgtttttttcttttttaaagaagaacaatcaatcatattgccagaagaatcaatgacccagccctactgcacgccgagtggttgcgacaggcttagatattgttagaggtttgcttctgctgccaaaccgtttgcattctcctggggacagtgctctcctgatgtgactcttattctgaatttagagcagaaggtggtggcatatacctggtgagacccagggagggcaggatcagcaccatgaagatcaagaatatgtagactttggtcatcatgatctggttttcccccgacctgcaggaagtcaaaggtgagcactcgcagtcccccaaatgctctatgtgcccccagtgangcccctggcatgtgcccactggctgagcancttgggggntaaggtgtggaccaagggaccggcanagatatncctnttaaggcaaggccttgggcttcccggcacn

SEQ ID NO: 61351 - DNA, 1853 bp, Homo Sapiens
gatggagtatcactctgttgcccaggctggagtgtagtgactcgatctcagctcactgcaacctccacctcccaagttcaagtgattctcgtgcctcagcctcctgagtagctggaactacagatgtgcaccaccacacccggctaatttttgtatttttagtagagacggggtttcaccatgttggccaagctggtcttgacctcctgacctcaggtgatctgcccgcctcagcctcccaatgtgctgggattacaggcgtgagccaccgcgcctggcctgtacatataactcttaaaatgctgccctgaccctggggctcactttcaaagatgtccacactctgtaggccaggaccccacctgtcccgtacccttcctggcagccctgtccctgctacatcgcccttcagctacaccagctttctttgggtccctggaccacacctgataccttcccgcccagaagtgttatctctgtcctggcagttgctcaaccttttatggtccctaccaccaaggccatctgcttggttgacatacccaccccaactgtaattaaatcatccccggtgtctcctcactagacagctccacataagcacagctggtccttttagggctgtgtccccagcacctcccacaaaggaggatgcagttcatcaggatgggttggatgaacagcccattttacagatgaataaactgaggcacaggcaggtgcagaattttggcagcactgcacacctgtcctggctttgtcctcctccctggggaatgagcttggagcacccctctaggaactgggatgccagcctcttcccttgaccatcttggtccttgtcatgtgggccccagtaccaggggtggctttaatttggctgcccagggaggtggttcagggctgccaggacccctgaagtaggctctctgggctctgtcctttgccccccaacatggtgcctgtttctcctgcctcttcatgcagagtggccagctcctggcccattcagctctgagtttgagctcctgggcggagatttttgttgccttgtaactgggattcctagatccagcctccaccctctgattgccctaaggaggttttggggttttgttttgttttgtttgtgttttcgtaggatggtggcagtgattttgaggaggggaagaggaaggaagatacaagcaagggaagtcacaggctgtggtgcctaggcagaccctggtttgaatcttggccttaccactttttgcatgtaagtggtaggggcagcagatagctcaggacatatcttgggtttttttgtttgtttttgttttgagacatagtctcgctctgttgcccaggctagagtgcaatggcacaatcttgactcactgcaacctccaccctcccgggttcaagtgattctcctgcctcagcctcccgagtagctgggattacaggcaccggccaccacacccagctaatttttgtatttttaatagggatggagtttcaccgtgtttgccaggctggtctcgaactcccgacctcaggtgatccacctgactcggcctcccaaagtgctgggattggccaggtgtggtggctcatgcctgtaatcctacactttgggaggccaaggcaggtggatcatttgaggtcggtagttcaggaccagcctggcctatgtggtgaaaccgcatctctactacaagtacaaaaattagccggacatggtggcacacgcctgtaggcccagctactcaggaggctgagaatcacttgaccctgggaggcggaggttgcagtgagccgagatggcaccactgcactccagcctgggtaacggagcgagactctgtctt

SEQ ID NO: 61352 - DNA, 2306 bp, Homo Sapiens
cagtggaaagagtggaacgagaaaacctttcagactattgtgttctgggccagcgtccaatgcatttaccaaatatgaaccagctggcatccctggggaaaaccaacgaacagtctcctcacagccaaattcaccacagtactccaatccgaaaccaagtgcccgcattacagcccatcatgagccctggtcttctttctccccagcttagtccacaacttgtaaggcaacaaatagccatggcccatctgataaaccaacagattgccgttagccggctcctggctcaccagcatcctcaagccatcaaccagcagttcctgaaccatccacccatccccagagcagttaagccagagccaaccaactcttccgtggaagtctctccagatatctaccagcaagtcagagatgagctgaagagggccagtgtgtcccaagctgtctttgcaagagtggcattcaaccgcacacaggtacaattagcattaaacactgtaattaacagtaatactggggacagaattgagataggttataattatttttatctctttaaaaagctttatggatctcaggacatagaattagattaattaataatccttagttaatgaaacgctattaccattgatccatgcatgaccatgattaattaactaattgattaattttgatgaggtaatggacatctttgagcccaacatgcaactcaggaccccaaatgttactaatgacttgggtatgtactctctcatcctctccatttactgtttccagatgtaaccctgatcttgaattttgtgattatcagtctcttgccattttttaaaacaaatcataaaactatgcatgcccagacaatctatttttttcccttggttttgaacgttataaaagaaataaaattatgttttataattttataagtaaagttttatttaaaaatttataaaaatccttcaaaacataaaagttagatttaagatattgataaaatgataatggatagtttacttttatttttaatgtttgagagaattatatgccaattataacactaaatgttgaaaatgtaaacagttaattcacacgtcttatttttattgagggtgcttatatgtaagacattcttttctgctagtagttcttaaactggagtgtgcatcagaatcacctggagggctgtgaaacacagactgctgggcctcatcccatagtttctgattgagtaagtctgaggttggactcagaaatggacatttctaacaagatcccaggtgattatgatggtactgatccggggccgcatgttgagaaaaacttacctagcccttatatgagtaagaacaaagcagatgggcataatctcggggagctaacgatctagtggtgaaaaccaggtaaccagataattagagtaaaatgtgaagtgttatgagtaatgttggagagtgtaagcaatagttgtggtggaggttcatggtgagctggaggtgaggaatacttccaggagaatgaatatggtaagccttcaagaaaacagtagattaaaatttcagcaccctcgtaaatgcaaggcaggaagctaagctctatgtgggtgcaaagaggaaaaagataatgggcaagcacatatgtaaacaacagagtattaggttgtcaatgggttagaccttgaaggattaataaagtacagcaggcaaagatgatgaagaagaagattattattttaaggtaaagacattcataggaaagatgttgagttaaaaaatgcaggaataatttgaagacataaaacaactgatttctgagaaaaaccctgtgaacgtacagaatgtaggaatgctttcatttatctgatacctgttcagagacacatgataacacacgctgtagatggaccttacaaatgaaagaaagcatgctggattgaaacctcaataatttggaaaatacaggaatgtttccaaatttaatgattacttcagaagttaaggggctgggcacagtggctcatgtctgtagtcctagcactttgggaggccaaggtgggcggatcacttgaggtcaggagttcaagaccagcctgggcaagatggtaaaacaccatctctactaaaacagaacaaaacaaaaaaattagctgggcgtggtgatgcgtgcctgtagtctcagctactcaggaggctgaggcagaagaatcccttgaacccaggaggcggaggctgcagtgggccgagatcatgccactgcactccagcctgagtgagagtgaaactccatctcaaaaaaaaaaaaaaaaa
